United States Patent Application Publication US 2014/0057251 A1 - sequence listing, part 107

SEQ ID NO: 193442 - DNA, 2723 bp, Cannabis indica
gtagataaataaataaatatatacaaacacatcttcaaagtaaaaaagttgtcacattgtgcatcaaaactgatttgtagttacctgtttgtccataagcaaaacaagttgcctttgtgcgttgaaaaattattggaacaataggctccacagtctcacggtatacctgaaagtaaacaaacagcatattaggaatgttaacatatgcttacatccaaatacgatataattttaagcactattactttctaaaagtagaatattacctcgtcatttgacacctcctcattcagcactgcatcaaaaacaaattcatgtttttctacatattctgtaaggtcaacctgcaaaaaattaagaaacatgtaaagccatggattattaagttgtacaatacaaaataaaaatgaaaaagtaacaataaaaaatgtacaacctgttgtgatatttcatattagttccaaatactgaattgaattttcattttctcacaaatattactttaatcggcccataatgaagcaagcaaaaacttagcataagaaatgcaacatttaccttgagcttagtctcatgaacggttagagaatttgaatatgtatctatgatatcttcctcattcttagccagttcctttttgttaagtggtctcttccgaacctgtaaccacagcatcaatctcagatgttgaaaaaacagcactaagaggacatataatcaatcttatccagattaaaccatattgttaaggctgattagaatacagaaaaaaccacatttacttacaagcaaagcaaaccatttagattgaaatcacatcctctgttatgattagaaactagttgaggaacagaaaagagaaaggcataccacaactttgatctttgctacagcactggctttctccttgtctacagcaatacttttcaggaggttgttttctggcaaaccacgagctctgcctgtttgcttggtaaggtagggttcagaatcatcaaaacttcggcctcgaacaggaggatacagagaattaccatcatacagaccagagactggcatctaacaattacatataaaaggatgtaagcagaaaatatagccaaatatgcatttcctattttagacaaaggggtaaagaaactcactaccacctttcttaatggattgagcaaatgacaatgcaagttattattcacagagatttcagtttaaaccaattcaatatatgtttcaacagagctacagaatcagttcatcaaatcaaatgtttgagttcacacattacaaaaacatatttaaatcaaaacaagaaagcaaaatgcagtcttcccctagcgaaaaaaaatgtaagagactcacctcagggagaagctcggtgtcaaaagaatgcagatccaacagtccaggactaaactcattaggcgagtcatcactgttcttcctcctcggaggagtatttggctccatgtaaaaatcattgaagcccctctgagcattccgatacattctagacccttgcgctccaccaccaccaacaccaacactaccgtagaaaccaaaatcctgcttcgaattcgaccatcaaagtagcacagtcaaacagctgagataccaattatagactcagatcttaagatcaaaaaaatcatatgtttaaacccatctccacacgcaaaatcctccatctatctatcttcaaaataggctctttcactttaacggattttctgggaaagaaaacacaaagtaccaaaaccaaaaccaaaaaaaaaagaaaaccttttaacctgaggaatagcactagaggcgttggaagactgaagatgttgaagaccagctgactgaagccatctcccgttagaagaagactccaaaaaattatctgagtattgacgctgatggtgaaccccagttgtaccagatctctgcccttgtcttcccataccgttcatactcttctcagaagaaaacccagctcaaatctcgaccgatccgaccctctctgagaatcttggatcggaaagccttaaactttctctctctttcactcaacaacaacaaatcgctctcagatataagcaatgcaacaaaaaatgtaaaaatcaaagagctaaggcctcactcagattgaagttgaacccatttcaaatcaaaaagcagtaatggaggctgagcttgatgattgagtaaacccaaagatataggaagattgaaagaaaagaagaagagaagctttgaatttttgaagaaaagctttgcacgtgcgagattggatttgacacgtgcgagtgtgtggtttaaatggaaggaggaggaagagtctttaaacgacgacgtgtcgtatgggcccttctttagtctctattctctaatttatgtttccccaacgtctcacgtggtggggtccacattggatattgcctattcaaaaaatgtatatattatttatttattttttaattaattgggcgcttcgacttcatattcaaatttcgaacgccacgtgttctgattaggtgacttgaggagttgagttaatcggacggtggagtttgaacagtaccacaatctccttggccgaaccaagttgcgggacccaccactgccgcactacacttgttttttgtcttgggcaattctgttttggtgttaagatttgtcaaggaaatttacctctttgttgtattgttggagttgattatgttattattacaaggagtctt

SEQ ID NO: 193443 - DNA, 758 bp, Cannabis indica
cgcgaaatgaggaagatcgccacgttagaactcctctctaaccgccgtctagagatgttgaagcaagtgaggatttcagaggttgaagtagggattagagagctctacaagtcttgtaaagttgtagttgagttgagtcgttggttagaagatttaactcttaacatggtggtgagaatggtggctggaaagcgttatttcggagcatcgggtagcgatgatcagagtggggatgaagcaagacggtgtcataaggcaataagtgagttctttcgtttgattgggatatttgttgtttcggatgcggtgccatttttatggtggttggatttgaatggccatgagaaggcaatgaagaaaacggctaaggaattggatacaatacttgaagggtgggttgaggagcatcgtaagaagagggcttctcttagtaaggccaccaaggaagaagaagaggaggatttcattgatgttatgctctctcttcaagaccaaggagccttatcaaattttcagtatgatccctctaccagtatcaagtctacctgtctggtacgtataacgtttcttaattttacagaaattttaaaattaaaaatatgatgggccacgttgcatgctaattattaaagaagcatcatgtttcatgctagctatttaatgttaacattgtttaattaatatatatatatatgagcattgctattaggtaacagtggtgcttagcactttctcaaaatgtcgcgttgtgattggct

SEQ ID NO: 193444 - DNA, 2186 bp, Cannabis indica
tttacggaatttccttttgatttgaaaccaaaggcaaaactcctcactgttccgagcgtactgggcagaggtaatcgacttcgtgggagcagtaaaagatctatgtttattaatttcaagaaaattgattttattcatttgttaatgatttttttcataaaattttgcagccggtacaagaaattttaaggtctatacggaaaaggaattttctgaggttgattctcgtactaggtatttatggttctaatattagaaatcagtagttctgccttgaatttatgttattgaatgttagttgtggttaattttgaagaaaatattttcaaggaagaatggatatacaaaatgttggacttgatgtttaagatttcacaatatttaagaataaattgaaatgttagtagcttatgaaacccagttcatataagaattcttaattatttcaaaaataaccttatcatctggaagtgaatttattttttttttttgtagagaattcttacgcttaaagaatctcctacaaaacatcttgtgtgaacctgagtagaagctatgtagtattatagcttaggcatgctaggaaatataaactttattttctttaatatttccatatatccattagttgaagcacagtggttcatgaaacccagttaatttagtgtctttcttttactacaatgggtaattaaacccatgtcgcctcccctcaaactcacatatcggaccacctgagctagccttagagtggcttgtatacatttattttactgggtagtataagttttcctatctattcttacagattttgaaattaattatcttttttataatagatcttatgcaatgcataaggtagctctacttaatatatagtgtgattttttttctcaatatttttgtaactcatttttcctctgtttgtttggttaaagaaaatctataccagttaccaaagggtctactttggccagtacgagttctcagaaggtattactatcatgcttgagttcatctatattgttgcactatgcaaaagttgtgctttgatttattaaactatccacggttcctctttgtctgaatttattttactaaggcggttttgacaagtgtggagacgaacaaagggaaaaatgatagttttggtatggcctagactaaacttgtgcttgaattttcaacgattctttttctaaacctctttcatttatgagctactttcctttttaggaaaagcaaagtttggaagaagaccattggcagatgtcagtaatgttaacaacatatcttcaaagaatttggtgtgcaatagctctaaaccttcgtaagtatcactcattttctttagtttctttcttctagtttcatttcaacataatgtgccaccctgtacacctttgtacgtataaatatataatatatgtatacgcgtgtctttgtttatatatcagcagtgtaatatatttatgaaatgatattagggttatataatttacttatttaactatgtaatcgcacatatctattataacattttttgtagtgtagatcatatgcttaaggaaactgatacttaatatcttgtatgatacttgacctcactattttcccattttccttctgcttgtttggttaaaggaaatttatgccagccaccagaggatctactttcgccaatacaagctctcaaaaggtattaatatctagctgttcattcgtctgaattggtagaaggattgcattgattcaaactaaccatggcttctccttctctgattttctgctaaggctgttttgaaaagtaaggagacgagcaaagggaaaaacgatacttctggtatggtctacttacagtctagactagacttgtatttgaaacttaaactacttatttcagaaattctatgatgaactactttccgtttctagaaaaatcaaattttgggaagaagaccattgacagatgccagcagtactaacagcacatcttcgaggagtctgttgcgaaatagctccaaaccctcgtaagtatcactccgtttctttaattctttcttcaaatttcattttgacttaatgtttcaccaagtattaagtagcattttacgttcatataatatttgtacttattatacttggatgcatattaaatgcatggctatgtatttgcagatattcat

SEQ ID NO: 193445 - DNA, 2201 bp, Cannabis indica
ataataataataatatatgatatgggaacccattgtttgtggacaaatctttgaaatggcctcaattaattaattaaattctcaaatcaaacatccaaaacactatacatacacatataaatatcatgtagattttattcatttctttatttgtggaggaacagttctatccttttttagattttctcctttcaaaaagttttgccgtgttgattttttttttttaacattaaaaaaatgcaaatatacgtacgcatatttatttagtagcaataataaatttattaaatgacaaatgtagttggtggacttttgtaatgtatcacacacacaattactttaaatgcttttttataattagacaaattaattcatgacacttcttatttttaccaagttgacccaaaatctataacaaaagcacaaaactaactaataaacaataactagtatatactagtggattaatttattattaatattaattatgtcaacatcataatatatatttaaatgacacaaaactaaaccacatgttttatgtaacacatgggtttttattattacatattcaaattacaactacaattaagatgttatttgatttaaacacacccacaaattattgaagacaatgtaatgattatctctcgtatggttttatatatatgcagccaccagctttttttttttttttttgaacagcaaaccagacctaccaagcccaccatatatgatatatattactatttatctcaattattcaatttcaaccaaccaataacatgcatgatagaaaatgttttatgttgtgatatacacacatatataaacattcatatatacatatatattatttcgatcaaaataatgatatctgtttctatttgttcacagtaaattgtcgttgacatgacacatcaaaaatccctagtaaataatatagaggatgttgtattctttcttgctatataacctcgaagtttcattcaaaataacacattattaatttatctttttttctatttcttgaaagagacaaaatatacttatgcattgaaatggacagatgaaacgaacttaggcaagcaaactgatcatatggcccataaaattagaaagtttaatggtgtgagaaaattggtgtttattgattaaaactcaatataaagttatatttaagaaaaatagaaaaaacagcacaagtcaagtactactactactactagatagtagtgccttcaaatacgactttgtttttatgggtaccacacaagtggccaattgattgaattggccttattcatatattgtattttatttggttgatattgatggccccaaccctatagtaaaagaagaagagagaacttagctcataaaacaatcataagaataaattcaacaaaatgaaaaaataaaaattcattagattttagcatacagttattccaaattatttggctattaattgagaattgctatttaaaagtcatcactggtacaaatattaatttgtcttaaataaaaaataaatctctaatattgaaagaatatatgattcaaaagaagaaaaagaatgtttcgaaaaaaagaaagaaggataagaaaaatgagctcagaaaactgggcatcataacttaaaagtcatcactccaaattattggtattaaaattaatttctaaaaaaaaaacaaaaaaagattcgttggtacaaactaataatatgcgatttaaaaatattgctttgaaaaaaattataaatgagctcagaagcgttgacttttcgtcctataatcagacggttgagataaacccctctatcacagataacgctagatattcctcacagctcaaatgcaccagccgggaatcgaacccgggtctgtaccgtggcagggtactattctaccactagaccactggtgcttgttgatcaaggtgtcctatataattttatatcttaaaaacaataattaaagcttgtcactaatatgatacatgcagcaaatttctaatattatcttgtttatccttaaactattgaaattgtggaatttaaagactgttttctaattttatttaattttactaattcggtaattgcccatgtactaaatcttgctttccaaattttgatatctaccgaagcatgctcatcgaactttgacaggtgttaaatcatactcctgaactttcat

SEQ ID NO: 193446 - DNA, 1006 bp, Cannabis indica
ttgtctttgacttagaacatgagtgtcggattcattttgtctcatcatagagttgtgaagggaaaacaacaaaaacatggacatttatttatacatgacttaaggccagaagtggttgaggtttttgtagtttataagataccaaaaaatgtttaattataggtctgtcatgtggccgtaaagatgaagacagtggatgccactgaagttgtaggcattcctcagttggtagttgagatcgcagaactcagtaagataaagtgtacccctaaaaaaaacgattaaatccaattaaatatcattttattcttcttcttattatttattatctttaccaaagaaagctttaaaaattaaaatgcagtcctccacttatacatagcactatcacattaagaaaagaaaattcattgagtggagtgtttgtgacgactatcgtagtgtagaagtaggtgtagcaagtaggcattatctcattttggctagacaatgggtgtgctattgcattatgcaattatttttttccactaacacgcatgctcgatcaacaagaataatccttaaaaaccaaaaataaatgccccattattatcattataattgggttttgcttcttcaaccattcaccattaggcactgcaatggtaattcagaggctttcaacatactgcacgtcttatattaagcaaattgttacctaatactaaaatggtatgggttcgttgggtcattaaactgggaattctaaaacttatttaaaacaaaattatgatgcgttgggtattattacttatttgagcacctctatgatgagaacctacttgattagatgagacaatacactattcaacctttgaaagtgaggttcatgtgagtttgcacttttatttgagtatgaaagagtcttcatcagaaaggtccaaaaagtgtgtttggacgtttagtttataacaaattaggaatgatctcgtgagtgaatattgaataatgagagagagagagagag

SEQ ID NO: 193447 - DNA, 1853 bp, Cannabis indica
ttcggcatgatctacctataaatcaattttgtaactaagaaaacatcatcatattaaaactattacacttaaaagtctgtaaactaaaattaaaaatatcaatattattaaaatcacaattgttattagtactaaatgtatttttagctgtatacaataacaaattttctcagtataacaaattaattgtgactataaaataagttagggacaatttgtggtacaataacttaaatattatattataattacaagtaaatttttattgtaattaaaagtgccaatgagcagcgtacaaaatctatattatgactaaatgatatttaattgttctattttattatatcttgcacagtataatatacatggtacaacaattaataattttttttgagaggaacaattaatacaatttaatattaggtccattaaaataaatatgagacgacttctaaaccttctaaccttctcggtctattgtaaagtacatttacagtcaagaattttgtggccgactaaaaggcctaaccattttcttttctacaaattcctagtatacttttttgttaagttgtctccatatttatattgtgttaaaatttgtattaaatttagtactatagattagacatatataacaataaataaacctttttaattttattattgtaataactaattaattatagacgttaatataattttttcaattctaatattgctactaattattttttaatcaaataattactttatatattaatgatattttttttagatattactattgggcatgactagtgatgctcaacattttttataagtggtgtgtttagcgtattttctaaaagctatttttttaaatcatatagaatttgatacttaattatattaatagcggtatgagactaagcaaggtattagacaccaataaatatattttttttatattaacttgcatcataaaatactttatatatatttcttttaatataactacttaggtcctagatgctaactgaaccacccccctcccaatattaaatcaacaagtcaaacttaacaaaaagctataacaaactaaaataccagattacagaccattccctaactttataactattccctaattttttcattcattgcagggtttgaaacataatcaaagaaaatgaatgaatgcattttattaaagcacttcatatggagaaagtaacaggttattataccaaacaaaagggaccaaaggattatagatgttccctttcatattagcaaaattagcaacaagtcattttcagtgtattaaatccacaatattactttatcatcatagtgagactgagaccaaaagattcatataaaagtaaatttccaaaattgcttttaatattgactagacagttacattaatcatatattcaacaatgaatatcaggaatcaaatcaaaaatagcacataagaaactatatatataaataatatataaatatataactatatacattctctattttccaaagttagtgtacgttggaaaaaaatatcaaaatacacattagaaaaataataaaaggagagtttgtgtgtgtaacattaactcaaataatctcctcatatataaaaaaaatcccttacacaagcacaaaaaaataatttagctgcacgcatgaacaaaagggtacaaataaaataaataaaaactaagtcaaaaacataaaatgttcaataataataaaaaggataaatttgcagctacactatttatacatttagatttggtaggattataatctgtagactgaaattttgagtagtaaaattactccaaaattttcactatttgttttga

SEQ ID NO: 193448 - DNA, 1591 bp, Cannabis indica
gaaagatacattgatattgtgtagtttaagctatttcataagttttttttcctaactacaagcttaaagtaaataaaatgtattagaataaagaaaataaaggaggagggatcaagaatttcgaggttggctagctatgttttaccattatgtatatatcatgaaatcattggtcgacaatctaatgagacacaaagattttgattctaaaagattagttataaggtacttcacctttggccagggttgaggataaagatttggagcatataccaaaagaataacaagccaccatagttatataaatattatatatatatatatatttatatatgcactgcaaaaacagacatgtttaactcatttggaactctcgaaaatgtcaaaacactatcctctctcaactattctatctatcttcatctcttttttttttgtctgggagattttaatcgctgctttttcttggctgaaagtttttaatcttatccttacatatatatatatataacctttatctaaaatagataaatgaataaatatatataacatagttaagaaaaagaaaattctcttgcatttgcaatataatttgaacacctagtcatatatatcctatacccatatatttatatgctgtaaaataaatggacttcttgctgaataagttataatgtccaatgaggtctaattaagtgctaataaagtttactgtgatgaaatataatttcaatttaatatatgaatttatatatactatattaataatatttgagataggattatacattagcaatatatagtattccaatagcctcctataatcttcatctatatccttatcatttcactttattattttttatttaaatcaactttagagagtagtgtgtggcggtgtgaacggtacgtatactgttcttgcccatcacaaatttttggcttgttaattgaacacaattaattcttccataagtacacacttattattatatatatatataatagcaaatctcttttcctaggattagaaaaataatgttttatagttattagatccaatatatatatagagagagagagagagagagttaaatatctaattaacaacattagcatatgtgctgatcttaattgttggcatctttagagatatacttggttttcgataacattatatatttcttatatcatatcatatggttctatttattaaagattaagctaactttaattaattattgtggtgatccgatagtaaagttatagttccgtccttgaagcactcaagaaaagtttggaagcttcttttctttctttcttattttttttttcattgtataaattggattttattaacaatttatttaaatatatttcatatctgaaactgatgtaataataatatgtatggtataagaacatacgcatattaatataaaataatgttcgatcgtttgaataacaaggacatgtaaaatactgattctaagccagaaaaagaaaaatgatcatgcaaatcaaataatttttatatatatattcgatcggtttagattgttcaaagatttgggaggaacataataataat

SEQ ID NO: 193449 - DNA, 524 bp, Cannabis indica
gaagtgttgcagttgctagaacaagaggttatgtcaccatatcctagcgacttttacgagtcccaatcagattattcttgtaagacataactaaattagtaagttatcagacttgtgcagcagaattgtgttgcttctttctccaaattttctatctttgtgagtggtatttgcccctctcttgggggcctgtaaaaaaatgataacttatcctagaaatctttgtttcgtctggtgtctcacaagttttccaacatgagcacaaaattttctttatatgcaaaagaaaattattatgcgccatcaaatgtaatctatgcttgcctaagtccacactaattaattcattagttatatttcacgagtattcaattcagagctacaagaatatgatgaaatagggagctaccaatcaaattcattagcaagtgttgttttcaggtctttttaatggccaaaattcttattgagagcaaaataatgtatattcattacttttcatttgtaatttcaacattactact

SEQ ID NO: 193450 - DNA, 2042 bp, Cannabis indica
ttaaagaaattaaagagacttgtgcactttaattatgggttctttattgatattataaggggtggagtttaccaagttatataaatataagtcgatcgggtacatgtcctaattttaagtatagacatatatacatcatttgaaggccattgaatgaatgtaatagtcatggagacagattcctggtaccatacactctctttttctcttcaaacatctcaagagttgcttattatttagggccatacccacatgcccaaaggcccatcatataatttggactttccttttgttttcaatatataaaactgttctttatttaactcatgtctcatgtcagatatctttaattaagtgcacggatacagtacatatatatttatatacatttataccatgatcattatttataacatgcatgggcttagtttctaatttctatgatcgattgtactttcttttctctttaagtttgtataaatcggcctttaaacaaacccaaagggtgcatttgagttcaatattaattgttattattctatatgcaactagtatcaactaatttatttcattccactagacctaaccgtgttgttattttggacagtttcatgctgtactctctctctctctttaatactatatttattcatgtactacttcaccggcatgcacttataactatgttaattataattatatggtgctttgttaaattaattagctggatatatattgtttattatgttgtaagaatattatatgtgtagacaatatcattagccaccaaaaccataaatatatttatatgaaggacaaagattttagtaagtacgtacttactggctctccctcgtgatatatttaaaactattcctctcagcttggagggctcagtcctataaatatataaatgcatagctagggcttatgagtatagtaggctatgtatagggacagctacaattggaccccaatgccagtttaattaattaatatatctttaatcgtgtttttgaggctgatattatgacctaatagtaatcttataagattctctattcgtggtagttgaagtgctttcatggcactacttttcagtaatattatcagttatatatataaataattgttaaagataatatatatttataaaatggcggccactctatcgctacaattttaattactagggtatattatttgagaggtttcttacaacaatataggcatggatcaacacaatgaaatagaaataattatttaataaaggatcttgctcgatcattctcatgatcataattgggataaaatttatacatgagatatatgttaacaactgaaaattaccatgagatacatgatatatgttaacaattgaaatttcaaatctcaaatttttaaccactagctataatttgaacacataatataatttatatataagattattagtttgttctcattattttgcttaatttattcctatatacatatatatatacgtgtaaattataaatagtgaatttgttatatacattagtatatatatagctatatgcaaggaaatttaagtatatcaccatgtatcaagaaagaaataagataagaatcagtttatagttaaagactttgtatactaaagtacgaggtatcatatgtttcgaacagctttcgccataaaaaaaaaaaaaaaacgtaggtagtggtaaaactttagttgtgaattatttctatatgaaggatgtgtggacatttaatataatatataagatgtatggattattcatttaattatttaggtagtttagtagatgaaatacatatatatgtatatctcataatattctactctctccagtctccaccatacttcaacactctggacatggtgtaaagtcaaaagagttattgtgattcatagataggtctaagattaattggtgagaaaaaaataaaataccatcttaagaagatgttaaacagtcttacattaataatgtatagacacttaatacaatatataagatgtgtaatttttt

SEQ ID NO: 193451 - DNA, 571 bp, Cannabis indica
atacaattgttcttcctttgaaggttataaagtttcttaaaatactctttaatataagccatattataaagttcgggcacctatatatatttacaattataaaaatatttaaaaagaaaaaaaaatattaccattattatgtaaataaaataatttcaaagacaagacaaattaaaatttaatcttatttaattaaaatccataatattcattacattttgataagaaattgtctataaaaaataaaacattgtaacaactaaatatataagagttaacaattgtctttggggaaagaatctcatactacaagaaaaaatatataccaaatgaaaatgaaaaaaaaacaatcattagaataaaaatataagtacaatacacatgtatttggtaatatatcccaatatattaatgaaattttatggcttgtatttgaagaggaaaaaaaatagagtacatctcaatcatttaatcttgtgtacgtatgtataaaattaggataaactaataattttaagaataagcttgtgcttcagtatagaaacaagattgggaatgatcatatcaaaaa

SEQ ID NO: 193452 - DNA, 2382 bp, Cannabis indica
ctatcctgcaagaaagaaataacaaaattagaatattcaagagccagtaatcaaatttccagttcaaaaggcaggaactaacatcatgtctttgcaaacaggttctctcaaaaatttgtttgaacaagaacaaaaatctcacatctaacaatggtgacataacaaaaagatagcacaggctgaaaccattatgaatattaagcataatatattatttctttcaactgaagcacaagacacgacagaattactaagcattcacagctagcacgaggctaggcattagataattagctaataaattaacacttacatagttaggctgtcttgaaacttccaaaacatggttgttcttactgacactcttggcaaatgcatgttgaggaactgatttcacaggcgttttagttgcggtttctccagaattctgcttagcaggactcttttcaagagcaattatccttttcttgtaaggctgggaatgtgatgtgctatcaggagagaacattttcgaaaatctaactcgagatttatcattagctaacaagttaagacttacatcgccaggctgcttacttgcttccaaaacatggttagtgggcacactcttgtcatatacatgttcaggaactgctttcgcaaacgttttaataggggtttctccagaattctgcttagcaggactcttgtcatacagagcaattatccttttcttgtaaggctgagaatgtgatgttttctcaggtgaaatcatttccaaagatctaactctatctttgatttgtatgtcaggctcactcccaccttcaacagcaacatatttcaatttggcagagtcacttgaagatgaaccacaaccatgctccacaagtgaagctttgccggcaacattctcagattctgcacttccaaaaaagaaaaatcattccttatacattggtgataaaactttagcataaaaggaggaccatttggctttcatagaaatcaccttttaccaaagagccatttctactagcaggagagggaattttacatggtatgtcaacccccttgtttaattttggtgagggagactcagtaaataattgatactcatgccttatctttatcttaggcttctgaatccgctgatattttctctggttaaagaagaattccactacaatgcaatacagaatgtttaagactaagaaataaattattcatacaacccagttcatattaaaaaaaacactttactgatcagaaatgactgacctttacttccacaaatctcatcaggaaacttctctgatatttcagttttacctacatcaaaagtgcggtagaaaatgtagtgtgcctttctcaactcctcttcagaaggctgaggatttctcttgtcatctgaggtgcatataacattgcatttcccaactacattttcctgaagaagtataaaccatgtaacaaactataataaattatggccataactcttcaagtttttaattaacatttgtgaaagaacaagaaaacaatgggcgtctcagatgaaatgtcatgacttaagaactaacaaaaaacataacattttctcacaagtggcaatgcaaaacaacataccttaaatatatactgaaaaccaccatcagttaaactcaataatagatcacaaatgggaaaagggtattatagattaaaactttaccgcatcattgaaattgaaaagtccttttccttgaccagatgccaaaaacagctcattccattgtggttgtggtttagcattaccaagatagttacgtatttcagtaggacgaaataaccacactacctttactttcctttcatgatttggggtctcaagtattttcacaagcttaccaatatatgtctcaggattaccaacagagtaaaagcacacacagtcataaagagagtattcaatgccccttaaagtaaaagaattaaagaattgaatatctttatttcttacaccatttcctatcttggtaccccacttaaatccaacttcattatccattctccacccaagctttgtgaaaatggctcattagtctttaacaactctaaatgcttattgactcatcggatagtctttgagaacctaaccattaaaacatggattagaatccctaatcttgtataatatgtttcaaaatcaaaataaccaacagaaaaaaaatgataaatttacaaaaagttgaaagagaatccatcaaaatcatgcttctatgtcgctaaaaccctacaacaaaaccctacaatctttggcaaagttacatttctctggtaagaaattaagtatgagaacaagttagaaagttccaccatgactataacagttacaaaaaccaatacatatatatatatata

SEQ ID NO: 193453 - DNA, 1733 bp, Cannabis indica
aataattctcatcaacagtacctaataaacttaataaagtgatggtaatcctcttaactttcctaatagtaattattatgattatttaccagggacaaaatgtaggtttaaaacagtgccaacaccgccttcgccttcgactacttcaatcttttccagaacagttgtgaggttttcctcgaccagtttcggcagctgaagagtgccgtagatttcccaaactttggcggccggtgctgccacttccaactcatgggaaacttgtccactcaccatatcttccttccttttgttttaatttgttggaaatgtatggtggtaagttgagtatttatttcttcattttctgttggatagactattgtgtggtagtgagggaaatggttattattagcatttaaaaataaaaaaggacaaaacaaaataatgcccatattggtaaaaaaaaaaaaacctctactattaatatacgtggtcctgcattgtctttcattaaagaaatatagtttggggtaagcttcttacttgtgaaaacaattcatcaattagaagaatgttatgttatttcatataatatatatatataatgttgattaaatgaaacaacatgttgggtgtgcatatatattttgttactgaaatttgggagatgaatttagagtaatctggtaacttaaaaccaaaagcctgtattttcccaccagaaagctaggggcaatatatagcctggcctttgactgagagtttcttttggatgttgccaaccagattgtatgatctaaatctccccattaaacccataaacacccaattcatgaatggtagcaaccatggaggtttggggatttgaaatcaagggtctcaaacttcaaattaaaagtagagaccaaatgctaacgtgtatctactaacagtgttacatctcatgtatctaattgctctacttctcattctctttctaaaatcattgattacagcaggttgtctcccaaatttcgtgcatttgtgttagctattttcagttactttgagccagaattttataatcaagccaaaggcatatctatttggaacaatgtcattaatactgagatccaagctcttgaagataatgacacatgtattgttgttactttacctcataaccaacatgctattggttgcaactggatatacaaaattaagtacaatattgatggttctgttgaaaggttcaaagcaaagcttgttgctagaggagacaaccaacaaggtgttgattataatgacacttttgcctctgttactaagcttgtttctctcaagcttatacttgctctagtagccatttcaaggttggtttctacaccaactatagccgttaacaatgtatttctccatgaagatttgaataaagatgtgtttatgactaacataatggtatactcctaaggggcatgtggagtctcaaactccaaacaagaaccaacacaacaccaaaacagaacaaatgatcaaggaatgggttgtgcctcgttctttcaacttgtcgggccgctaccttaccttgactcctacattagtatgatattatccgctttgggcctaagccctcacggttttgtttttgggcaccttcccaaaaggcctcatactaatggagtagtgtccatccttatatacccataattctttccattcctagccaatgtgtgacttgggttgatacttcaacaattctcccctcaaaccaa

SEQ ID NO: 193454 - DNA, 2072 bp, Cannabis indica
aaaactgacagcaattcactatcgagacaaaaaacagaccaacattcaactggagatagcaaagccaatcataatagtctttagtcaataagtcatcccaacactctccatgtcatcttctaagatgaacgtctttaaaagatcacttcgaccaaacacagatgtaattaattttagcttttagctgacaagtttttactagatttatgcttgacacacactgatatttgtgccaaagctacgtttttcttagttataaaagccccacacaaaaaagaaccaggtgtcatagaatcatcaaagcaacctttaggacagtaaaacaccatcacctccaagagattatgatgtcaattaaggctcgggaaagcatatagactaaagttgcatggatagaatcaagaaggaagctcctcccaatagggttctagtcaattcaacaatcaaacgctagtagagatacatctgaaaagctataaaatctagtaaaactaacaaacgccatccaggatttccccaactcccaatttaaatgttagttcttctacaacttcatcatgtcaatatttctggaacaacattttaataaacactaacaagataatttaatcaatatttatagcatttgtgattaaagaaacaaggctgttgtatgtatctttgcagcctcatatcttgacaagtgcatccttcatttttgtccttcttgtctattttttacaatctcatcgttcattttgttattcttgtcctattttggcagtgtcttactgaacattccaatctagttcctcgtaaatttttctacagtaacatatttagttcccataacagtgaattcacgttcatgctcacatcaaaaggaacagtaccaattccaatcatctcacatcaatttttccaacaacaagaaactttcaactttggaaagaaagccaataaaagcataaaaattaagaatatcttatccatttggagtttttcaactatagttttggtttagaagtcaacaaccactagaacgtgtcctgttttcacaaaacccaaatcatataaatcatcggtcgaattgactttctgacgccatgccaaatgagaaacttagttatataatatattttaattgcatcaaacctatcaacatcctaaaatcacaattctcgaaagcataattgacgtaactgatcataatccaaaatcaggaaaaaaaaaatgatgaacaatttgagtaacttcacctttttctgagccaatttccgaagtttaggaatatcctccatcaaccgagccttcatccgacgaacttcagcattcagtgcagccgcggaagctctattcttctcgaccgaagccacttctgatttctgcagatttcaaaaaaaaaaatcggttccttgaagaatcaaaacaaaattaaggaaagctcaattcgtacgagtaaagcggcatcaatgtcacgttcgaaggcagcatagaggcgagcgaagggatcttcaggtccattggcattaagatcgcgctgcttctcgatatcatacttttcgtacttcttgcaaatggaatccactcggaagagaatgtcgattacagtcattttggctccgaatgaaaattaagggagggaaaaggatggagaaagaggattgattgtgggtatgtatttctggcatagctgtagtgtgaggggggagaagcaaacgaggcgtgaagcatagaaagcggaatttgagaaatcacattcacaactcatatcggttgattcttgatggtggttctcctatactataatgaaaggtctcactttcgccccattatttctttttttttttttttttttgttggtgtttctattgagaatttttttgtattataatttaatttttgtggtaaaattcttgggtaaataccattttagactttgtgttttgcaaaagttatagattagaccctgtattttgttaaatgacaaaatagaccctgtattttctaaaatagtaaaaataggaccttgagcttaatttttgacaacttttttttaaatacaaccaacttgaagacaattgttaatacgg

SEQ ID NO: 193455 - DNA, 2337 bp, Cannabis indica
gcttctgctcaatggaatccgttctctaactccttgacttcgtctctcaccatcaagctcgatcaagcaaactacctagcctggaaatcccaggttgtccctacggtcattggtcatgaccttgaagaaatcttgttcaccaacaatgcccctcctcgcactcttgtcaatggcaactccaatccgatgtaccttcaatgacgaaagaaagaccagctactcctctcttggcttcgctcttctatgagtgaagcaattcttggcactgtgtcgacttatacctcatccaattctgtatgggttgcccttgaacaaaagtttgcaagtcagtccaaagctagattacttcaactcaagagtcaattatccaatctttacaaaggtaatctcagcatctctgactatgtcgataaaatcaagtccatttgtgattctttagctatagctggtcattcaatcactgatcttgatctcattcttcacttgcttaatggacttggaccggagtatgatcctgttgtttctggaatcacctctcgaagtgatgctctcacattagaggaagttcaagctcttctcctttctcacgagactcggcttgaaagacactcctcaatgatggatatttccaccaaaatggcggccaatctgacttttggttccagaccaggtccttatcgacatccatttcatcctaaccgagtgtcttctggtgaacaacagtccagaatgcccagcaaaaactacagccgtccctcatcaaacaccagaccgttgtgtcaattatgtcttaagtatggccatactgctacaacatgccattatcggtttgatcgaaactgggttactcccaaaaatccttcccctcagcctcatattcacctcactgaacagaccccttgtcctgaacatcagacacaaattatgcccgattttggtgatgacatgggttggtatgttgacactggcgcaacaaatcatgtagcctttactatggattctttggacactgctacaccttacaatggtcaagaatcagttgctgttggagatggtaagaaattacttatctctcatattggtaaaaccactcttccttcatctaattctactcctcttacactcaaatctgttttacgtgtcccttctattaccaaaaatttggttagtgtctccaaattaaccaaagataatgatgtttttcttgaatttcacaaatcttgttgttttgtcaaggacaaacacacgggggctgtccttctcaaaggaattctcaagaatgacttgtacctgttaggcgatggtcactccaaactgtccaataactcattacaatgcaatcttgtcacttcttttccaaattcaaatacatgtaattgcacttctattgattcttgtaaattgcctactgctactggtttttcatgtactgaagttgcaatcaataaaaatgtcttgccttctttacctactgcctatactacaagcttgcatcatgatataaataattggcattgcaagttgggacatcctgcacctgatgttctcagccgtattctaaccaaatccaaaattactcactctctcaaaaatttacatttttgcaagtcatgtcaattaggtaaaagtcatagacttcctttttctttgtctaatagtagagcatcacagccccttgaactgattcataccgatctttggggtccctcccatattgtgtccaaagataactataaatactatatcatttttcttgatgactttagtcgattttcttggatttttcccctcacacttaaatctcaggcttttgaagtgtttattcggttcaaaagtttagtagaaaagcaatttaacttgcctatcaaggctgtgcaaactgatgaaggaggagaatatagaccatttgaaaaagtttctcagtgatcaaggtataaaatttcagttatcttgcccacacacacatgagcaaaatggaagggtagaaaggaaacatcgccatgttactgaaactggtttaactttgctagctcattctggtcttgacatgtcctactggtggcatgcatttcaatgcgctgtgtactccatcaacagaatgccaactgctgtaattggccatatcagtccctttgaatgtctcttcaagcagcaacccgactacactattcagaaaccatttggatgctcctgctttcctcatttacggccttactctcaccataaaatggagttcagatctcaagaatgtatctttcttggatattctcctaaacacaaagggtacatgtgtgaaaacaaagatggtagaatttttattgctcgaaatgtggtttt

SEQ ID NO: 193456 - DNA, 1586 bp, Cannabis indica
gaaaacaataccaaacatgctattagcattcattcacattaatgtcgtaatttacaattcaaaattttagaaaataattaagattcatcagtgtgaatgctcagtagtatataagaatctaaaacaaaatgctcagtagtatgtaagaatctgaaacaatctctaatctctatataaataaattttttagggttaattaatataataatttatatataattagggtcccttaattataccgccaattcatgcgaaacaaagtttctaatcaattgtttgatcgatcatgtgctcccatgatatcaaagttcctatatacgctatttaacaagctagctagctgcccataacgttaacaaaacaaaataaaaactttaattaaatttaatttaatttttcttttgaaaattaaaaaaaaaaaaaaaagataaagagagtataaactccactaatatttctgacgggaaacctactcattacccacccaatcagatggaagatatatatatattcccctagggcatattattctaccgtctgatcagtatatatattattatgtactctatattaattgtttctcatcttagtgtgtaagtgaaatttctttttctttttataaatatatttgtagtgttatatataaataaatattggaataattaaacttaattagtatacccttcgatgtagaactcttgaaagaatcgaaagggcatatgtgtagagagcattattgtgtttgtttgtatgggttctaatcaatccaagtgtttcccacgatctttctcaaaaggattctaattagagatttagtctcatgagtcatgaccataaatatatcatcttttgtaggtatatagtatactaaataataataataacagggtagagaacctattatataaatatatatatattagacaacattttgaaaagaatcaaaagatctccacttctgatcaattttgtttcagtttgaattttttttgaccataaataaaatgaaacaaagcctatatatggtaaagactgataaggaaaatatattggtggctttaataacagaaaatagtatttatttatatcctcattttattttaattttaggggccgaaggaagaaagtgcgtctaggccggattagtgcttcccgtagttttgactgtggaaatagcaatgtgatgatattaaagatgagttacgtaattttatatcatttttttccgcaccactatataattaatatccattaactttggatggacattaaattattagttaattaagaaaagatgttcttcgcttaataataaatattaagcagagatcgataaaattgacaactttgtaatcaaaacaaagtggcccaaatatatatgtatatgtatatctataaatatatatgagaaatgctagaagacaccctccaatattaattacaaattatcaccaataattaaggttctgttttaatctctcgccttcaccgtaatttatgaaccctaattgatcataacaacatccacggaagtttttagtcatcacaaaattttcacttgcgatatatttaatatatatatatat

SEQ ID NO: 193457 - DNA, 1039 bp, Cannabis indica
cctattcaatttacaggttgaattgcaagtgaatagtgatggattggcttcttttaaaatttgtgcagagagtgtggtcttatacagactcacacaactttacatccttcttatgtactctagaataactctattgaagatagtgtcctttacatttacacagtacactcttgatttaatactagccttgagggtcatattaacacattccggagtaagacatttcttcccgtaaaaggcatatagatttctgttgtgccaaataccatacactacaccagccattgcttcatgaaagaccactactatgagaaagttgtttatttatttatttagagaaaatactaagctatgataaataaaaatgtaaatcatttacaaatagcagagtaaattattagtggaggaaaattttctaattaagagcaaacttcattcaactgatctaaagtatctcgagccatataatggccagccatattagctgaacgtttaacatgagtaacattaattctaaagaaaaaagataaaagactaaatatctataattagaaattgaaacaagaaattgcaaagaaacctacatttaaagcattcaaaacagtgacggacccagaatttttactttgtgagggcttatttatcattaaaaaatatttatacttatattataatcactcttactagatttatttaattttgtgggagcttttttattattttagtctataattatcaaattaaaaaaattacatttaattttttaaaaggcagtatttttgttagtgcggactatagccccgtattgatactactaggtccgtccctgattcaaaactattagggcatctgtttcaagaagggtgatctgctgttgcaattggagaacccaaattcaactatgaaaaatagccttgacatttatatcaggagagtttcccatcaatggtctcttaagagtgcagtagtgacaactggttttaagaatgcagtgacaacttcaccgtgagcatctcgaatgttattattattattatta

SEQ ID NO: 193458 - DNA, 801 bp, Cannabis indica
tttttttttttagtgatcttggatttttcttttgttcaagttaaaaaaaacattaattactgctaattagtggcagttacgataaaagttcaatttttgaacggtgtagatctcgccattttaaacagttacgtcaccatttagagatgttgacggttggattctagtgacgtggcgttttcccgacgttacagtttcatgctagctgttctccgtgggagaaaattagtcagaaactaaagaaaatattttcgtttttggttttgctttgattgaaaggtagaaaattggttaatggtttatagctggcttaatatttatatataattattatatagaattatgtgtagttggagtggtgtgagatagtgactgactcagaatgagtgagatgggtttgtgctttattaacaatttgttcattgatattttcttgtggtttgtgatatattgattccctatgctgatgatttttcatactcaagaatcttttcagaccatttatgccgttatgctgcatagtgcatcatcttctttttccctttttttaatactatttggacttttaaacagtgtgagtacaaaaatagaataggtaggttgtgtaagtgcatagtgttgtgtttgaccatttctattccaattattcgtcttcaataattaaattatattatacatgtttagtactgtaatgccccatactgattttgattcccatgtgggtttttctgatactctgttcctcgtttgttttcgagattatatgacagtgagtgaacctgtttttgtttatatttaatc

SEQ ID NO: 193459 - DNA, 2062 bp, Cannabis indica
agagagagagagatttctactgagctcagaaacttcaagtgcattaaagcctcgtgggcttcaagtaggagacaaggaagaaaacttgtgcgggcagaatcatcaaatcaatataattacaagaacgatagttaaataacaggatacatattacttctctgactctattcaacaatattaaaataatatgagaattaaaacctctgaaagcaatataagtccaagcaccaacctgaggaacccaaaccctcagacctcgatcccatttataggtagtcccgtcatcgtctgtgaattcttcttcaccctctggtggggttgaaggtctgtcatcattatccatcgaggctccgccgaaatcagtagagccattttttgcctctgcttctgcctcagcctcagcctcttgaatctccttctgccatttcaaaaactcttcatcattggagggcactgcataccacaacacatgtatgttagataccataaacatgaaaacactagcagcactgcctctaaatattccaagagaaagaggaaaatactccacccttactagaatcatcggctccttgttgaggtatgtatgtcatcaactcggggattgaggataatggctgccattcagtccttccttcagaccacacgagtgtactcggggtgagatacccattcaagaaatgctctgtccaggcgaagttagtaaagcaaaggagatgagatggttcaatagctcattaaaccaattgaacatgatacagatggaacaagtcctgaaatcgtgctattgattactggtagaagtagaactgaaattcaaaaagggcaccaataaatttcaggaactaattatttaacctactatatcaaaggtcaaagtctaagaacttaggtggattcaactcaagtttttgtttaaataatttgcaaaatgaaaaaggtttattatttcactatttgtttttgtttttgacttactaatgtgtacaataacacacacacacacatatttatatatatcctaggcctaacaaggtttaaaaacaaacaatgaaataataagactttcaaacaaactcccaaagaaagcattcaacttgtaatatctttatacttcaattatgtcttctcagactaatacttgatattcagaacctgaatcattgctcacaaaatgaaccaattttgttctttagaccaattagaagctcatagaaaactcaccaagcaattcagaagaaacatagggaccaacatgctcttgattatcaccgagaatataccatcctacttcaatactggattgagagttcccatcaacaacgttgtgtagttccacacctatacaaaaaattataaaagaacagctatcatatatactatgaaataaatccctaaaacccaatatcatatgccttaaacacaatgctaacatacagtacgtaaatgtatcagacaaaaccctagaaacccaatcatgtttactagtttccgcttactttatcgcaaatcaatcagttcattattttccagactcaacgcgaaaaaaaaaaaaaacaattcgaagctctcgtccaccatttttaatttatcagaaaataaatattcaaaaaatactatgaaagttagggaaaaaagaggatggtaaggaggcacaaaccagtggattggtgttgttggtcggtgttgtcctgagacgacatcgattggtggttcaactggtttgggtttcttcttcttttttcttctccgaatggaatggaatggaagagaatggagtgtggagaatatgaacctcagttggggtctgtttgggcacaggattctactatactccagctctgatagtcatatccttgggccgttattgggtgttgggcttacccttttcatatgtgggcctttttttttttgaaagatcatatgtgggcctttgggaatctattaataggggtaagttgaaaaatgctctttattcatcataatcaattactctatttatattatttgtaaacatactctttttattacgtattgtacccaaaaactaacccttacctat

SEQ ID NO: 193460 - DNA, 747 bp, Cannabis indica
gttttttttgtacaacaaaccaatatttatacctgactttcatctctgattttagtctgttcttcgttatttcattctttcatcatcaaattaaaagtgttcagttcatataaaagtatatataagtatatagttactcttccatagatctatatacactttattgaatttatattgaaataaactggcttaataattattaaaaatttctaataagaagtatacgtaggtagagctagatacatacatagaatgagaaagccttgttctgaaaagcaagacaaaaacaaaggagcttggtccatagaagaggaccagaagcttatagattacatcaaccaacacggcgagggttgctggcgaacccttcccaaggctgcaggtaagtaattatatctcaattattaaccacatttatatatatatgcattagtaaattaatccatgttatccttttttctatttaattaacgtgtaattaattttccttttaatttatatccattgattcattcagggttgcttcgatgtggaaaagctgccgactgagatggattaacatttgcgtccagaccttaaagaggcaactttgctgaagatgaagaagatctcatcatcaaactccatgcatcctaggcaccggtatcttactctggtttcgtatctacgattaatctctctattatattagccttttattctaatcgatctaacagactaacatgaacaaattataaaatctgtaat

SEQ ID NO: 193461 - DNA, 852 bp, Cannabis indica
tttttctttttgggtctcaaaatcccaatagttgtgagtttattgataagacctgtattcttttcttttctattctagtattcagtctttatttgggggtaggaaatggaatatttccttctcaagctgtgttcacattatgtttttatgtttttacaactctcatatccaataactattactcacgtaatggtcctatgcggatcttattgtttcttcataaattagaagaatatgcttgttttgtatacttatatagtctttaaaaattagttattattgtcaacagatttctactcatatctttttaaaataaattttattcataatctttaaaatactttttttttctttaattatagatgataacaaaatttataatttacaataaatttggttacaactcactatgtataatcaataacttagctataatcttaactacgaaaggattcatttgtttctaaacttttttcgtaatcacaaattctctgattttaatcttaatattttattgtgtattaaatacccagtgattccataagataagtatctaaaggtcagctggtagatgctgattcaagaaagaaagtactcaattttaatttgaaatctctttgttatgctgagtcaaagataggaagctccgctattaccatataggcatatcgttctttaggaaagggattaccggatctcattgacattaatgatttggcacttttggttacataaactacctaaatacgatgcaggttcttgtgaataaaaattggattgacaagcaatcatcataatttgtttatgttgcacatgtcgaacctgtttttgattactagttttaatatcagc

SEQ ID NO: 193462 - DNA, 1537 bp, Cannabis indica
taagattttttatagtaatatattgtataatatatatttgctaataaactatcgtattttgattagtctataaaacactattaaacaatatgcaacgtcgtgtcgtgtgagtttatctaacatataaacatcttttgacaaagggaagaaactgtctatatctaatttaacttccttttttattaatatcgatccttttgactttttatagtttatgcaaacacatttaaatgtatacaacgtactagttagagacaaaagcaagacgatcgaatttattaataccaataaccaacaatacaaaactgagagcgaacaaagaaaacagggcagctaaactaatccaacataatttttcatatagatcctaatttatttacttacgtatacttcgattaaaatttattcagagttttgaatgatgatgtacaataattaatccaatggtatgaagaccaaacaaaatatatccttctaataggacaaaattatatatacatagtgtgggggaatattggattttgtttttggtattgaaaaaagtgtctgcttgtgtttaatcaaagttgaagggattcaactttagactaagtgagtaaattataatatgatgagatgtggaaaataagtgtaaaaatgtcacacaatacacataaggggatatatgaagggtaagtattgtcggttattgtttgagttgttccctacattgccggggaatttgggaccaatacatcataaaaaccatgagctctattaattgagatatgaccgttgttggatatgatgtcctgtctaattaaaccctagctagctatatagttaggcctataagtataccctatataacaaccactccattatatgtatcttatatacatgatatatacattattcaaactaattaattatgtatacataattagcaaaagatggtaagaaatcccatctcacgatataattatatatagtcatcaaagaaaaataatgtatgtgtgtttgtgtgtgtgatcgacaagattatggaaagtgggtgtaattattgttgatataacgactgaatttatttttaagtaatttggtgtaactatatatagcacatgcacggttccatgcaattgcgacaacaagataatattttgttggtagtgatgatttttttttatatatatatatgtatgatcatttttgtgtgcatgacaaacaattgtagagggacatgagagaagagaatgtgtcttgagttttcgagaggaccctatagattttcttagagaatgagactaataattaaatatatgaaaataaagtaaagtggaatattttacttcaatggaaaaataagttaaccaattcattgtgcgagattttcattttccaaatatataatatacattttgggctaatatagggttttagtaaaggaacctaaagatcatttcaaattgtgtagtcttgcacataaaaaaaggttactcaagtcatgtatatattatacatattttgttcactaaaatttagttataactagctctca

SEQ ID NO: 193463 - DNA, 1378 bp, Cannabis indica
aaaaggataagataaatatttgtaatgacttttaatttaaattataagatttagaacaaaactatagccacatttaatacaataataaataataaaaaaatagtgaagaataaaaaattaaaaggaaatggtcaggataaaatactattcttaatttgaattaagttaaaagataaagaaagcataaatgatttatgtagagaattctgaaaaaaaaaaattatgaattttaaatttgattttctttttttttaaaggacgcagatgatataaattgtctttatgataaaagatagaaactcttgacaataaattaatagacttattagtagaaaaaagaccaataaaagtggttgatgttaattttctaaaaatatgaattttgtagacactttcctacttctcatggtacaagtggttagttgtaaaatgaaggaaaacttgatagaaagttagtcagtgtattcaaaaaaatttgatagactatattgattctgttaatatatatatatatatatatataaaaaaataaattggtacaaaatctagtatgatgaaccaattgattaacagaagaaataaagactgtaaacatctaagttgaagagtcataaaacaaataattaacatctcagcttgatttagaattgagattatcaaagcaaaacaattgataaaaaatacccatataaaaagaaaaagcattgaatgaatgaatgttttagtaaaaataattatcactgaagattattattagagataattgtagagcattatatgatatatatatactttgtgttgtcataattttaaattagttgttatattgctaatttttatgttaaaagttttatcatattattacaacacatatatttattattttgttattcactaaacgaggacatacactactacaaacttattattagtatcgtttttaaaatgacatataaagtaattgcgtcggttagcaaaacgatgatatactacttcaaaataggcatgtagtgttaatcaaccttattgcctgatactaatagtgaagattgggggctacttctttttttatttttgcattttatgcaaaataacatattttgcgttaatttacgctaaatagattattttgcattagttgacgcattaacacaactattttgcatcaatttcataatggcataaataaaaactattcttaatttgaactagtatttaaatacaaagaataaattaatcatgacataaataaatgaaaaaaaaaaaaaacctttatccaagcctattgaactatgagataatagagaacacaagaaaaacacatctccttctgatgagcagtcaagcatgtttggttgaccaagcattgactttcttg

SEQ ID NO: 193464 - DNA, 783 bp, Cannabis indica
tcttgacatagaaatacttaccaaattgtgtgcaagttgagggctagagtctctacatcctggcaggaattgcaggatattttgtgagctatgacagcaaggttgaaaggctaagtactttgtctggtactaacaaaaatatccctaccaatcctgtgaacccgaatgctaacatagctacaaccagatctcatggcttctcaagtggcaggggaagtcaaaacaaccaacaaggcagtgaaaaccgtgggggcaactctggacagttcagaggaggaagaggtcaaggcagatttcgtggaagaggaggtggcagaaacaacagtaataattcgaaaccaacttgccaagtctgtggacgatatgggcactcagcagcctactgctacaaccgctatgatgaattgtacatgggaactgatccgaatggtgcaaacaactctaacaaaggaggacaaggtggtgctgctgctttcattgcaactcctgaaatggttgatgacacagcttggtatgccgatagtggtgctaataatcacatcacagccgatgctaatcaaatgacccaaaagaatgagtacaatggtaaggagacactgacagtgggtaatggttctaaactcagcataaatcatgttggttctctttatttaccctcttgtacttcaaataccttgctacttaaagatgttctgcatgtacccgagattacgaaaaatttaattagtatatcaaagctaacccacgataataatgtctcggttgaatttttctctgatttct

SEQ ID NO: 193465 - DNA, 2114 bp, Cannabis indica
atctttatggttgagcgcggggctgaagaacagctctcgtagagttgtcttgggaaccagccaaattcatatcatcattagaaattgttaggtttctttcatcttcaacaaacaagtttgtagtgaaaagtgatgttgtagtacctcaacactgcttcaatgtttgcctcaaggaaaacccttcttgttgtctcttaaccatacggtttggtgacacgttttcttcagaacctttattagctttagaggcatccattatattgcaagaaatcgtgtagcatggccacatactagccatagtggaggattgtgtggtagaagctagaaatatttgtggagatggaggatatgtagctacaatattttcaatatttctgaggtctagcatgtatatatcagacaaatagtgaaagaagcacttgttgttactgatgtacactggtttgtggtgacaaagaaaggtactattacaacagaagagtgtttcagggctgaattatcattccggtttgtggagttgatgtgtgttccaatggtggtgagtacatcaatgggtgtttgttggccaaaggttgtgttggcagtagtgttttgtagcaaagttgagcctgatttaagaaagctactggtgtgttgctggtgtggatctctttgtgacccctgtggaaccatgattgtccggttaacagtggtgattgcaacagttagagtttatttagcatcaatttgaggtgttgaaaagggtagcagattagtttgcccaagattattaacgctctggtatgttgttccaaaaatctctcttagacctttattgaaacacatttgcaaggttagcagtgttaatgacatcaaaagaaatttgttggccaccaaacgggataactttagtatgttgcagatccgttggactaagaagttttaaaattacttgtgtgtttttttattaagaaacctttgttcatgactcattggcgcaccatcaatattacaattagtcagtggtacttgttgatgatgatgtggtccattcccttgtgtaacttggactagtggggtgttcattgtactagtcgagtgtagagcagcatatggagccataggagaattgttagaaggattgaaagaggattctccttctaataacattcgtggatgtggcgaccctcataaagcaagagaaaggacagtcgaaactatggatgtcctagcaagtcttgtgagtagaggccatgcattacctttagcaaaatcagttctatagcgatcatatcctgatgttggtagtgcagcgcctttaagttcaggcccatattccaagtcagggtcgattcctccatcaagtttttccataaatattgggcacttttggaagcgatgtccaagaacaccacattccatacactattcgagcaatcgttcatagcagaattctgctcaaaaattgtcttcgatttttcgaagtttaatcattttgccacatatcaatggtttagtgatattgagacaaacccggatcctaataaaggaccccaacctcattcaagaaatcttcatgaactttaacaaacttttctattatatcaccaacctttgtggccaatgctctagtcttacttaagaaatgtagccgatacacttgaacccaaaaaggagagtaaattagatcctcaagtgtgacattttgcagagcagttggcgtctgaagaacaatgtgatagttttgaaagtgtaaaggctcacgagataggttgcgaaacttatgcccttctcaaccaagtaagcataaacaaatcaaagtgtagttcagagatcttagtgtggaaacagccatccacatgctcagccatttgtctttggattgttaaaatccacactttccttctcgttaacactttagcaactagaacaagattagtgttaagtgtcatggtggaattcatcttatcagcgagagaatttatgataccaactgtaacatagcagaccgatcaatataagtaacctaaaaagaaatttggaaatacttcagtttgaattgaagggaacagtttaaacaacatggaaaggatgaagaaggagagaaattgcagaaaaaaaaatagaaaaaaaaa

SEQ ID NO: 193466 - DNA, 1372 bp, Cannabis indica
gttaatcatgctcttatacaagaaattagggaaataaatcagcgacttattgacacagttgttgatattagcaatgaagatgttgatccaagtgcagcagctgctactgttgaagggggtaaagggactattgtcaagtgttctttcagtgctgtagcactcagcgcgaacttgaaatcacaatatgcttcggcacggatggtgagttctcaagaattatgaagggatctattatcctatgcagcattcttattaattattttgataatgttttgcagtctccaatacagccattgaggttgcttgttcccacaaattatcctaactgttcccctatactgttggacaaaattccagtggaagtcaggtgagggaaaaattctacttctctcaagtacacactacaagtttcctgctgatgttgtgatgatatttgattatgtccaatatcttcctgccttgaaaagattttttgttcagaataatgtctaaaagaaaaattattgtgacatgaactttcaagctaatttatctaaacagaagtgaaattttcgaaagctcaactctatgcaagataatgtcacgtaacttttttaaaaagcaacattagttttcacttaattattttaaatgcatcattagtcaaatgtgaatcccccttgctttgccatctaaagtggatcaaattaagcgtcagtgttaatattttttgagtcattctatctaaatttcatgagactttgatatgcacaaaaaggccctggggttgtacccgtgctcattatatttgttacttttatgttctgaagtagtatttgtctggaatgagctattaatacttgaaagtcattgtttcatcatctacttttatagcaaggaatatgaagatctttcagtaaaagccaagtcaaggtttagcatatctcttagaagtctctcgcaacctatgtctctcggggaaatagctaggacgtgggatgtctgtgcccgtgccgttatttctgagcatgctcagcaaagtggcggtggcagcttcagctccaaatatgggggttgggagaactgtttgagtgccgcttaattgttgatgctgtgatctaatgcaaagcattagttgaagcagactctgtatatggccccacagttgcggcaggaagataagtagtgtatagctaatatttcagtgacgaagttcctctaaggcgagattgattttctgtatattctgacttggtaagctcttcacgtttgttattagaattcgtatagctttgtatatgtgtaagaacgcatgaatttaggcatatgattttactagtatatattttcttttaatatttctactttctgaggaaaatgtgttttgattagg

SEQ ID NO: 193467 - DNA, 1583 bp, Cannabis indica
atatatacgtatagatatctcgagcgattgaataaacccctgttaatttaatcattattgatcaatgcataattgcaaatatatatgatcttattattacaatataaaagatttattttggttcgagacactcttatatctatatctatatatatataaccaatcaatgaatgttatatattatattctaattaataaaatctcactcataattcattaattttattatatatttttctctatctacaaatatgcatcgcatgcatgtaataatatttaaaaacaaaaataactctttcataattgtgtaaaatagaactgggatacattcaggccacgttgactgatccatagacaaagtcattttagtaattcgacctacttactataattaagctttatctcaacaaaactattagaggtcataaaaatgtcttgtaaaattaaatcactccacaataagaagcatcgattgattaattattgtgaagcaacgcgtcattaattaatacaatcgaactaaactatgagagaatagaattaaaatgacctcgttcttatatttctgtaaggcgaaaacactaaattcttggtgaagtatatactataagaagtattagttctctcatttcaaaagcctatttatatatcaattagcgtaccatgatcaccaagttatttcaatcaatcatgatcagaaccttgtcttacaaaaatcttgagttttatgggaatattcaacttccatatatttatatatgtatatatatgcacacactacttaattaactgatattttagttaattttattcaaattgcttccggaagaaaatatagatcaaatattcgtaaacaaaatgatatatgtacgtaagtttgacctctgcagcatttacataaaaaaaaaatacaacagcaattataatacatattatatatatatttatatctatattgtttattaattcaatatatacattgattttttcgtgaaaacaacattgtatatttgtactgcaatatttgttaataaaataaaataaaataaattgtactgcaaattaaagtaccatcaaatttaattgattgaagacattattgattcgtactaactaaacttagaaaaatatgaatatctatatataaattatattagatatatactgacgaaatatataagatatgatgacccaatgaacaaataattaaaaaacacagaatttattacagcttttgtcatcattatcttcagtgtggactgtgagctatagctagcatgcaccactgaagaagacgactagagaaaattaggtaaagctttaaacaatattttgagtcatagtggatggagataaacataataatatcccgctaagtaaactatagcagaaacacgtacatgatatatagttcttattattatgtgtatatatattatatctccttacaacaaacaaaaacacatagaaaagtactgattataatatagcaactcatcatgcgaactcagaagaacttggattaaacaactccagctattactcatctcatcaccagtatcatcgaccacatgcaccctata

SEQ ID NO: 193468 - DNA, 1801 bp, Cannabis indica
cacaaccactcccattggcaccacaagcagcatctccaccaccttcatctaatgccccacctccctcaacttctggttcttcaccttcaccaccaccaccaacttcaaatccaccagtaagttcacctccaccacctcccacaagctctagtccaccagtaacctcacctccacctgatagttcacctccaccaccatcatccaacccaccagtgaattcacctcctccatcaacgtcaaaaccacctgaaacttcacctacaccaccatcagcaaacccacccaaaacctcaccccctccaccatcatcaactaagccacctgagagttcaccctcacctccagcatctttgccaccccagaattcatctccaccaccgccaccgccatcaaaatctgttcctccaaaaagttctccaccaccagcatcagtttcccctgaaaaacgcaccccctcctccggcatcagtttcccccgaaaaaccaccttctccaccttcatcagtacctccaaggaatgcacccccaccttctcagctaactccagccccacctagctctgatcaaacaccacctcctgagaattctcctccagggacatcacctcctccctcctcatctatctctcctccaccaccttctcaagttccaatttctccatcagataatcgtccttcaaacaattccggccctagtgcatcagatagagtaaagtctaatgacaatggagggattagtactggaggtgctgctgcgatcgctgtagtggttagcttgattgtgcttagcctcattggattggcaatctggtgtttaagaaagaaaaagagaagagtttcaggaattagtggtcacatcatgccatcctcaagaggatcttcccccaaaccaggtaaagtttcatgatacgaaatgtatgcattctatgtttgcccaccacttgaccttcccacacttcttttgcttgttcgtggtaacttttagcatgttgagatccaattggagtgtctcatctttagcttttagccgcacattatctaattgccataatttattaccatcattatatctgaggcatagtattctacagtagcagtaatttgatgcttctggcaagtgatttagaagcttgaatatggttggctaaatgttggtgaattaccataggttggactgtaattgatgaaattcagtttcaagcttttcataataaactatatagagggtatgtcgagctgtagacaggtgatctagattaactttccactgttgacatacttcttttcttgattgtgtttttaaaatagttgtcattgaaagaactaagctaggtttgtaacttatgtgtacagagtcagccttctttaaggcacagtcttcagcaccccttataggtagtggttctagcagtgattttgtggactctgcatcagaggctgggctaggcaattcgagggggctgggaaattcgaggccattgttcacatatgaagaactagttaaggccacaaatggcttttcagatgagaatcttttgggtgaaggtggatttggttccgtgtacaaaggatgcctaccagatgggcgagaggttgcagttaaacaactaaagattggtggaggtcagggggaacgagaattcaaagcggaagttgaaatcattagtcgtgttcaccatcgtcatctggtttcactagtgggctactgtatttctgataatcgcaggctacttgtctatgactacgtccccaataattccctttattaccatcttcatggtaaagctgctaatgaatttttt

SEQ ID NO: 193469 - DNA, 862 bp, Cannabis indica
tattgatattgattgattgggagataaaattattatttaaaaatttacgttactttttatttcacatataattcttctctttaaaattattttgttaagatccaaagacttttttttccattaaaaaataccaaagacttttttcatttatataagtgcagggagaaaagaataaataaataaaaagactttatacttatatagaaaatgactgcaaaaaatgaagattaaatttaataattttatttaaagaaaataataaaaaagaggtacatatgtgaactgtattaaacattaatattccaacaactttcacttgtgtccatgtccatgcttggtgtttgctggaagctcccatgttatagattgccaaattgactttattataaagatcttatctttctcttgatcaacaatttaaaatatatttgacatataaacaataatatctttcttttaatataattatatatctcctgatcctaataataatatataataaagactttcaatttatcaatttaataatatcgaccaaattaattattttttaactgagaaattgtagctaaattgaagtacttatttgaagtaaaaaatttgtggatgaatacttaccaaaattggaaggcaaatattctccagtcactgcagcctgcggttctctcaaaatatttagctagtactttctctgcttccttctctgatgatctctgtctggattgacgggaggtaaaagccccgggggtctacctgtagaaactctttgaggcttaagtcagcaaagattcttagcttaaagagagaaagcatagaaaaactaaaatttgagttgtgtcttcgcacaaggtgacgtggcgtt

SEQ ID NO: 193470 - DNA, 1562 bp, Cannabis indica
ttaattctaagcttttgcatgatgaattgtcttccttgttgggtttgaattgtttattatcaatttcatttactctctttacaattcatatctagcccttttgttggggtagaagttcaagttgtattataggaaataggaatcatttgaacttatctgatagttttcatacttggtgcttgtttctttagaatcacttttgtcttgaaactattccaaacaagcactttatatgtgtgtatgattttacataacattcaaggttcactatgataccatttcaagcatttctatatattgtttaactatgttatatcctctaatgttttaatgtggcctaatcttttgttgttgctgttcaatgtctaagcaggcaatttccagcagggtctctaaattgaattcggtttcgttttcaatcaacagattgggattccagtctctaaagatgcagcctaggcgctttcaagtttcctgtgcagtaagtttatctaatcaaatacaagataatggatgattagtagttttaaacaatgttgaactacatgtttgttatttgtattacatttaacaataattgaattatataattatgaccaggccaaaccagaaactgtggaaaaggtatgtgaagtagtaaagaagcagctagctctttctgatgattctactctcactggtgaatcaaagtttgctgcccttggagctgattcccttgacacggtactaaaaaactcatacttaaccaagaatcattctgaacctgaatttcagttagttatatacatttgtattattcaatcaccattgctaccattttttgagttttgcttgcattggaagaagtgcaaagaatcatttttttcattagtgaattggttgattgacctcaaaaccacataaactgttctcatgcctcacatcttcaaaacccacatggcaaatttttatctttcttctaatctcaagtaaactttgaaatttatatacttcatatgtaaacaggttgagattgtgatgggacttgaggaggtttttggtatcacagttgaagaagaaagtgcacagagtattgccactgttcaagatgcagctgatctgattgagaagcttgttgagaacaaagctgcttaagatgtcatttggaagaaagccgttccatttttctttgttaccattttccttgtgttttttctttttctttttggcaagttaagcttctaaatggagctctactagtctggtagtggtagtcttgaataacttcatgaactcttattagtgtctttttattttatgttacaaaaacttttcttgtatttgcatatttatttagtggtaagtgaataatctagaattgacacaattgtgtttgtgcactaaagtacttggttctggttatatgttagtcatgttgtcgtccttgtcaccttgaattataattttggaaaatttacaataagatatctattttatatttaagttacagtttcattacctgaatttcaattaatcctgattttatttattggttatttttttggttaacgtattatatatat

SEQ ID NO: 193471 - DNA, 3892 bp, Cannabis indica
tactgggtccgatgagattgaggtccgacccgaggcaatgctcttaaggcgacgcatcatgttcatctcttcgtttccacgattccactgcaccccacctccaaaccctaatttcttcaaatccccaatacctatcaatgtaatcaccctcaaaaagaagagagctcaataaatcacaatcacaagaatgagaaataaaaggagagagaaagctctctctttcttaacccttgcttctctcttcctcttcctctctctctctgtcaatccctaatctaaaacaagaaagaagcaaactctggaaatagtgggaagaaattagaattggaaattagaaattaataataaataataatgaattaaataaaataaaaaattaaatagggaaagaagcccgctctcccccagactgtaatagattttttagagctaatttctctctgttcaatgaggaaaaagccattacatgtggccttttttttaatttatatttaattaatatcattatttttttttttaatttggctttttgaattttctacggtcaaactgggatcaaacatcaagccaatcattccagcctgaaatatttctttttcgtactacagtcaaactcgtaaaagtggccgtcgatatgtcatgatgggagaatcaaacggtggatatatcatgattttgggggatcgcaagaacgaatgaagttactaaagtacccctgttcggtagaagtatttacgattaaggaatttcagacagaaatggataatgtgacggaatattcgggagaagaccttttgactggtcttcggattggacggtgtgtttttgcggttaagttatttcggattcgtttaggattttaacaccgcacaaatctctctctttcttcttcatttgtatttattatatatattttctttataaataagtctttatctgccgttaaacatttcatcagtcttaaatttgaccccaaaataaattaaaatccaagaccagagcaattcaattatgcctcaatttttatttcataataaaataatgcagaattataaaataaaatacttatagcatgtataagtctaatacaacagctgcttttttttttttgtgaacctacaacttttttaatctttcttttaatgtgaatcttctagttctactattgtaagttgtaatattattgacttgggaaattaataaaatttgacagtataagcggtcaaaataattatgcattagataatatcgaaaatttctctgttcaatttacaaaataaaattgttattgtacctacctctttcaatgttccaccatttatatgcgttggctttaaatttctataagaatttgtagtaattgtcaatttatcattgacctattcttaaaaaataaataaataaaaaattgatcattgacctataactttgattaattttgttttcccttttaaaaagataacgaattgaattaattcatggcttttaagaccatctactttcgcgcataactccaaattggagtaaataacatccgccaacccaactttaaatcaaacttaatgggtacccctgaaagcttttttctctcgtatcctgagagagttggaagtccaacttgacaatatgtcttctcaataatccagtttcttctcattacttcttctcataaaggttgcatctttcagtggtatttactgtcttaaagtttattctctttgttagttaagtgtttggtcttatcatgggagacagagttgaaagttcacgtgaaggtatggatgtggggtctcctcctatcgacggggtcccagtagtaaatgcaagtattgaagacactcaaccacttcccccaactgacaggcataataacccatctgatgctgatgatggggttggtgggggggtcatctctccgtctgtaccagtccaggatgctgctgctgctttggaaactctccgtaacaattttttggagtccatgactctagatcttgaacctgacttcgaacttactgcagaggtggttaggtcgggcgtattagtcagtttctttggtggtaaaggggtttcaaaaactaggctgaaggacattttgaatcaaatatggaagctcaagggatattggaagttcaaaactctaaaacagggggtgtggggtattttcttcgacaaggaagaggattgcagagaaatactacgaaacagaccatggataataaatgggaaacttttggtcattcgtgaatggccagaagatggcgattggtataacgttaatatgggcttagcagtcttttgggtgatggcgtcgggcctccctactccgtatctgaatggggttaatactcgtacgattgcctccaaagctggaaagtttgtccgtggtgatttggccgagactaagaccgttgttaggcggggttttttaaagtttcaggttgagattgacacatctcaccagttgatatctggtttctttcttgatattaaaaggggaagaaaggagtggatccaatttagatactttaaactcccaaaactctgttacaagtgtggttacttaggacacgacaagaagacctgtttccgttccttggcatttgcttatcctcctcaaggggcagcagtccctgcatatggtccttggatgagagcggagtcggcggtgtatagttgttttaacactaggaatcaaggatttcttcagggaagatgctagcagaagctacactccggcgaggcaacgaatggaaaatgaaagcaggggcttctctccgatgatgcaacggtcggaaaagggctctctgctcaatgacaaaggaaagggactggtctctgataattgtaaatcggcagaaggcagtgatgcaaccctgaaatacaaacctgtaaggaaggtgatcagagtaaatgaaaagggtccaggagctatttttggaaaaaatttgaaggttgtggaaagtcaagctgttgtttcaaaggaaaaaggaaaggatttggcttttatttctcctcattcgagaagctgtttcagggaaaggaggactcgttcagtctctcctagaggactgagatttcataaaaaaggtaacccttgttttttatctgaggctgatattcttaataaatttacctctagaccccctccaaacccagctgataatggtattcttaccactattatggccaatattgggcccacctataatcagatgattgaaaagccccatgctcaattatgtaactctagacagccccataaacaccctgagcccacccactttccttggcccatttatgctgaggaagttggtttaactgaggagttgatgggcccaccccaagtggacaaatttgaaccaatcccaactatctttcatgacccagaagatgttaccaaccttgttcatccctgcccacaacagaaaaacgaaaggcaagccttaccttagtcccatttgtccagcacctagaagaaaacaccatggatttttccacggaggtgcctaacctgccacctttttcgtccaccttggataccccatttaagatgggatctggagcctcctcttcatccgtgaagaatgataaaaaaggaaaaaaggctctcgttcaaaactatccgaaccaaagaaaaaaaacttacaacagctaccttcaccacaagacgatttaactcagaaaaatcttattgattctttaaacttagtggaggttcaagtggaatgttctcacaatttaactacgggcgaggaggcggcccttatcaagcccccaacggccccatgaagtgcctttcgtggaattgtcggggcctcgcgagagacccgacaccccaagcgctacgggcttgggttaggaaatacaagctggattgtattttcttgat

SEQ ID NO: 193472 - DNA, 1361 bp, Cannabis indica
atcattgcccatttttcgcaagcaaaaaacatcaggaaatagttgaagtttcttgagagaactatagaatacatatttcacctgtatgcagcatctccaaccgcgaaaacatgagggcttagttctccaaatggagctcctttatattgtgccatcatgtgagtatcataaagatgatccaatcgttgaaatggattgactgctatcagaatatttccagtgtatgtctgagaaggcaaattaccaaaattagaatccagtaatgttgctgcaccttaatatttctaaacaaatatatggaagtaaatgtgacacacatagatttcattaagttcatatctaatggccaggttttccagaactccaggttcatgcaaatatgacagttttgtcatatcatctatccctccaggtggaacttcggtatcctttggaaaaacattcatgctatctgtgattacctgttgaaaattcatttgagtgaattagtaccaaatatagaagataataaaggaaaattacaagttacaacacaataaatgcatcttcatatgtatataaatacgcaaacatgtctcatttgttttactacgtctgcatggctgacgaagcccttactgtttttccatttgtggtatgaacatgaacctccaagccattgatccgcgtaacttctccatcaatccaagccaaagtaggatcttcaacccatacatgagagcctaacactatgttaactggtgcagcctgaaaaaagtaagcaacaaaatgcaattgcaaacatcacactcaatataaaaggaatctttaatttactttatatcccatgtaaaaggtttaaaaaatgttatcttgaaaataaagaaaacaagactaatatcaccatgccactagtgaatttggagttctaaactgaaaacattaatagaacagttgcattgcattcaaaaccacaatggcattaggaacaacagtgactttttgtttcgaacaagtaccaaccataacatccattacatagcgtatttgagacaaagactatcatccaaagtacaaacaaaaacgattactgtttaaagtgtcaactcataacaactatgcccaaacaaaaattattaacagggaaagcccaatgattgtttaataaatagatcaataactacaattgttaacacttactaagcaaatgtaacaggttaaagggttctctgcaacattaagcaatgagaacccaaaaactagtatcatagaagagaaaaaaaaaaaactcaagccattgttttctattaacttaaacttaactaaactttctagttgatctcatcttataagacatggtttgattttctttaaattttttg

SEQ ID NO: 193473 - DNA, 3271 bp, Cannabis indica
gaaatgaagcgttgtaaattcaatctcgacggattaccattacccttcaccggtcgatcaaagaaaaatgcatcgaaatcatttaggtatggagtgaagaaaggttcagatggacttttaacatttggtagatcattaagaagtggagtaacaagagcagttttcccagaagatcttaaagtttctgataaaactatatttgatcctcaagataaatccctcttgttatggaatagactctttgttatatcttgtatcttagcagtttctattgatcctttctttttctaccttcctgttttcaaccataaatcattttgtcttggaatggatacaaaattagctgttacaaccacaactcttcgaactgttgtagacattttcttccttattcgaatggctcttcagttcaggacagcttttattgccccatcatctcgagtttttggaagaggtgaacttgtcattgatcctcatcagatagctatgagatatttacaacgttatttcattgttgatttcctctctgtgcttccctttccacaggtttggacacaacaaaaaaccacccgaaatttgatcaataagatactcaaaccccttttgttgtaaatgataactaagtaagtttaatgctattgcagattgtagtttggaagtttcttcaaagatcaaaaggctcagatgttttgacaaccaaacaaatgttgttatgcattgtctgtttacagctcttaccaagattttttcggttaataccgttaacttcagaccttaaaaaaacagctggtgcttttgctgaaagtgcttgggctggtgctgcttattacttgctctggtttatgctctctggtcaagtaagcatttttataacactatacccgccttagctttaggttcggccctgctaaaatctgtagccatttcacaggtaactggggctatctggtacttactagctgtagaacgaaacgacacgtgttggagggaagcttgtcaccgcagtggaaaatgtaagatagattttctgtactgtgggaacaaacacatggagggttacagtgattggcaaagcatcagtgaacaggttcttaacactcattgttctgttgctcctgattcaccatcacaattcaagtatggaatctacactcaagctatagcttctggcattgttgaatcaaggaactttttctcaaagttctgctattgtttatggtggggaatgcaaaacttgaggtgcattacctttcttttcttctttacagtacttaaaaagacaggtttgagtagtatttatgcaaggccatttaggattttctcccaacctatgtattattatatctcttgaatttttcattgaaaatagtctccgaactattcacaatcttgtaaagtgatatcaaattagttacacaagtgcattaacgtagcattgatatgacaattatctaaacagtcatgttatcgttttgtttattatgacaaaacttgaaagaatgactagtttacaacactgtgtatttcgaggaccattttaaacggatttaaaatttaaaagacacaataatgcataggttatagttgggtgacaaaaatcctaaatagtgtttaatgctaatattgtatttgatattgtgcagtacacttggtcaagggcttcaaacaagtacctaccctttagaggttttgttttccataggaataggtatagcagggctcatactttttgctcttctaattggaaatatacaggtaaagttttctttagttacaacaagtcaattgtagctgttttactatgaagatcagtttttgaaaagtttttggcaattttcacagacttaccttcaatccatcacaattcggctggaagagatgaggatcaaaaggcgtgattccgagcagtggatgcatcatcgcctgctaccacaagagctcagggaaaaagttaggagatataatcagtacaaatggttggagacaagaggtgtagatgaagaaagcattgttcagagtctacctaaagatctcaggagggacatcaaacgacacctttgtttgaacttagttagaagagtaagtataggggtagcaatttgtgttcgtgtcgtgttgagagttaagtattataagcaaatgtcaaaaccaaacccgacccatctattaaacgtgtcaaaaactaaaactcaaacccatccccatcccgtttataaacgagttgatctggccccatctatttaaatgactcgtttaataaataggttagtcgtgtcaactcgaaaatgactcaaactcctttatttcatggaatatgcaggttcctctttttgccaacatggatgagaggctgcttgatgccatttgtgagcgtctgaagccaagtttatacacagaaagtacctatgtagtcagagaaggtgacccagttaatgagatgctattcattataaggggtcgtttagaaagtgtaactacagatggtggcaggagtggatttttcaacagaggtttattgaaagaaggggatttttgtggagaagagcttctaacatgggcactggatccaaaagctggttccaatttaccttcatctactagaacagtaaatgctatgactgaagtagaggctttcgccttggaagcagaggagttgaagtttgttgctactcaatttaggcgtcttcatagcagacaggttcagcataccttccgtttctactcgcagcagtggagaacttgggctgctatctttattcaagctgcatggcgacgctatgccaggagaaaaatggctgaaagaaggcgtaaagaggaggaagaagaagagtatggctatagcgaagaagacgatgaaaggactttaggtaacagaagtaacagttcttctaggcttcgtgccaccatccttgcttctcgctttgcagcaaacgcgcttcgtggtcgaaggcttcgcagtgaaagtaaccggggattagtgaatctgcagaaaccccctgaacctgacttttctgcttgtgatgctgattaattgttttttgtttactatatagaattaaatgttgtacatcactaaaattgactcaagactgttgaaaagagtaatttatgtaataattatataataatgtaagaggtcacttgtcttagactaagaacctcacttggggcggaggaataccttgataaacaaaatttagtcacatcaacagaagaagaaattctcatcaggtcttttacatcaacaaactccactccctacacaactata

SEQ ID NO: 193474 - DNA, 958 bp, Cannabis indica
gaaaccctgagcaggtaacacaacataattaattctatcagtattagctcaacataatcttacaaaggcacaattttttattgttattcacttgttctacaggtatgttgggttttataagggagtacaaagtgctggggcagcaattgcttggcaagttgatacacacaaagtttctttcttatcccaattgattgtgaattggtcactgactacagtgagttatccacttctggttattttggtcttctttgctgtaaaggatgggaataaatctgaagaaggagatgccaaagtgggcactcctgtatccatccaataaggtcattcttgttcattgacaaacaagaatccttgtggtcttctttgcttatagattttttattgtgattagtattttctactgttttctaactcttaacacaattgttatatcttcaccatgtaattgttccaatgaaccacgcgttaatcaaaagttgttgcctagctagctagaaactcgaaaagttttagctcatatgtctcccaacctatattgttgcagaacagtttgctttaagcttattcaattatcattatttcatgacagtgtatgattatcaaggttgaagaaagtagtttgaagattgagatgaatgtatactataaataaattgatagaactataactttgaattaatctgtttaggccacacaaagtacccttatattgtataaaaataaatattgtattattgttgttagtgttgtattcaggtccagcaaatggaagaagattatctctcatcaaaagctagcaatggtggaatgttaaaccttctgatgctttagaacaaacccgccaaaacaaacatgccgccatgctttagaacaagcttgtggctgagaattcgtgcttcttgccttcttatgagcttcggtcatccctcgaagaaattcttttttaagaacaaag

SEQ ID NO: 193475 - DNA, 2238 bp, Cannabis indica
aaaccattttgggcagaaaagagttcaaaactactcaactttcagaccttcaaaattaagtcattccttgaccaaaggctatcaaacttaccagaactacaagagggtaatctaaacaaaacatacacttcaaaagcatctaaaaccacctaaaactaatttcaccatattgttgagtggactttgagttcaaaaactcgaactcctccaacacgaactacatcagctaaaatcttacaaaccaacacagaattcaaccttaaatcaaaccaacaacaattttaagctcaaacaaactctacaaaacctaatccataaaatccaaactaattacaacaaaagcttttcttttaaaaatttaaagagacaaaggagataggttaccttgatactccttctaattcaacactaactctagttagaatttcttagttaattggtgtgtaaattattataaaaaatctggtttgaggttggtatgacctagaaatggaccaaatggatgtgaaaacaacatttttgcatgggagatcgacttgaagaataaatctacatggaagagcctgatggatacaaaaccagcaaaccaaaccaggtatgcctcctacaaaaatcactttatgggcttaaacaagccccaaggcaatggaatctaaggtttcatgaatttatgatcagtattgggtatagtagaagtgattatgacccttgtgtgtattataacaatgaaccaatttggttactattgtatgttgatgatattctcataattggtaacaaaaggcaggctatagcaaaattaaaacaaagtctgaatacagaattcaaaatgaaagatcttggagaagccaagaggatacttgggattgacataagaagagacagatcagagaagctttcactatcatagagaagttacatacgaaaattgatacaaattctgcatgagtgaagcaaaaccagttagcactcccctggcccaacatatttcaagttaacacagagccaatcacccaaaattgaagaggagaaaatgtacatggatacaaactcatgtttgtgtatgaggtacatgatcaagcattgatcacatcagttcaaataataaattcatgtttgtgaatgatatatatgttgtgaaaggaggatacaaactccttgttgtagacttccttacaaagcatcttgtggtgttaaaacctggcagattcttctcattttgctttcactatcgcctttttaggcatgaggattcgctgtggaatcttcatgtcaactctcgtccacctataactgtttacaagtatggtttttcttcattttaagtgagagcgaacattaatttaaatataactatgtaaagatttgctactaaattatatcaataacaataaattttatttataatatgttgagagtaagtgtgttttataataacaaggctctaaatgaaaacatatactaaatattcagcataatagagcttccacatgaactcgtagaattttctgcctgcttcctgcattgtacaaccaatatatatatataaataataataataataagtgtatataattaccgggttgtaatttgttagagcaaactctcgagtctgtacgcaattaaacaattaaaaatattataaatatgtgaaaaaaaattattataataatatatttgctcttaatttcttttgtgagaatttaaatggcaaacctgaaaaattaaccaaaatgctaaggttgcatgtgaaagtaacattacgttactcttgaaagcctgtaattaaataagaaatgatgaaaagacaattaacattaataaataaaatacttgaattattttagaaataataataaattaatcaagaattgaatggatgaatcttatgagtattatttcgggtgtgactcatatggtaaatataatatgatatgaatttaaattttatctaattaaattagaatatgtattaaaatgtaatattaaattatacaaataataattaatggcatgtgtgttagacaatattttagtacctcataatgtataattaataaaatacctgtggccaaataatggcagcaagtatagcagatacataggttagaagaacaattccagaacaaagaaatgttatgtttttagcaccatatctggttgccaaggttgatatgccatgcctatatagaaataagataataagtaatattattaagtgtttgtttaaaaaaaaat

SEQ ID NO: 193476 - DNA, 3067 bp, Cannabis indica
gaaatggtttaagaagaataccttcagttaaagtacctttcaagtatctcagtaaatatttacatgcttcccaatggacagaaataggtgcatgaataacttgagtaagtttattgataatgaaagccaaatctggttgagtgagagtcaaatattgtaagcctcctaaagtactttgacaaagatttttgtcttcaaaggtagatccttcattaagttaaagcttgtgagcactactagtatgactagaacaacttttagccccttccaaatgagctcttacaagaaattcaataatataataagtttgggagagatacatgccattcaaatctctatgaatttccataccaagaaaatagtgaacctgtcccaagtcttttaaggcaaaagagttgttgaaattagttataagcttgagaatcaactgagaatttggtccagtgatgtcatctacataaactagtagaatgaccatagtggtagcagtcccaaaaatgaacaaagaagtgtcagccttagaagctttgaaaccccatcttagcaaagtctgctttagcttatcattccaagcttgaggagcttgtttgagaccatgtaaaactttgtgaagatgacaaacatgatgagattttgagggatatgcaaggccttggggctgagtagtgtaaacggtctcttgtaaagtgccatttagaaaaacattagagacatcaagttgtcaaatttcccaattaaaagataccgcaagagttaaaactgttcgaacagtaactggtttaaaaactagactgaaagtatcttcataatcaatactagactgttctagatatcctcttgccacaagtctagatttgaactgatcaacaaatccatcaacatttaattttatttgatgaacccatttgttgtggatgagttgcatatgagattcataaggtactaatgtctgagtatgattagcaattaaggcacaaaattcatgactcataacagcaaaccaagtaggatctttgagagatgcaatggtggattttggtttagtgggcaggaaggattcaagtttgtgttttgtggaaagatacgcttttggtttatgaatcccatttggagctcttgtgcgcataagatgcactctctgaggagcaacatgctcatatgaggcgaaagaggctgagtgaggttcagtagaagaattattttgatcaccaatggcttctgactcgtgaattgggattgcaggtgagctggttgaagtggcctgaattgaactcaagacaagagcttcaagatgaactacctcagaaccagaaactgaattagaaggagcggtatcatcaatgttcaagacaacggcaacaacactcaaattgatagcaacaacaatatttgaattggcagcatgagcagcattagagtgagactcagggatacatcatcatgaacaacatcagcatgagaagatgaagaagataaatttgtgccaaaattacaggattgtatgaaatgtagcagtaggacaaggagtaaaaagagaaggtacctgagatgtagaagtggatgaagtgacagaaacgggataatatgactcattaaaaatcacattgcgagccataaaaacttggcatgttgcattctcacacaggtaccttttgatcttagaagaatatcccaggaagatacattcttctgacctgaactccatcttatgatgattataaggaagcaagcatccaaatggattcattattgaaatgcataccactattatggcatatctaaaccagatttggcaagcaaagttaaaccagtttcattaatgtgtcgatgcttgcattccacccctccattttgctcatgagaatgtggacaaggcttttgaaatttaataccttgatcacttaaaaatctctcaaatggcctatactcaccaccaccatcagcttggacaccctttataggaagattaaactatttttcaaccaagcatttgaattggacaaagttcaaaagcttgagacttgaatataagggggaaaaaaaaaaaacgactataataatcgacaactactatattgtatttgtaactttctttagacacaacatgagtagggccccataggtctgtatgaataagttctagaggttatgatgctctacaattaaaggataaagagtaaggaagtctatgacgtttaccaagttgacaagcattacaaaagctaagatttttaagtgaatgaggaatattagcactagataacattttagttaatatggcaggtgttagatggcctaatttattatgccacaaatttatatcacaagtaacagtagataagtgaacactaagtgatataggaacaagaaaagagtctttatttattggaaagttggtacatgaaacatctgcaatagcaatgtgagtacaatgagaattacaattagttttaaactgagatacaacactagaagaaacaagattgcaatcaagaaatgttggagagagactcaagctatcatcacctagaagatatagaccatccttagtctttcatgtgatcagaacaatacccgtttgcttgtccttaataaaacaatgagatttgtgaaatttcaagaaaacatcattatccttaattaacttagagacactaataaagttcttgataattgagagcacttgcaaaaacaacttttaacttcaaagagttagtacaattagaaggaaaggtggcatgaccaagatgagatatagaggcttcttatcattacctacaacaacagtttcttgtccattgtatggagtagcaggatcaagattggcctaactaaaagcaatgtgatgtttgatacctgtatccacatactatctcgcatcatcaccaaattcaagaacttattgagtaacaaaggcctgagattcataatcttgagacaactcagtgagatgagcttgagatgaggaagaggaatgcttcagagtcacccaattacgatcaaacttgtagtgacaggttggtgcagtatgaccaaacctcatacaaacttgaaaaagagacctgct

SEQ ID NO: 193477 - DNA, 1896 bp, Cannabis indica
tccaattcatatatatatatttaaacattgatattttaaaaaataatattataaaattaaagttattataattaaactaaaattataatgaataactaattttaaatattattatattttttatgaatagtgcttaaattatatatttttttttataaaaaaatattatttattgaataatataaaaagaattaattatataactaaaaatataaataattaaaagaaaaattaaaaatataattaagtataactacattacaaataatattaacctaacatatataaataaaagcttaattaacacagcttagtttttattttaattctaaagttcatattcatgcaagtcaagtcttcacgaatgagctgtcaatattaattaatggatagtaaactgtgtcaaaaaaaaatacgttaaacgtatagcatcaccactaattatcatactaccactttaagtaatgtaattaattaagttttagatatttaatatatattttaatttaataattcaataattatttagagtcatcttataacaatattaaacattaattaataccggtgtgcactactccaaaaataaaagatcgtgggacaggtaaatattttcttttttttttaaggttagatgattaaaaagctattattggcaaaataataactattgcacatctttgcaactcaattttcaaaactagtgcacatctttgtctagaattatggacaaatttcatatttacgcgtattatatatgtgttaattaagtcaactattctcttaactacttccaattgtttgtttgcggaaattaaaccaaagaccaaatcagagagttgagttctttgcacactaatgccgatgcccaaacccaaggagtccaaactcacaaaattaaagtttaattttatttttatattattatttgccaatattccattaatgaaattcttaaaatgacattttattttttattttaggggaggataaacaggctataatttattgatagagaaaataaagcaaatatattttgatatgttgaacactccagaaatcttatgcatatatatatatatatatgaatattttggctaaataaatactgatgcattatttatagttatgattgattacaagtggctatacaattttaacaatattaaaattcaagattattgttgaagctacaaaacgaaattattacttataaccttaataatcgtagccaagatatataaatatatattttgtactaaaaaaatacagaaattaaagatgttgaaatatatgcttacagcatgcatattatattattatttaactgacacatgagagaataaaaaatgaaaatgttatacaatagcgctagagagaataatatttgcaaataaatttaattagttacaccttctaccttgccataggactagtcacattcatagagtacacctcatttattgagcttgtggaatcagtttgacggctattgttctttccagctaattctgttgtcaaacactcatttagttcactcagaacctgagtcatgtttggccttttattggatgaaggtgctaaacatgccattgatatttcaaccgctttccacactgagtttatttcaaaatgtccccttaatcttggatcaactatattattaatatctccatttgccaccataacactaacccattcctttaggtgagttctggtctcatgggttctacttataacaggacgacttgtaatcatctctaatagaacaactccaaaactataaacatcacttttctcgttcagcctattgtaacgtatacctgaaaattaatcatataataaaactatatttgagtagactgtatgtagggttacttttttcaaaaaaaaaaa

SEQ ID NO: 193478 - DNA, 2065 bp, Cannabis indica
gttgggtttgaattaataaatttctcatcattcatgtacaagtattaaaattgctaaacttatcatcattcgcatattacataaattcaaggacgtcctaattgttagaggcatttatgagaataagcgtactgctaattactaaccacatgataaccaaattgtatatattagaatttatatagatccatttggaaaggtaatataataagtttgtaaagtaaagaaaaggaaaaagaaagcgtgcgcaccacatataaattcaatttatattatatgtggaagacattgattttgaggaaaagaaaagaataagaagctgcatgcatgcagatagaaagagtaataagttggtataacaataatgtttgcagagctgttccaaggttgtatattatttcttggacggccatggccagattaatgtctcaggaagctcgtgatgggttccaaataatgttaacctcttttaataccatctttgtaacttgtaccttttgattcacacccattcatttcagaaacaatttattacacgagcgcagaatattcacttccatttttaattaaggcaagtcaattcacagcgaaaaaaaaacttcaattcttcggatataaattaatgttatttgttttatacatgcataaatatatataatttataaatatgtgcgtgtacggtcattacacttcaatgaaatgttcgggtttaaatcgaatttttcaacctgtacaacgatatccatttaatagcctcttctttttcagtttaattttcctaggcctttaatagaatgtattctcaatcgaaatatatttagtgttttattaacaatatatttgtgtttaattagtttagagagaagtgacattgttttcgtcattcacaacacacattatatataaaaatcaagttaatcaacacacatacttctttcgtcagatatcaattagaaggcatgcatataatatatattataattatttttttaaaataataaataaataatggtccttcaaaatactttcgtcaatatatatcaacaacaccaagggaatatttgagtagaccatgtgtgaagtatttatactgccaccgaaacacacaagaatatattaagcagagatcagctatagagaagctaattaattattttccaaacttaatattaactgttttttttatctgctaaatgtataaactaagaatgaatcatatatatgtctggtgtgatttatcacaaaaaaaaagaaaaagaaaagagagaataaatcatatatttattttcaaatactatagctagtaataacatattccataattttgtctctaacattctttcttcctatgtgagtgggtttttcatggtcaaattctatataggtagcagttagagcgcatatatatattttcaacggcatgacattagtagtcatgatcaattaacacacaaaccatatatttaaattatatgaaagtgttagattcaatataaataaataaatatatacatttttaaatgaaataattatatatatatatattaatatacatacttatttatatatagaaagttagaaactacaaggcacacaccaacccaagctagcccttgggtaatctaaattagttgacttaaataagagagaggacaagagtccctatatggggacaaccgtgattcttgacaaatgaacagtattggcattattttttttgataaaatattatatgataattaattaagtttaatattgttgtgagtgacgggccagcaataccaaacaaaaaaaaaaaaaaaatggtgatcttgatcctacttaaaattagggactatgcatatatattataatttatatattttatctttttgtgatgctctgtgtgtaatttattcatatgtaacatgtctttaaccaattcaacaagtcacgagcagacgaactaataaaccctttttatttaaagaggtacacaagattcttgattcgtcgaagttgactactttgtccctgcagttatttaattataactacgaagattctttaacatattaactttttg

SEQ ID NO: 193479 - DNA, 1560 bp, Cannabis indica
aattactattttattttgcatccttttttttttttgataacaactattttattttgcatcaaattcagaatagtcccatggtatttcaaaaacatggggtcccacaactaacacaacctaccaagtcatagattcggcaatacattgcaaccaatactatgggtcagtcaactcaactcattcaatccacatcctcaaatactatctaatttcttaaagttgaccaaaccaaaatccaaaataatcactctcactcttctataagcttatctacaaatgaccccatttaatcattactcttcttcaacacccctaaaaaaaagtctcaaaacataaaaccaaccaaactcaacccacagatttgactccactctggtttagtctcaactcaactcaaacctatccatataataagtgatattattgaagatgtaatattcacaacaataataataatatggcacctactgcagcaatgcttatcttatctaacacttacaggtcaagtactactagttgtcaagcttcaactaagcctgatgcaacattttctgggctcaaaatctcagtgctgaaatgggtttcagaacacaatcccatatctaaaccaaaatcagatgagaaaggttgggaaagtttcattgataatcaagatcataataatcatgaggctacaatcaaaaacaggtttaaagaggcacttgatatcaccacctgcttataatcaaggcttggttcattttgtttttgtatatgttaaagagtttattctatatgtgtttttttaagggtgtttttctaattaatgctaatttcacttaaatttgtacagttatatttgaagaagtgtcatctgagttctacaatgtacaatattcatattattttctttttaatttcatatagaatttggtaaaacaatccttaatctttttcttattaataaaaaattctttttgtgtttaaatgggtattatcacatacgtatacaactattttttttgtttgtaacaaaatatttccaaatttaaaagcatacataactagtagtgaataatgaagaaaattacttttatgagatgtgggataaaaaataattaaatagaaatttggacaatattgaaggagaagcactcacatctagcatttggctggcctagttgttttcttttttctttattattctaaggcttggattgtaaactagttcctaacttcctattaatgaaaatcatgatgaaaagtttggattgtttgttggttgaatgtcaataaagataagaggtaaataaagttgtttaatatgagttttatgtgggaaatttgagaaactatactttgtgtggggctaaataaaaatataacctatcatgcaacctaattaacaaatatatgttaattggggtggtttggatgacaaacatatttgttgttaaatttgtgtgtgtgttgttttttttttttttttttcaaaaggtttaaaattcagctttataaatataaattaacctcaccattttttatttttttttattatttttatattttactagacctcaa

SEQ ID NO: 193480 - DNA, 3242 bp, Cannabis indica
aaaaagagggaagaattttcagctacctgataatctggaaaactttcttttaaatggtctgcatcaagaaaagtatctttgaaatccactgttttcaagagatcaggcatattagtccattgtgctgcagaaggattcccgtaacccaaaaatatattgtgcaaccagtcaggaacaatgcaatactcattcataagatcccttatagattctaaaatagctttaaagttgttctccttaggcttcctcctcatcaatatattaaaagtcccgtaaacatcttcttcacctttctcagcaatattgcttacatccatgtggtactgtgctgtatctaatgcaacagttacagttctcagttcccctttcggtggtttccattcatcccgtttaatttttccagtaaaatcattcattaaagttccctcctcatcacgcatctcaataacttcacatccccgtacaaattgaagtccaagtctttgtgggacactagccttggcagcttcttctgcacttagcggctcaaatgaaggacggatagaaagtagaaacagaacatcgtgctctttaagagaattccattctgatcttatctgtgctttatagctagaaatgctaaaagtgacttctgctgttacagaagatggtttaacttctccaatgtttggctgctttacctgagcaattttaaattctctaattggaacagccatcctcgaccagccacgaaaaccagcttctccttcattattaatatgggccagaagatgtgggacagcttcttgaatatcctcacgaatttcatatgttgattcaagacggaagagattgaaatttctcaaaagataatcatgaagtgttagaaattgtaaattaagttttggaagtgccagacaaccctcccccgagtaattaatgctaggtacaacgctttcatcccacataatctgttcattagggtacagtggaagagcatttatggcttctttttgagattgttgcttctcaaaaaaggaaaccatgacttcaatgagaaaatcatccctattggaccaaggatcatctgttgacaccaatttaagctgcaataaggtaagagtataagcaacactaccacagctagatacatgaactcaaattaaatgttcctctaacaacaaattacatgaatgaaaaaaatccacattatctgaggccaccgaaagcacgtaggctaacgaccagttccaaccagcatcagatgcccacataaagtagtatacattatacaaaatacttgcatgttacttacagaggaatatagaatagaaaaatcttaaataatgcagaagaaatgggtctggcctaagaaaatagagcttgtaagaaccaccaaatcataaacaacaaaccatattatcgctatctacaaaaccaataagcaatccacatttcacgcaagaggaaaattaagagagagagaaagagagagaaacacaaacagagaccaaacaatcttcacacattcttcttaaggggttttattaaattatgaagacataaaagcaggtacttatcacactaaaagcatacataaaacctggctatcaatgtgtcatgaaaaataccttgtgacaaaccaaatccttcaattcttcagaagaaagaacagacaatttcttggagagatcattgcgcttgttaattgcaccaatgttagccaacgcaaggtccctcaactacaagaagataaaaagaaaaggaattcattaataagtaccttcctccaaattttatctattatccaagggaggatgctttatagtttacattattaatcgcatctcctatactgaccttggaaacctttttaaaagcaaatagttggaaagattgcaggcgatcatagtgagactgaagcacctcatcatcggtcagttgtgtcccaacatgatcattaatctcaaagccttcataaaactgtagtaaatcaacaagttgtgcaaaaagttttcccttttcatgtctataaagagcacttaagtggcatttggcaacaacagcaacatcagcaacaagaggtctcaagtacctgtgaccaaatattggaagggagaagtattatggtaagaaaagtcaaaatagtgtataatagaaaaaacatcaactttttaataaaatcagattaaagtgggtatgcaaaagtctcatcttctacagagagaaactaatgcatgacaaacaagataacgtgtttgtacacttatttaataaaaagtagaaacttaggattggtagaaagtaaaattcatgagttattaactaaaaaaaaagaaatagctgatgggagaaacaagagaacactcccaaataatatctctttcctttttgctaagtaatatctttccacacacacacacacaagtatattacctgcactagaagacaacatttaagtattgaagtatcgaaaaagaaatctcattttaataaggaaaaaagatgtgataatacctccttgtaggcaattggctcaaaaggtcaatcagaaattccataaatctctcgcagtacaagatacatgcatcaccaacatgaccaattttattagtatctccattgataccctgctctgagggaaaaactttggaatcaagtatctgtaaggacatgaaaagtagccattagttcccacatatatacaatgatttactaaaacatatcaccaaaaagtaagtgtgaaaaacaacctcaagaaattcctcgatgagacttctcaaaaacttcacttcaggcatgtttacgggatcaaaagtctcaccgcgttttgcaacttccttcgcctccctttttagcattctcttccatttcttgatcaagtctgtgttcaaagaaagctccatctaccaatggggaaaaaacaaacaaatcacaaacatataagtttttcattcatgtataattccaatcagaagaaaaaaatcctaaatgaatattaaaattgaagcttacctgaaatctaccataggacaaactgtgccaagttggcaaacttgccaatctaaggattgtctcactgacgacctcatcttccaaactctgcgaaacaataccattgttaaaaaaactatcacaaatgtccaaatttttacggtgctaaaatgtaagatatcatatactcaaaaatccaggtaaatcagaaaagacagaaattgccattaaatattcagcatgccattaaatatctgatatgtgggcca

SEQ ID NO: 193481 - DNA, 2909 bp, Cannabis indica
ggacttaggtcctctgagtttctttttgagtattgttgttactcgtcatgactatggtctacttttatctcagaaacaatatgctgcaaaaattattgaacgtgtcaacatgtttaactacagttcatgtcctacttctgttgacactaagtccaaacttagtgccactagtgatgctccttttgatgatccaattaaataccgtagtcttttcaggagctcttcaatattttactttcactgggcctgatatattttatgacgtgaaataaatttatcttcatatgcatgctctgacaaatgagcatatgagtgctctcaagcttatcatacgctaccttcagggtattttatcccatggtttgcatttgtacaaatccacaattgatagactaatctcttatacagatgtcgattggggtgggtgtcttgacacttgtcgttccaccacttctgagtattgtgttttcctcgaggataatttggtctcttggttttctaaacggtaccctactctaacctctagcagtgcagaggcagaatacaagggtgtggataatgttatttctgattcctactagatcagaaacttgcttctatagagttgcattgtcccattcaaaggctactctatacaatgtaagtgcggtatacttatccaatcctgttcaacatcaacagaccaaatacattgagatggatattcattttattcgtgagaaagtggctcgtggcgaagtctgtgtgcttcaggtgccatcccgttatcaaattgctaatatatatttttacaaaaggatttttacacgttttatttaatgattttagggacagtctaagcatacgagagtctcttgctcgactgagggagtgtgttagaatgtatatttagcatgtattcttttattatatgtatatatatatatctttatgcctgttcgacaatcattttgctttttgtttttttaaatttcaattaattttttattgattaccgaacaacaccttagttaatcaatatttattacattattttagcaatcagttagctaatttgtaacctaacagtttaatttgtgtcatctatgaatgtaaacatattattgttgatattttagatagctttttgtaaaatcaaagtcattattttggtaaatgatcatatgaaatgtcttaatttctggagtaattataaaaaataaaatgcctcattactaattatgaagtaactagtaacaaacacagaaatgaaccttaatttccatcatattcatggctgctactatgtaagtaataaaccatatacaatctttgttccaaaaattatacatatatataactctgattattgatggtggtcatgatcttgtgatggtgatccattgttattgttagaagaagtactctgatcaagaaaaagcttatgatttcttctttctctacagcttaagaacctaatctgcattaagtcaagtaaacgtgattgtaaatgcctattcatctccataacatgctttgtcatcttcaatgcccaaatcctattcttcatacatttttccacttccatttgcatggctgctgctgctgcttctggtgtcaactctttctaatccccaaaaataaaaataaaaaattaaaagaaaaaaacataacatgaactcacaacaaagctagctaaaactaaattaacctgtgattgctgcaatttgagtatttgttggcatgaatcagtacttctgctttgaaaacttgatgatgatgatgatgatgatgagttgggaataagagtgattgtttccttggaaaatttctgatgctgaggatacttgtctagtgaagatgaaacccgaaatgagttcatcgattttcggttattattagccattggaagtagccaagactggtgtattacaaccaagttggttactgctcctgctttaaataaacagcatatagtaagaaaatagttagtaatataggagagtgatcatatatcattaactgttgatcttcttcacctttttggtagttgaatttttgtttgattttccatgtagtgatatcccatatgcagatggtgcaatcctcagatgcagataccaaacttgattgactgaaggtcaatgcagttactgccccactgcatgaaccaataacttgtgcaactaaataatgatcagagtagtattttttttgataataatgatcagatcagagtagtattgattcttaaaaaaaacacacacacagtagaaatggatagccttagaggctagagcatctctaatggggcaacatctctaaaggctaacttagaatttgataaaaaatttatgcatttgaaactaaagggtacgtaggaggtgttacttgtgtccttgtagctctactagttgatcttcaaaatggaggttattgatgaaaattgttccatgtacagttccacatattagaatctgcccagttgggtgaacaactatctcagttatcgattgtggataaataatagttcttgtgatccttcccaacactaaatctgacacctacaaaaaaacacacccaaacaaatatatatatttacattttagttttcttttataaattcttacttttattttttttaatttcttacattcaaatctacaatttatatttatattatatctaagagaagaaaaaaaagtgcagcaagatatttgtattttttttttttttttttgtcaatcgtactcttttagttgttaaatgtctcaaaaacacatagatacaaattattagagcaggtattaattaattattatttatcttatttttaattaaaaatatataaatttcaatagaaaaattaaattagtttttttttaattaattaaacaaatatttaatagttaaaatggtataattggaac

SEQ ID NO: 193482 - DNA, 1068 bp, Cannabis indica
ggaagataagttttcaaagtgaatatatttctaaagtagtcaaaagatttggtttagacaatgctaaaccggttgtgacaccaattggttaacatttcaatcaaactatgaacaactcatgccttgaagacaaggaattgattacaccaatattgtaggaagtataatgtcatgcattatgatctacattaggccacttttatgcatggtatgagtatgatgagtaggtacatgagtgatcctggcgtagaacattgaaaaatagttaagtggatgctggtgtatcttaatgacacatccaacttaggtatgacatacaactcaagcagcaaggaaccagaaattgtggtggggtatgtggattcaaactatatatgttgaagatttgaatatcaggagatggttttgtttttgaaatcaatgactactcaaattagttgtggaaggctaagatgcaattaacagtggctgtgtcttgtctagccaaatgtatagcctgcagtgaagccataaaacaagtcttatcttagggttgaaaaacttattcaaagaattaagtatctagatagtgaccctcagagtgcccctcatctcaataagaattaagtatttcacaaaaatcacatttcacatttatattaattaggctccatttcattagagatatcattacaaaacttgagaaagtatttataggtgaaaacctttttgacatgctcactagctaagactctactgtcaaccgagttcaatcactccatcaagctacgtagtgaattgacgtcgataattattaatattggtacgtgaggcttagcttagctactgtcaataagaataatttattgtatttctattaatttagaacctccataaattcaaaaatacattacacgagttcttctatgtacctatatgaggtctaacttttactaaatttgagtattcatttattgtcattttatttattaaataaattaaactaatgtaatgaaaacttctatataatttagtaacaaaaatagacgtagtaccataacgaacgtcactactaaaaactaaaataaa

SEQ ID NO: 193483 - DNA, 1364 bp, Cannabis indica
aaaaaaaaaatactaccaaatgccacataattttatacacaccacacatgtcaccatatcaaatctaaatctcacaaaatcaaacaaaaaccaaaatcaaatccaaaagaaaaaaaatattagatccaacagatcaaatctaggaccctttttccatcgtccctgacccttttcccgccaaagccatagcccgatccaacttcggtcgttcccaaccccttttccgccaaagctcacggcctggaaccattctcattctctcaatcggggtggatttcttagggtgggggtggagagaatttcaaagagaaggagagtgtaacggagccaggccacttccaccagtcagatatcagatggcgagtcgagggttttagaccgagcttggcataaagcgaatagactcagtttgagtcgcgggtgagtcaagagaggagggggttctgtagtcgtgatggttggtgataaggagtgagtcttgtctccatcaatggtggctggtgggtggttgtcgaactagaatggtagagatggcgaagagaaaaagggtaagggaggctaaaggtagatggtgaaggaaataagaatttagtgttatatgaattggggttttttttttctagtaaaataaataggtgcattttaggaacacttttgttttctaattttttaatcagaaaataaacgtaagatttttgtttttaaaaattttatttttggaaaacaaaaatgcgttattaatgattgtgaaggaatgtattgttaataattccacatgtactgaaactattaaaaaaacacccaataatttatttagtactttattaagtatttgaaatacgagaaaaaaaaaataccattaaagcaatatctctaagaagttgcaaatggatctgcaggatcactaatcattgatggttctaaaaccgttaaacatacattacatgcaatagtacctaaaaatactactgtcgttggttttcttttcgatctttacgcatttcactgctccaccagaaattccttatgcccctaccgtactctagcttggtagtttccaccgcctatctagggttgagccttgggatttgacggcagacttgaaaagccacctacagacactttacgcccaatcattttaaataacgcttgcatcctttgtattatcacggctattggcacaaagttagttgatgcttattccccatgtaccgtcattgcttcttccccgggaaaaaaagttcatgacccgtaggccttctacctccacatagcattgctccgtcaagctttctcccattgcgaaaaattgctactgctgcttcccgtaagagtctaggtcgtgtctcagtcccagtgtggct

SEQ ID NO: 193484 - DNA, 2328 bp, Cannabis indica
tatatatatatatgtttttatatctatagattttgaattatacaactgagattcgatttcatgactctaattcctcacacacgcactttccaataacctttatagacatttgagcggttaattttttaggataaagtattcaatcgacacaaactatagaacaaattcggtacatatttttgtgtgtaatacagggtcgtctcaagtttttataggatatttgatacaaatttttaaaaataaagttcaattttaaaaaataaaataaaattcaataaactttttaacaaatatttttattaaaaaattatttgcggccttataaactaattaatgtttttttttgaaggaaaatggtaaaatttattagaatgaactttcaaccattacagtagataaaaaatcagctggagcatcactctcactgaaaatacgatctgaatacaaacaagagctacgagcaagacagtgtgcagctttgtttacagaacgtttaacaaaattaatcgtgactaaagatctaaacaaaattaagagagatggagccacccaatacacaagacaaaaaattaatctccttttttcgtatttctttctcattttttcaaaaaattaatattaattgtgtttgagttaagtgaatttatttcaattatgtttaaatttaatattcttaaattttatttttatgatctttaaatttttaaaatttttaaaattttaaatattattttttaaaaaattaaaattaataagtagtttttttaatttataaaattttaaaaatacacgtaacaaaaataaaaactaaaaatacaactaagtagacgtgaaaaacttagtacatatataagaaactatatagctaaaaataatgctaattagggttgtgcaagtcaatgttttttcattatttaaaatttgatatattaaccctaattttgtaaaaatattattttagctcttgataattttttttttcaattcaatcctttcatccacactttgttttcactggcaaacctttttttcttcttcttttgtctcctgatttttctaactatacttctcataaaattttctattaacacatttattaaattttgtacaatattacaaaattacaccataaaaacatttttacattaattattaatttttttaacagtcttttacgttacatcttctattggagattctatgtcaatttacattaagtttatttttttcataattaatttattatagagaggagaggaattaaaaaattgtaatgcactaaaaattattttcatataaaatttaacatttattctctatacttctaaaaaagtttcattttcgtcctcacaagtatctatcgatcataagtttcatttttatataaaattattattactttaataattcaagtacaaatttataatttttaaaaatgaattataacccataatatcaataatatttaatataataaattaataatattatacactatcaacgttttattctctttttgatattatttacaacattatgatttttttaaaatacatattttattttcttcacataattttagtaatttcgaatcaaataatactattccccattttcgattagataataataataataataataataataataattgatggaatgtgtaaaatccattacctcctctagaatatgttatattaattatagagttttcaaacgtgtaataattaattaaaataatattttcaattttgacgaatatgtcattaaattaaactttacaaattttttacattaattaaattcatttggtcaaaaccaaaataataatgtatgatgaccatattattgtatatattaattaatatctaagcataatatattaatgtataagcatcactattagaatctttaaagaaaaagaaaaatgaataaaatcttggcttaattataaatatctcattctcaaccttactttttatattggagtattctagtttcagctcactatagactatagtgaaactatataattaataaatatcagatattttctttagcaagataataagagaatatatatagataggcttttatttattttggtatgagaagtgctaaatattacaatcttttattataattttttagtcaatctctacgctcgaaattacatgctaaaatattttttctttcaattttttccatagcagtaggcgttataattacagtatcattccggtaaatttttgaaaattttgaatagtttacaatgccgaaaacagagttattgatattcaagtttaccgcgtgtgttcaaaaacc

SEQ ID NO: 193485 - DNA, 2210 bp, Cannabis indica
accaagagggctgatatttcccatttcaaacttggattatattattttgttcttggctaactcaaaacaggataagtcacacctcaaactctttcaatttggcaagggggagattatacaaggagctccaaacgcacttgggtgataagtttgaccatatttaatgcttggtcattttctttatagagttaaattacagctgagctaactgcatacctatattcatctctagttttgataaattaccagtaatccatacaagagcatgttccatgctcaaaatggtggaacctttttctatctcgcacaataatcttacgcttataaatttttgagattaactttatggaagcgtgacaatcttcacatatgcgtaagttcttcacaatccgaagtggtgtcttaggaccagtactgatcaagccaaaagcaatggcaatcttctcgctgtgatgttgcaaattcatctgtttttcttcttcatccatgttgagcaacacttgttcggtctttggcgaatagcccgccaatctcagctggtttgaaatctcattcaacattgagtggatttctttagctctatagtgggagtcatcttcaacaagaaactcttgaatcactccatctagctcaatccaactacatccaggatctttccttatatccatgtccttcatcattaatctcacttccgaaacagcttcccagtttcctgaagaggcatataaatttgacagtgcaacataggatccactatcacgaggagccatgtccattaaaatctctgctactcgtttcccaatctctatgttcttatgcatcttgcaagcaccgagtaatgccttccatatgacatcgtccttttgaattggcatatttagtatgaactcctcagcttcttctaactgcccagcacggcctaaaagatcaaccatacagccataatgctctattcttggttctaagccaacaacactaaccatatgattgaaaaacgacctgccttcctccaccaagcccccatgactacaagcattaagaagaccaatatatgttacatcggtgggcatacaccggctttttgcatccgagaaaagaagtaaagagcatccttcgctcgaccatgcatagcaagtccgccgataatggcattccaagtgattgcattctctttaggcaacttctcaaaaacttgaagtgccttctcaatactcccacacttggaatacatatcaaccaaagcagaaccaagcacatcattgatctcaatcttgttcttttcagcatacaagtgtacccattttcccaattcaagtgccccaaggcgagaaattgcaggcaaaacactaactaaagttacataatttggtgaaacatctcccaattgcatttctctaaacaattctatagcttccttaaagagtccattttgtgcatacccagatatcaaaccattccaagaaaccacacttttctgaggcatttcatcaaacaactctcgtgcagctctaaaatcaccaattcttacatacccatcaaccattacattccacaaaactacattaccctcttgccttctctcatctctacccactttatacacattcccaaaatcaatcaaactcttctgaaacaaataattagcatcaaccataactccacacatcacatacatcctaacaagattactaagaacaaacacatcattatccaatccatacttgataaccaaaccatgaatttgcttacccatttcaaaatcccttgttctagcacaagccttcaacacagaagggaaagtaaactgattgggctccacaaaaccagcaaaaaccatttgacgaaacaacaaaagagcctcctttggttgttcctcgtcggcagagcaatctgcaaaagctctaataatagtattccaagaaaagcaattgggttttcgcatttgatcaaatacttggcgcgcgtactccaaatcacgatggttggcgcagaatctgaggatttcggcggcggcaagtgggtcgtggattttgctggttttgatgaattgggcatggacttgggtcaagtctctgatggttttgcatgatgagattagagggaagagtgaagaagggtgagaagaatgcgatggagatggaattgtgggcttggagattgtggagttcatggagatggagttgtaacaatggctgtcgtttttgtctttt

SEQ ID NO: 193486 - DNA, 929 bp, Cannabis indica
tcataattattacagtattacctatatttccctattaccaagagagagagaggagagttataatcatttatgttggtttggcaaatattttagagatgtaagcaaaaaaatataagcaagaaattctaagtggatttgaatggtggtaatctgctactaaagcttattgtatatactcttattacttagaactttgtatggtttctactctatggtttagaactagataatgctacattattgacatcttctttatcgggttgttgctgccaggcctgggactagtccttctgatattcacgcctttactctcgacggtcatctgcaatcataataagatggtaattctcttacatatcatctaaatttgcagaggagaatgaattaattaacttttcacttccatctaagctgcctttaatttccagctctctcttcttagaagttgatgttcctttcttgaaaaaattggtagttacttgggttattaattgcttatttagtttgtcctaagaatttggtaaaattgttagtttggtacagtcgtaaaaatttgtaaatgtttgtatcttcagttatgtaccaactgcttatacaagtatacattacagctgctcatgttctgttttttagccgtagaatgcatttctttttctgagaaagttgggatcaaagattcaagaaaatgttgttccagaaaagaaaaataaaacaaggttcaagaaagtgtatcttcaccaattctggaattccattctatgtatttgaattctatggcagcgacatccattccgccattcgaatatctgaatcaagacaagttgatcaattagaaaatgaatggttttcttgcttggttcctaggttttatattgggtgaattgagaaactgtaagtatgagcaacttatgagataattcatagaaaaa

SEQ ID NO: 193487 - DNA, 1625 bp, Cannabis indica
agtgtcaaatgttatttttgtcagcttaattgttatcctaattcagatccatttaaaaataacttaactctaacagttaacattttcattattgagggctagttccataacatttgaggaattaattctcctccattgtttaatttgtgtgaaattttatgtattcatctgtatgttaatatttttggtaactagctaggtatgaagtataaactttagtcatgaattatcatttgatcagcatatatatatgatcctcttataggcagtactatatttagtttagcccatttctaggaaacagtagggataattttgataatagaagttcttaacttctatgagtaatagatggagtaaaacaattgtaacatgttggtttgtttatcatataattaattgttattcaaagctatagctccattgtgatgtgagatcatcaaataaataactaattgattgtttttaatagtgacttctatagttgtgtttggtgagtataggatgtgttggtactagctagacgctcaatcacaagctaaagttgatatatataagatataagaaaattataagaaccataaaatcaaaattgagacaaactatttagaaaatattgtagaagtatgtgtcactatagcaaagtgacttttaacttgaaattaataggagcaagagtagagatttacttacaatcttgcatgtttaagcactagtagtttctttggtaaaaccaaattttcttcttattttttatttaaagaatgttaaagtgactttaagtgggaaaatatgtgatagctagcaaagcttgtttaatttactccttcaatgctatggaataaagtaaaagtgtggtttttccttaacacacttagtcttttctcaccctttctctctataatggggatcctttgcactcaatggaaaatagtgatcatgtctcaattatctatagacgcaagaccaagaggcggtaaagcttaggctaataaaactatgaaccgcctatagtgatgaggcagtggttcgtgctaaattgcaaactacacaacttgttacttaattcaatagcttttgacttaaccaatatcatactgaggaagtaatagtagatttattgtcacatttctctcacttaaattctttctacttgccatttctatgttcatgctgctaattatatgtttccaactagctagctagctaggctgatgaaggatcaacaagaagtaaatatatatttaatttaggttgcctttagtatggtcaccttccaccttaatataaacaaaattaatgatatttgacttgtatgtactttgtcttttgagtcaaatatcttggattattttccatgtgggtgcaaatcaaaataaacagaaaatttctcttgtttgctactaaattgcctattaattatcattgaattcacctcatttagatatcatattttgagcaagagagtgagaagtcaattacaaagatacgaagtgtgagagagttttagagagaaaatagtgaggttttctcctaaaaatttgtagtcttttgttagggagtgacttttttctcttaaaagggtatattgtcatttgtattgtatacaaatacttttattgtac

SEQ ID NO: 193488 - DNA, 1141 bp, Cannabis indica
aaaaaaaaaaaaacaatataattctgtacatttttttagcaaatattcacatgttattaattaatatattcacttggttatgaatgaatcatgcatgattaattattgcattgtcatgatgaattaggtcacaaacttaaagcttattataaggggtacctactagttttttcttaaaggcagtagcaaactgaaactaactaagaaaaaaaggcaattaattactaacaaataatgattatgatgtaggagaaaagtcttattttccaaatatatccttaaatccttttacagcaagattgcaagatattgacagtgagtactgagtagtttaactataatcactgctttacaagttatgttattaattagttaaccagtgcccatattatatatatatatatgtaatttttattttttatattttaatacatactttttatattgcttgtgtacattatttgcgatgatgtgtgctttaccatttggattggtttacctttgccttatcttggatatatatacccactaacactaacatttggtaatttattatatgaaatatatgcaagtatgaagtatgtcctaattaacctacccactaacactaacaaatggagacaaattcgtcaaaatcattcacccaatatcatcatgtattcaaactatactctattattaatactccccatattgatttatcgatcacactcaataacttgttgactcttataaaatcccaacaaaaatattcaaactaaaataatcatttttgttctctcttccaaataaaataactttatttactctatacatattgaccaaattaagttcaattttaatggtttttaaaacattattaaaatttgaaatttgagtaatgtactttttttcttcttcttcttcttacatatgagaaatttgagtaaaggttatgcgtcacattcaactcaaatttactcaagtttataaatcaaatggtacaatgatgagccatccccaggaaatttattttgtcaaaataaatgttaatatctttttttttttaaaaaaaaaacaattaaaaatcaaagcagacttgatcctgaagtgtccatagaaatctccattttctataatatgaaacaaaatttaacagaat

SEQ ID NO: 193489 - DNA, 1397 bp, Cannabis indica
aaatctcagtacttttcaagtttaatgtttattgtaatcaattcaggacaatgttataagatatgtgatattttcaaattaagcataaagctcagaataataatattataaataatatctcaattaggcagaatttaatttcagaatcgaagatatataaatataaacccactgaagagttcaaatcgaaaagaaaattctatacatagtttgggctttattatgtggcttagtataaacaaaagctatcaaaggtttataagtggaacttttttaatatattataagctaggcaaccggtccttgcttatattaattaactaaccatactaaagagtggagctaagtgagccaaatgttagcactaattaagctgtagattagtagtagcatttagagattcaatcttacatacatattattttaatttattatattacaatacataccaaacatattaatttttacaaaaacataaaataataaagttagttaagttaattggttctccatatacttggtaaaatgatgtgtttcggtttcaactttcatgtttccgaaataatcttatacatgatatttctttatcttcctaaaattgtaatagtaattaacaaacattaatttttaaaaagttatgtagttttcctattgagtacaaattaaatctttccattaaaaaacaaaatgaattaaatctctgaccattttctttataccgaatggagaaatttctccttcgtataatgaacgtagttctattgtattaagtgtaattatttcattccaaaaggaaaaagaaaaagttacgtatctactacatcatacaattaccttttaattacaaaaaattatttcttaactaattaacattctaagatatattttaataaaaagaactttcgtatattttggttcaacattccaatcaattttgtgtgtcaaacaaattcattaatgtatatttatgtttatggtaaatatacccaactgaaatgcataaagtgtgaatatcgctataatgtaattaataattaaatcttatataaattaatgtaataaattttacaaattatcactaattgacacatcgatttaaaattagtatattaatataaggtgacaattaattttaattagtcttatatataccgttttaagtgaatttttcctaaaatgtttatatatatacatgatcttaaagattagacgtttaaaaaaggactagtagtcgtcgatcgagtgtttagctatgcatatataatatgaaacttcatttgcagttgaagtcgattctcatccataaatttaattaagctcaattaataaaataaagagtacagtagtgttggatgttggtaatgctagctgagaccatttcagcatcatctgttatc

SEQ ID NO: 193490 - DNA, 1385 bp, Cannabis indica
taagaaaccctagaacgcacaagatctaagaatgcaaaacaaaaacaaagaataacaatttaaaacacaatccaagctaaaccttaccagatctgaagctcacctaactaatgcggcagttccaaactccaaatctaccattcctggaaacaaaactcaaattatcagaacatcttctcgagaaaaaaaccatctgtgcatatatagatacacatctataaacaagtctaaaatgcttagatttctacaactaagagcaacacataaaggtatagatatagaaagatgaaaagaatcgtaccatgagtagggagggtttagagagagaaaaagagagcttcgaaatcaaggaaaaatgttctgatctaaagctacttcagttttcttaagctctcttctctgctcgctttactctactactctgtacctcttcgactgatgagcccaaaaaaaaaattaactcagaaatttgaaaaataaatataaattggataaaatagaaagaaagattctgtgttgtagagcctacgataaaatatttcaattctcacagttatcaccactggtttgaagtactttttgggatgtgaagtccaaaaatggagcttacgatagagttggatgtattggataatagaaccacttttgaataaaggaaggtggtggcgttggttgtcccgagtgcagttacttcagaaacaagtgtctagcttctttattccgaagcattaggcgaaatgacctttttcaccatggtacttgaaatacttaacccacgcgcgcgagtgtggatttgagagtcaactagtttttcttaaaacttaattgtgtaataataatctctttttttcgtgtattagtgcaataatctcgtgactacaaaactcatattattattaatagaaaaattagtaaatcttaccctaaatttttgataatactaattttatctcctaaaatatagggcttattaaaaattcctcaaacttttacatctacagattttaaattcttctgttaagttccgtcccattattccatttaaatgataatgtgtttgtaaattagtaactttattccctaaactttgataattatcaaatcgtacccctcaaaataaacatgagaaatatttaatactttttttagtaaatctcaaaaaaataatttagatcttaagaaaaaattattttgaatgaataaaaaaaattaaaaaataaattaaaattttaaaactaattaagcaatttcaaaaaaaatatttatttattattaaaaaatttatttagataattaaaaataatatattaaaaatttaatttttgttaaaaactaaactttacgggaacaaacttaagtatattttatttttcttcaaaaaatac

SEQ ID NO: 193491 - DNA, 960 bp, Cannabis indica
atatggatgctaaaaagcactctacctaaaaaaaattaaccaaagttaattaaagttgtgagacataagtgaaagaattagcgctacattgagtaaaatgatcacctgaagctccaacggcaagggatcaaatccaagccgatttccgaatcccaataagtgaacaactcgattgcgcaaaaggagggggagaacgattttcagataatcagcaggcttcgcctctttcacaagatcttcatcagttatctgaattgaggagcatgaaaggttaaaaaaattataccaagggaaaatgattccttcatcacgaaattttaaattgctaaatggagatagtcacatacaagactgccaattgcttcaatgtccactgatttcaaatcaggggggagctcctttactatatctactccatccttcataatgtcaataaaatgattttcttggtatatatcaccaaattgactgtcatgtaatcaagttaattagtacattttggcagtatatttttagccatgttactagtcgtataaaaacttaactatttatttgtcatggtaaagaaatatataacatctttgaaattgaaaactatttgacttagacaacatgataggaccatttccatttccagtttcacatattaatgatcccaattggtgcgtattgtccttataaaacccctttttgtagtaatgattgttttgttcaataattactatttctcaatttaattaatgtatttaatttattaaggagtatatgttaaagacaatgtttcataccttggatccttccatacactgctgtaaaggaaccttggaataacaagagttgcatttagaagtgacgccacagcaacagcattgcaaatctgcaagcagttgcaatatcttggtcaacctattagtggaaaatgtactacaattaataagaaaatcattacaataagatcag

SEQ ID NO: 193492 - DNA, 2101 bp, Cannabis indica
cgtcaaactctcgggtacctactttatatatttataacaacttctatttatttattaagtattttcaaatatacaactactactagtattactatttactactcaaaatttgaaaattaaggtatttatcatccacaattctacatattcaaattttaagtaacctaagaaatgtagggaatctgggatatagtcaattccaaaagtttacgagggtcaatacatatttaaaaaatatatataaataaaaattatttatttatttttaaagtaatttttttttatatttttatgaaaatgcaggtagcaacttatttaatacctaaatatatatatttttttaatattttttaaaaataccatttatctttgggctcaaaaaaatttgtttgtctatgacccattttaaatcaaaaccggccccccaacccatctaaaaactactagagcaatagtaataatgttgtgatgattattgactaaattatgtattatttttaggtacggagaagagatgggagctgtgttgttgcaggcaggtatgtacgtggggctaatagcagtgacaagggtgtcacggggcaacatgtcgaagctatggtaccgtggggtgcgtgtggacaagaccaaccccttcattcaaatgggcctcaaattattagctgtttggtccattattgcagcctacgctgtccctttcttcctcattccatgtaccattcaccccttgattggctggacactctatttgcttgcttcatttgctctttcctctgtttccatcaatgcattcttgctcccaactcttcccattttgactccttggcttgccatttttggggctctttttgttatggcttttccttggtacccagatgggattgttagagctatttctgtgtttggttatgcatttttgtgtgccccctttttatgggcatctatagttagagttaggatttgtcttacgaactcgtttgaaaaagatttgttttttactagattgggtgactccaccaccaccacgtccccttctgggattaacaagctttgttaatttaatcaaactaattaaaacaaaaacccaaccatttacttaatttatttgtaatatatattgatcaagcattgtaaaagaagaaaaatatatctcattgaatagaatcatttttaatcatgtatttattctctcattagttttttctatttcctaaatatcttgaatatcagtcatacttggatatattatatagtcaaaggtggagtcagaaaggtatgatttttttttttgttgttgttgttaggcagaattattcaacgtaaatgtaatgtttgtggagaaacttatatgtcagtcaataatctttttagactttgattttgttaccaatttgatttatagaaaaatacaccattttatttgagtttgtaattaatttcttttaatggatatttcatgatgaaatgaaatgtagtatagggatatgcccttcttggaaatgtcctcctaaattactgtcttggaatctttcttggctcttttctttcattaatcattcttttcaaactcttatttgatgtgataaagtatttgagaagtgttggtaaaccaaatattataactttttacttaatttttgttatcgaaaatacatgtgttcaataatttatttaaaattttttttaggctaattaagattttttttcctagaactttgacatgtaccgaattatgcccatgaacttttaaggtcgttaaaaatgctccatgaactacggagattattgaatttaaggactttttgtctaactttagtaaaaaaaattctaacatggatgaaagttcaagagacatgatttacaacatgttaaagttcgataggcatgattttgtagatatcaaagtctggggagcatggtttaacacataaacaatcactgaaatagtaaaattgaaatgaaattagacaaaagtccttaaaatctaacaatctcaataatttaagggaaatttttaaacggctaaaaaaagttcaagagacataatttggtatgtaaagtttagcgagcaaaaatcttaattaatttttttataataata

SEQ ID NO: 193493 - DNA, 2856 bp, Cannabis indica
tctcttctattccaatgcatgcatggaagtagcagacttttcgctcgaaatttgagccaatcactttgctctttgtttcagcaagcttccatatagattactacattttcagttttcttctctctagcttggtttaattccatttgtaaagactaggaatggggatctaagttggagagaaatgttagtctggttgtaagtatcccgatccaattcatagtccatcttgacatccccaaaatgagaagagttgaactttctcaaagctggctgcaatcttctcaacttgtaacacaaggttgccaagttactacccttagcatctttcctccaagattcaagcaccttctccttaaattggaaacaccacatgttgaaaaacttaaatggcatataccccaagtttctcgaattcagctgcttaatcacacaaaaacagtgatctgagacatcctcccactgaaagtaagcttctgtgttaggatggagatctaaccactcctcattcttaaagagcccatcaatcttcaaataaattttctcttctttacctagattattagtccaagtgaagtgagaaacacttcatttcatcagccaaaccttgagcaagccactggttcgcatcttttaattctccagcacttacaggtttccctcctgttttgtcactgtagttcaagaccgaattaaaatcaccacatagaatccatggtttgaacgacatatacaagttagccagtctttgccataatagattcctctcagctagagagttactaccatacacaaatgtgagacaaaaagatttatcaagccctgccatctttattcgaccatgaacaaattgctcaggttttttcaaaatctcaacacttacaagcttattcaaccatacaattagaattattccttcaattttgggactagaaaaatggtccaaccttgtaaggaagaagccataatgtctttaactttattgcctctaactttagtttccaagattgctctaattcccttgctgctagctagattggagtaattaaagaatataattgtcttactattaattcattatataaatggtccactagcaaagccttccacctaataatatcccctctacataatgaattcctagtagaagatgggaactgtagcattctattacatatggaactgggtttcagggtttctagtgaaataagatatcacagctcccatagatgtagatatcattaaatcatgcattttttacttcttcttgtgttttacatttttttaagccaatagtttccatgtaaaatctattgtttgtatttcgtttgtacttgttaacaatttagatattcttcttgtaggttatggagactagaattcggattgtgaagaaaaagaggaaatcatcaagttctcatgagaaaatattggatgttttgaaggtaaaatgcagaatatttttccttatcttaaataatttgtttgtaatcttcttggtggcttacctttcatacctatggtttacattttcaaaagcatgacttgcatttcagaatttggcgattacattttaatgcatgtgattatattaaatgcttctgtggtttacaattctcaatgcatggtttacattgccacatattcgatttgttatttatttttgacaattgtggtttaaattaattgattttttactcctaatttgttttcttaaaataagttgaatttgtattttacattttaaaactgtgggttacatttacagtttagaattaatgatttaatttttacaacatttacattccagaattagtagtttaaatttgagaacccgtgttttacattttagtatctttgatttacatattttgacttgtgtttttcagtatataccagtagtttatcatatgtttttacttgtggtttacatatgcagtttaacatattttttttgtttgtgtttcaccttgtctatttttcaggaacttaaagaaagaaatgctgaaataaggagagatgttgctgaaataaaaaaccaaatagttgaaagtagaaaaattatagacaatgatatgactgaaattaaaaatgatttgaaacatattggccaacttcttcagtcattttttaatcaagcttctgtaagcaaggtcaacactttgggagaggaaaagaataattatgtctcaaaatgaagtagtgatagaggaaagatggtggtggtgacttgtgcggtgggagatagggaagtaaatggcagagatatgtatgtttctgaatctgagtaagagtattactacaaatactatgggaaatgcaactaaaaaatgagtattattattaagctaaatgttttcagtaggtaattttagtcaactagtcataaaagtgggtgctttttcaaacttgatgcagtagattttattgtcatttctataattgaagagtggtggtgctcttttttctttggggcctattttgtgttatattaatatcaccaactctttataaaatgacattttcctctaaaagaaaggaaaacgtgccatattaatatggaaagaatctattgacaagggtaaaagcgataagcgatattaataaatagcaataaacggtgttcctgaaatactcaattcaatttaatttacacaatctaataaaaattttaaaattgtggattaaatgttgattcacatgtaaaattaacagattcaatttaatttttaaatatttatataaatattttaaaaaaattatatatacaattaatattttaataaaaaatataaaattttttcacgtctatacttattgagtaaataattatatattagtgaaaaaataatatactca

SEQ ID NO: 193494 - DNA, 2023 bp, Cannabis indica
aaaaaaaaaaaaaacctatatctatgcaaaaaggaaacaaaagtaaaatttggggtagtaaagaataaggagaaaaagggaaaaagaatacttttcttttgcttatactttcttaacactttttttttggtggtttttgtttttattcttggacctgatagctccatagcataagaatccaaggaatgatcatcatcatcatcttccattgttgttccaaacatgcttgaacgatcatgttcactgcaagtcatggtttttaaggcgagtgggggtggcggtagtagtagttgttgtagggcgggaagtacttttgttgtgaggattatgaaagaggttcatgctgggattagtatgattatgtgaagctgcccacttctcggctaggccatcgccttcgagcatccgaacaacctctgacatcttcggccggtgggccggtaggtattgagtgcaaagtaaggccacttgtagcatctcccctacttcaatccgatcataattattcactagctccctatccactaatagctccactttcttttctcgttgtattttcttgacctgtaacaacagtgatatctctgttacttcagtattgcaattgaacacttactattattggattaggcctaagtataaattttggctaaaaaaacaaaggcattcatactaacccattcaagcatggctcctttttgattggttgtcttgccaaactcaagcgctctcattccagttatgagctccaacaaaagtataccaaatccaaaaacgtcggtcttctcagatgattggcctgtagagagatactcgggagctatgtggccaacagtgccacggacagcagtagtgacatgggaatcagcatggtcgaggagctttgcaagaccaaaatcaccaacaacagcctcacagtaatcatccaagagcacatttgcagccttgacatccctgtggattatcttcggatcacattgttcgtgtagataaagtaggccccttgcagctcctatggctatcctcttccttgtattccaatctagtgctggttttcctgagaaaatgaaaaacaagatttgaggataagttcatatgattttattaataagagaaaagaaaagaccgaattaatcaaataaaaacatacaattttagaattgaaagtaaaatctatagcatcctattaattttgaggttttatatagtcataacatattgattataactgcaaaaatagagcaatcaaactaacctctaagtcgagatgccacactgccattagacatgtacgggtacaccaaaagcttctcgttagatgtagcacaatacccaatcaaacgaagcaaatgcctatgaaccgcaaggcttatcatctcaagttctgttcggaactgagactccccagctgttcccgtcacatcctttaatcgtttcacagctaccaaagtcccatctccaatttttcccttgtacacatttccaaaacctccagccccaagtatgtttttggagctaaaattgtcggtagcatgttgcagttccttgaaagtgaagcttttgaggtttcctaaacttatcaacccctcttcttggttgtctacaacaagtacacaaaccccatcttcaactaacattctatcaatgttgattataacattaagtgggattacaaatactaaccattgatgttcaagatggttaggctgtgttgcttccttctatgccaaagaataccaaatgataatattatgaggaaaacacagcttagactaaccccaagtgcaattgctaatttcttaggcttttgttgaccttaatcatagaaaaaagtcaaagaaaaagttaggcaaaggaaaatgagaagatggtttagttaaagtaaataaaaaagaaaggactaaaaaggtcaccaggtgatgagtctaatgagaagctaagaggaattggggtcactgttccagaacaaccctcagctgaggtgcttccacaaatcaatggatttcccacaatgctaacaaaa

SEQ ID NO: 193495 - DNA, 2172 bp, Cannabis indica
agagagagagagagttatggttgagattacaaataactctatacctgacttttcacatcccaaattttaacaatagcctctgaggttcccgttccaaggataagaccatcaggatgaaacgctgcggatgtgtagccaccctcagatcctgtagggtcctctacctgtaggaatgggaaattacatttagttttctactcacccagaaataataaaatacaactttatatacaagtaaagcttttacaaacttcatgcagaaaacaattacatacaccagtcaatttatgttcgtagatacaaatgtgacgactttatgaagatttatgcaataacgtgcatcaattttgaatgtgtaaacttttataggattttgaaggtgatagtctataacgtttgcaatggtcagaagagagattcagattaaaacctgagtgaggcacaatccagaagaaaactcataaaagcaccatgtgttgtcaagagaagcagtcacaaaataattatttgtggcatgaactgtaactgcttgcacctgaaatcaaaacactattaaacaggaaaaacaaacgaaactccaaattttagcaggataaaaaactaaagaaaacaaaccagaggcatggaagcccgccaataagtaaatatcggtcaccaatggcactagatataccccatagaatcgttagttcaacctaagtaaaaatctttactgcactatacgcattaataaagccagatttttcagaaaagcttaatgcaattccataagcaatttcacacaccgaatttcataataggtagggccctgttattgacaatttaatttaattacttccattacttggccatccattaaaagggaaaatattattgttgtgtatgtaagtgcaaagcgaaaggttaggaggatcaactgctcactgttgctccatccccattcgaaagtcaccatgtatgaaaccttttaggggtcacaagcattttctaaagatcatttctaatacttctctacacagtgcaacagacttggtagccaggataggtcattgagtgtaaattcaaactttcttgtgtctgcgtgtgttgcataatttgaaaccaatttacctcagcattatgatctttcaaaacgtggttgcaattatagtttccatcatcggacccttgccatatccgtactgtctgcaacatcaagtacgtataatttaatgtcaatttctacccaaaattatagaaactatactttaaggaaatgcgaggaatgtaaaacagctttcagagaaaattgaaggattctaggaaactcctacaggaattgtacataaatattgaaattatcattaagtaattttctttgttgaaaccatctttttctcttttaagataaatggtaaaagtaacaagaaatcccgacttctaagtttgcaagtctaaatcctaatacttctgacaagtgacatcaaaatatcatactccagaccaaataagaatttaaaaaattgtaaataacgtaaagacagtagggacccactgacatccaaagttgaggtgaaaaggatgaatgtagcttaccttgtctgctgaactactcaagaataagtcatcacgtcctacaaattttacacttgtaacctaccaaagaagcaattaactatttataaggtttaataaaaaaaagttaaaacaaaaagaacatatataaaaattataaggagaaaacaacataaaaaaaaataaacctatacatatatataaagcatcaaacaatagaatatacttaaaataaaaataaaccttctttgagtgaccactaagagtagataaaatttcccctgaagatcgattgaatataacagcatttgtatcaaaacccccagttgcaatgatgtcctgatagaaaaagtgcaaaataaaattaaaagctttcaacgatcagagaactaaatcagattcaaataacatatatgtactatctgcctcaattgtccacttaaaacaaatttgcttgaaactaacaaatgcaacaaaccccataccttgttatgatgtatatcaatagatgcaatgcctggtttacttgttttctgaagtggatgactagatatctgagtatacctctctagatcatcaataggagccaatgttgatggtatctaagtaagccaaatc

SEQ ID NO: 193496 - DNA, 1619 bp, Cannabis indica
tctctctctctctctctcaaccagcaacatactaccacccaaacctcgctgctagctctatgccccaaacctctctttttgcccccaaaccccattgctctctctctgccctaaaccacgctgctctcacaatatatttattgttctagcattgattcactactcccaccaccatcgatttagattcattgaggtcatctctctctttctaatttcatcttttcctttgtctttattcttggactttatacctttcatttttctcattgttcaaattcaaaaattcttatattattttatttttctttctgtacgatctaaatcaaaaataccatcattttttttatttttgtataaaaaaaagcaaaagaattggattcctaaccctaacttatttcttttaatttctcaacagaggacttcatcaacaaatttctcatcggtcgttgttgtcatctcctccatcgaagtctatctttcatcaaaattttcaacgtctattttcctttgattattattattctttgttttgaaaaaaggtattcctttgattctaaaatggcaataattgatgagtcgtcgaattggttcctcttataaacttagggatagataaggtgtccacatttaaaccctgttgtaacggaggaaagatgatgaatcaccaatttttttttattttttggtgtttgaaagtgttctatcaatgtatgatctgaactcgtattaatatcattttaccgataattcattttatattaaacaagtgggaccgatcatggttataagagctttgtctttcctagcttttcctttatataagttaaattacatggaggtttctagttatgaagattgatgcagttcattttatggcattagtaaagttaaaagggcttatgtttttcatgctctatgaaagtagtatttaaatctatcatattcatttattggttttcacttattattttgtatatgattctttttttttagcacaacaagtaccaattatatatgttctctattaatttacttatttaatattctctttgacctaaaaacaaagcaagaaggcatcaactcttgtgcatgaactagaaagtgctgagcaaagcaagactcagatatgacttaagtggaaaagaagagaaagcgtcgttctctagtattgttgaatcaaaagtatattaataaattagcactactttttttcttttaaatttttatgacatattgttctctttgtacatctgagttctccaatcattttcaactttgtcattattagttcatattataatgtaatataagttatttattgtgggaaaattacatataaaggtacaaaatcaagtcgatgaaactctaaacaatcaaacgattagcaaagacaagattaatagatcgagcacaacaattgacagtaaaataggggcaaacagagtatgtaaaccaaaaaataataaaattcaaaaaaaaataaagaaatcaacaactagttcaagtccgatagatcgatgtgatctatggctctactccagttctagaacacccctgtaatccttctttattgattgagcaagaaaatgtactaaatagtcgagatgagattctttgtt

SEQ ID NO: 193497 - DNA, 917 bp, Cannabis indica
ctgccatatgatttggtaagttttttcttttttactttcagcagttggcattatttccaactagatttgttgctgtatttttgtatcttacttgaaatttccctttccttttagctgtaggcattatatgaaaacttgtggttctttccataatcaattctgaaaaaatggactttttaataagataatattaagatgtatgaattttatccatagtttgcatctttaaatttctgtgtcttgagttgagacgaaaggtctgttaacaaattactaatgttactatcatctttgtacatttcaggtaacttatttgccactaactgttgtaataactaccttcaagaaggagaatgttaagaagcctcttgagggatttggtgttcttgttccttcagtagagcagaagaacggtttaaaaaccctcggtaatacttgtgtatgatttgtttttttgtttgacctgctggaacttatgtaaggtttggtgttcattttcactgaaaatcttagtttgtttcatatgctggtcaccaattattgatttgtatatgatttgaaggtaccctcttttcctcgatgctttttcctgatcgtgcaccaaatgacttgcatctttatacaacctttgttggggggacaagaaacaaggaattagcatacgcatcaacgtaaggaattagcatctgcacaaacaagtttattgttactttttctgcttccatacattttagttcaaattacaattgtttaatgctgtagggatgagttgaagcaagttgttagcgctgaccttaaacagttattaggagccgaaggagagcctgatttcataaagtaattatcttttccttatcttactcaatatgaaagaaaccaaactgcatggattatgtttgtttattggataattcttt

SEQ ID NO: 193498 - DNA, 1681 bp, Cannabis indica
agtatactgtgttaagttttcgcgggtgttctgcaggtattttttagttgttctactgttattttaagttgttctgttttgtgttctactagtgttttataaaaacacagtatttttgaaaactttttcgtgtgacagtatttttataaaaagtaactcaaattttagtatttttgtaagtttccctaattaaactttacattgggcctaggagatagttgggctaagttatgggatatggcccaaaagaaaaatatgaaaaaaaaggaaggaaagcataaaccctaggttctgtttggttacagggtgtacactgtacccctcttcttcttcttcttcttctttcccatttctcacgaaattagcatcaaaatttcaactttaccccataattatttcctgtaacataaattttactcaatttttctttcatggcggccaggaagctagttcgagattttctcctttccagacaacgtcttttcattccaccacaggtttccatgtttatccgaataatttatagttatgattattatgtttattgctgaatgtttaaattatggatttgttgattggtataggcttcgactacgagattacggttgcctttggctaatggatattcgggaaatcgtcagttcagcgtgttcaatgaattttctaagaaaattaaaggcgaagtcaacaagtatttgaagctttctctctctatttcttatatgtttgattcagttaagcttagaatgattgaatttttgagatatcttatgtaaaagcttagaatagctcaaatgtgagtgagggcttttgaggttatcttattgcttaaatgaaaggtttaatgataggactaattagagcttaagaaattattaccttaagtacaggatgatgaacctctggcaaattttgaaaaattatagtgagttttgctcattttgtgttaaagtaattaaatttatcactagattaaatatggggttcagtataatgtttgctctatgtgcaagttttctccattcaaagaaaagaaatttaattttacagttcagagtgttcaatgaatcttctaagcaagttgaaggtgaagtcaacaagtacttgttttgttttatctctatttcacatatgtttgattagtttagctaagaagaatgattgaattttagatgtcttatgtatgtatgttaaaatgtaagcttagaatagctcatttttctttaaagtaaagaagattattactagatatattatgggttttggtataatgattgctgtatgtacaagttttccccctttaaaagcaaagaattttagtttacagttcttttgattgtcccttgtttgcaggaactcagattttcaaaagtcagttaaggatctgaaggagaaggcagaagagctaaaaggggttaaagaagagctaaaagttaggtaatttttaactgtggtcattttttagattttgttgatttttcaaatttttagtttagtttttattaggctgagacatacccttgtatgtcaaggctgggtggacacttcaatggaggacctgagaggctaaaatggcgaatgcagaacaaagcaaacgacggagcagctgtacaagcaggtggatggtgtgtggaccaacgctgaagcaacagcaaagaaggtcagttcaaattcatataat

SEQ ID NO: 193499 - DNA, 534 bp, Cannabis indica
aaataatggtgagtcaagtctagtttagtctgtctgttcactccaaaagaagaaaaaaaaacgcatggaagtacttcataggacggtgcttttggctccacaaaatggcataacaacaaagcatgaaatcaattcaacaccgacaaatcctttttctgcaatttcgtatacataaatttgacataaaataatgttttgaaagatgatatatatatatatatatatatcctttgttttattaatcttttagttagaatattattaaaggcaatttctttaatctcaaatcccaaagttataacgtgagaagaagatgccttactctaaacttcatttgtaccattatttacattttcaaactgtaaaatattacaagttggtaatgtgtgatgaactctctattactttggtactcatagattgattaacctcatcaagaattagtttatgacaaaacaagcaaaatttcagtactgctactccatggctacaacaatgccagactgatttattatgagattggttttattttat

SEQ ID NO: 193500 - DNA, 1261 bp, Cannabis indica
cccataggaaaatgtgcatccctagagctaggtgacgtcttataattggttgtcggtttttcaatatcttaaataaagtaaaataaatgggaccgatattaaattataccaatagtgatattacatctcacaaaggtgttagacaccacagttgctttttagcatttttcaaatataattggttaaaattattacataaatttgtgtgtatgcacgtatatcattactcttaaattaatatattaaaaggtgatttttatatatgaaatatatgaaattcgaagttcaatatgaattgaagttgatagaaaagagaacctataccagaaacatatataggaattagtagcattgtaagagattaatgattttcattgttttgtcgggttagctttttgtcgattcatcttgaaatcagtatatgtagttgaaaatgttatattttaatttttttttttccgatcgagattaatgataatacatgatataatagttaattaagtatataggctagggaataaattgtatagtaattaacaataaataaataggcgattataattagaagctcagaaaaagagtgatgagaggcgatgattaattattcgacaatgttcacttctttttttgttaacggttcaacatcccaaaaacgcttctgcaacctaattatgtatataattatcccacaaaaataaataattatgttttaattggttatatacaattagtacctaatttatcctctcccatccattgtctattatattttttttttttttctgaataaaggctaatctacataattagtccttaatagctagcacaaaattttgtgcttatatatataataagtgtgcaagtttattaattatagttattacgtgttcataaataatatataaatatatcgatttgaatgatatataatgcctagctaatttaagttgtacttattattaaagcaaatatataataccatatatatataatgcctagctaattaattaaattagattagatatataatatgccaaagaataaataatgctatactttatttaatataataatttttataaaatatcgttaattattacatcatatactttgtaatggtactagtgttagcagaaccaacctataattctttggaggggccaacagctaataatttttacatgtatgtatatatttatatataatttttatatgtataaatagatatttatatttgaaaatagggtttttttatttttac

SEQ ID NO: 193501 - DNA, 1503 bp, Cannabis indica
cgtcgatgaatatgtgcaaatggtaccataaattctacattgatcatggttaatttggcagccgtcaatatgtgccattgatttgctgctttgattcggctctaccggatcgtgtgtttgtggccgttcttccacccccattcgaatcccaaatatctcgtgtcctgtttctggtattctaagtacaattaactctatagccaagaaattttagtaccagtattagaccaatgatctacaactttgattggctctatagctaatttggatcttgtctatatttagttttgaatgtgtgtgatgtaatttttttcttgtatttttgttctcgaattatatatttatggctatagacattcgtttttttttttttggtatttttgagtgggtgtaaaaacataatatttttttttcctaattttcaataatgatctttttaaaattattgattgtttcatctttcaatgcccaaatagaggacccagaagaaccattttcccaaagaagaagattgtgtgttgctccacctagagagacccatcaataatgtacgattatatggagtgggctccatgtttgatattactctctattttactcttttgttggtaaagtatgattttgagaaaattgagctcattggaatacaatttgatttcaatttaataagtctacttatataaaattgggaacttagattgagaacagagtaatgagattaatttgtatagaatgattctacctaaatataattaattggcatcgaatggagtaattatgataatgtcagggaaatgataaaaagtttgcaattagattgatattcatacgaaaattttgaaaattaattccttagttttttgtagcagcttggattttcttggttacttctatatactctatgttatatatctctgcttgtaaggggttgaatgagtttatattattgctttcatggagctttcaatgtaaccacattttttttgcatgaattacttgtgaacacaatctgaaaaaagttgttttaaaggtgatttccttatttctaaagataacttgcctcatgtactttttcattttcctcttttaggtggagacaccttataggagtggaagagaagcaattttaaaggtgcatgtttctaagaaagagcttcctctcggtgagaatctaacctcagttactgggtttatgacgtatatttactctctctttgccacttactccttcgtgcaaaaataatttcaagaactctttctttctttctctttttcttgcttaactagtatacttctacaatatataattttgttttttgcaaatatacatttgtcattgtgagtgtatataactttaaggatgagttgatttattttttggacttctaattttgtttgactctctcccttttattgtattaaatttttgttagaattctctttgtctatattaaattttatatgagcttataattgaaatttagaattctctttgtctatatt

SEQ ID NO: 193502 - DNA, 1919 bp, Cannabis indica
tactgttgatgttggttgagttagttaggacagttagttactgtcagtgagtttgttattctgttttgtaactacttcaaccaacctactcacttgtatatagcctggtgtaatctctcttttcacagtaatgaattcactctttcacaaattcatcttttcctctgtttctctgtttctctctttcttcctctcttttggtttctttcacttccttcaatggctaagagaattaacatggtatcagagcttgacttcccaccattaatggcgaatgtcgttactggtcacgggaagggtgttaccggcggtgacagctccagtcaaaaccaacacgatccctctcaacaaactccgagccttcatcgtgcaagaagaagagaaactgacgatttagctccaatctacttcagtcatagcctctcgatcaagctaaacgaccacaactacttactgtggaagcaacaagtcttagccgccatcagaggcaatcgcctgcaacactacattcaagataaagatcctccagccaagtatctcagtgacgaagatcgaacaagacgtgtcatcaactctgcgtatctggattgggaagctcaagatcaattgctggtgtcttggctcctttcttcaatgactccgagcttgttaactcgcatggttggatgcgaatctgcaagtcagatctggtccactctggaaaaatatttcacactggtctcagccaagattcttgaatttcagaccaaactacagaatctcaagaaaggatctatgtcactcaatgactatcttctcaaagtaaaagagactgtcgatcttctagcttcagttggagatgttctctcaccacgagatcatgttcgtgccattttcaaaggacttccaagtgaatatgacacatttgtcatatccacaaacactcgtctggaacagtacactgttgcagaaatagaagctcttttacttgcttctgaatctcgaattgagaagacagatcgagaaattgatcttagtgcgaatattgctgtcatggatcttgatcacggattggaagctaacctggcaaacttcggcagaggaggatacaaacaacaatcgttcaatcgattctcaggctttggcaatcagcaatttggtcgaggtaataactatggacagttcaataatagtaatcacacttttggctatcctatgttcactcctcgtgctacttataaccctggtaggggcaatcgttttcctgtcactaacaacaaagttcagtgtcaactttgccttaaacttagacatactgtccaaagttgcttctatagatttgataaaaattttagagggcctgcttcatctgggaacaccaatgctgcctcaaatactgcaacaactcaagcaaatgttgtcaccaattcgactgactgggacatgaactggtatccagattcaggggcaaccaaccactgcacccctgaccctaccaatctggctcaaagctcagaatatcatggccaggagcaattgtttgttggagatggatcaggtttgtccattaaacacataggcaaaactttgttgtcttctaatttgtccacacagcctctagttctcaataacctattgcatgtaccttctataaccaaaaatctcctaagtgtgtctaagtttgctagagacaacaaagtcttttttgaatttcaccctgacacttgttgtgttaaggatcagggcaccaggcagatcctcttcaagggtgacacaggaatggcctctatacttttgaagatgttgacatcctcaataaaccagttagtacagaacctgtcaaccatgtctctgttcctagtaataaaccttctgtcaatactgtttccacttgtattcactgtaatagttgcaaatattcagactttgatgtatggcac

SEQ ID NO: 193503 - DNA, 3739 bp, Cannabis indica
tcattttccgtctcactgaaccgttaatgctcgaaacagccatcatcggactggatggggatgccctcacctggttccaatgggaaaaccagagacggcccattacttcttgggaaattctcaaacgaatggtgttgcaacggtttcgcacggctccgatcgggtcactgtctgaggagctgttatcagtgacacaaaccaccaccgtgcgcgactaccgacttcgatgggaggcagcggcgtcgcgacttccaggggtgccggagtatatcctggagggaagctttgtgaagggccttaaggagggaatcaaggggactctccacatgttacaacccgtgggtttgacccacatcatggatacagcacaacgaatagaggaggggaatcaactaattcatttgggtcaaccaattcgctccactaaacccaacttaagtcccattgttcctaatcgcccaacccagaatgtgttccacccaaaaccccgatacagccacactaacatcaccaccttcgcaaacaactatggtgacttcaaccggaaaacctcctactgtgcgtagaatgtcagagaccgagtatcaagagagaagagcgaagggctgtgtttcgttgtgacaagaatatcaaccgcggccatgaatgtgaccaaaagctcctacaagtgttgttgttacgctgatgaggatgaacctcaaccagttgtggagtcaccaccaccatctccggcggtcagaggaagctgaaactacggaggaaacactggcgacactctcattgaattctctagtaggtatacttcagctcataccatgaaacttgctggaaaaatagggcagcaacctgtagcagtgttaattgatagtggagctacacataatttcatttctcttgaggtggtagaagctacggggttaccaatcactcagacaaacgggtatggcattcttttgggtaccggggataaggtaaaagctgaaggagtttgtgctaatgtgtccttggagttgggagctcttcgggtagtcaccgatttcttgcccttggaattgggaggtgcggatgtgatactaggagtgaaatggttggagaccttgggtaatatgcaagttaattggcgttctatggtgatgaaatttgaaagagatggaacttgggtcactttacaaggagaccccagcctttgcaagtccccaattaccttaaaggcaatggttcatacggtggaacaggagggctatggattttgggttcacttggggtctattcatgggcacgaaaattaacaagagatcaaagtacccgcaccggtggctggtttgttagaaaagtacagagaggtgttcaatatgccccacggattgcccccaaagcgagacaaggagcatcggatcgtgttgaaggaaggggtagggccaatctcggtccgtccctatagatatgctcagattcaaaagggagagatcgaaaacatggtgcgagaaatgctggcgtcgggaatatgtgtgccgagtacaagccctttttcaagcccagttctactagtcaaaaagaaggacggtggttggcggttttgtgttgattatcgggcactgaatcgtgagacaatagcggacaagtttcccatacccgtgattgatgaactcttagatgaactccatggagccaaggtattctctaagatcgacttgaagtccggatatcaccaaatacgaatggctcctcaagacgttgagaagacggcgtttcgcacccacgaaggccactatgagttccttgtcatgccatttggcctcaccaatgctccggccacgttccaagccctcatgaataccctatttggggatcttctccgcaaaagtgtactggttttctttgacgacatcttagtgtacagctcctctttggagactcatgtgcaacatttggaggaagtcttacgacggttacagcagcaccagttgtacgccaaccaaaagaaatgcttcttcgggcaagatagtgttgagtacttgggccacatcatctcagcacaaggagtgtccgcagacccttcaaaaataacttctatggtacaatggccggtcccaaagactttaaaggagctccgagcctttttgggattgacggggtactaccgaaaatttgtaaggaactatggaactattgctcggccactaacggaccaactcaaaaaagatgccttcggatggaatcaagaagctcaacatgcgttccaacagctccaagaagctatgtgttcggtaccggttctagctcttccagatttctcaaagccgtttgttgtggagacagatgcctcgggggttgggttaggagcggtgttaatgcaaaatcagcaacccattgcgtactttagccaagcattgtctccaaggtcgcaagccaaatccgtctatgaacgtgaactgatggctattgtgttggctgtccaaaaatggcgtccttatctccttgggcgccgattcgtggtcagaacagatcaacgaagcctaaagtacctccttgagcaaagattggtggcggacgagcaccaacggtggatgactaaactcttgggttatgactttgagatccaatacaaacccggtctagagaacaaggcagccgacgccctctcaagagtcaacaacaacacgacattggcagccatttcggtccctaatatcatctccattccggaattgcaagcacaagtaagcaaggatcccttgctgtccaaggttattactgacttggaaaagggtcaagatgggggaggatacactttgattcaaggggtgttacgtttccgaggccgacttgtgttgccatctacttcaccttgcattccgttgttgttacaagagtaccacggcagtaagattggtggccattcaggggtatttaaaacatttcagcggctggcagcggatctttattggccgggaatgcgcaagacggttcaacaatacgtagctgaatgtgtggtttgccaacagaacaagtatctagcacaatcccccgcgggaatgcttcaacccttgcctatcccggagcaagtttgggaggacatatccatggacttcatcgaaggattgccaatgtctcacgggtttgactcaatttttgtggtggtggatcgtttgacaaagtatgttcattttattcctctacgacacccgtattcagcagcaacggtagctgaagtttttgtttctgaggtggtgaaacttcatggttttccacggtctattgtatcggaccgcgacaagatctttctaagtctcttttggaaagagctattccgtttacaaggcactagcttgaagcacagtacagcctaccatccccaatcagatggccaaacggaagttgtcaacaggtgcttagagacttacttgcgttgctttgttggtgagaacccgaagaaatgggttaaatggctggtttgggccgaatattggtataacacctcatatcatgtgtcggctggtatgacacccttcaaggctctctacaatcgtgatccaccgcccttgatacgatttgaactagctagcacaaaagtctccggggtagagcaacagttgcaagctcgtgatgccaccttggtgttgctcaaagagaaccttcatcgcgctcagcagaaaatgaagacccaagctgacaagaaacgcagggcacttgagttccaggtcggagattcggtttatgtcaagctaagaccttaccg

SEQ ID NO: 193504 - DNA, 3185 bp, Cannabis indica
ggaaaacaaagaaacaaccaacgatttccaaaagctcagctgaagtagagtatcgcgccttggttgccacaaccagtgagataacatggctacaatacttacttcgtgattttcaaattgctcagccgacccctgccttcatctattgtgacaaccaatcggcaatacacattgccaacaaccccaccttccatgaatgcaccaagcacatcgaattagactaccactttgtccgtgaaaaaatcaaaaactcatccattcgtctcatccatgtcaacaacactcttcaacttgccgatgccttcaccaaaccgttaccatcaactacactacaaacacatattagcaagatgtctatacatgatatctatagtccatcttcagggggggggtattaaggcctactgtttgtacttactgtttgtaccgttaatgtagttcaaggtgttaggcattacatttatttttggttagtgttgtcacatattgagtcctatattttaggacaaagtcggttagtctgtaactaattcttttggtccgttgcccatatctatatatattgggcactgttctatacttgattattcattcaattctttttacaataaaatagttcattcaatttctcttccgcaatactcgatctctggcccgaacccaaatccaaccccagacactagaccagacttaaataaaatcaaaaaataaaataaaaataatctttacagaacacacttttgttttctgtttttaaaaatgaaaaacaaaagtagttaccaaacgcatttttgttttttcaaaaacaaaatttttacttttattttatgattattaaaaaaattagaaaacaaaagtgttaccaaacgatacttaaatttttcatcatgttgtactttatttaatgctcgagttagaagaaagatttgttatggccgaactatctttgagtagaatttatggatgcagcacttggtctccattatattttgaagtttttgtttatttagtattaaatgttttcaccaagcattatactttttttgattcatcatgttttttatattttaagtatgctgtccaagtttttttttaaagtatctctagttcatgtcatctcataaattaattgtgtatacatttatgatcgattagaaacttgtttagataggtttaggcccctttttttacactttatttatttattttaaaatttagtgatatgttccttatattaaaaaaataaaataatagccattataaaagaataccaatagtaaaaactagtttagaattgtacataaaactaactaaatagttgatcaatggtacattgcatttttactccaaataccgaaaatgaatgattaaagctaaagaatggtaattatatataccaattttagaacacaaactagtaattagaaaaatctatacaataagatgcatagaataagtacaaatttgaaacaaattaaactcattttctttaaacttcatcatttttgtcaagttgtttggttaaatctaaacccccaacaccttgtacctgctcaaaatatcaaacaacaaactcattaataaatatttatacatttatatatatatatataatattctcattttgacatgaagaaaactatataacaaaattgctatgtagtagtgttaattaaatttgttaccttaataaaattgtatgatgtattttcctttgagtatttcagggaaagaagcctgaacaatattatgataataacagattaagacaaatgatgataaaccttttaagtaattaaggaataaaaatgtgagtttatataaatatatatgtatatctttatattaaataattttttctagtataatgttagaaaatacttacaattttccatcctatcaattcaccacaaccaacacaatacatttgctcaaactcaaatacaccagttgaatccacctctattattccatccgtaaatatatttacactaacaaaaattaatcaaagcataaaaattaataagttaattaattaattaattcaatactctttatcaacaaaacatatttaaatagatatatatatttattcaataattaatgaaactaaccataataatatcatataatttatgtaaaatgaaaaatgaaacgaatttattcaaaaaaaaaaaaaaaggaaaagaaagaaaagaatttacactttgctaaaagctagtcgaccctgtccatttccggggaaagaaatatcctacaaaaaaacccaaaaattaaattagggaggatgaaattatatgaaagaaaataagaaacgattaaggaaattaattaattaaacaagaaaataaaaatcaaacaaaagaaatgtagagttaaaaatattagtagaagaaatgattaatgatccacaatgtatatatattatatgatgatcaagattaaagatggtgatatatataagtcatctaatcttgactcttgaataaaaataaaaaataaaatgatcaaaaagaaaagaagaagattttggttattataactaagtactcttcttgattattcaatataaaaaacaaaaacaaaaacaataattattaaacatgagatcttaatttggcagtatatttagtggtttttttttatctaaaagaatgaacacatgagtaacaataaatataaatgcataataatatatatgtatatgtatataccggtggaggcacaatatgatgagagtgagttatatgattgttacatttgctgcacacgtatattactccttcaccttcagcttcaatagtgatcaagaaaagccttcccatgtctctattgcttaatttctcccaaaacgacaacaaaatcttggtcgtttcctttgcttcgtcatcaagaacgacattaattagccaaattgtattgttagttataagaagaagaaaaaaaaaaagtaaagaaaaacatgtcaaggttgaaaactagaaagaaaaggttatggggttgggttgattttgatctttacctatcaaaatggttaattctattctaaagagagaacaaaactaacatgtagcgattgggttggtgtatatattatactaagccaaaggattgtgtatatagttaattacataatgtcaatagtcaccttaaattaaaagggaaatttaatattatatgcttaa

SEQ ID NO: 193505 - DNA, 1495 bp, Cannabis indica
ccaacacttggaacttttgatatgttttgtgctagtcttttagatccaattgcaacataagaataagaaaaaataaatacaacatcagtgcattctaattaaattgttttattcattcttgaagagatctccccatctccttaggatttgtgcacactccatttttttttaataaacttatcagttccttttacttttccttttcgaaaaacaaaacaaatatatgcaaatgtagatgtaataggtccataatatacacgcgcatcttatatcgtggtggtactgggttctaagttccactataaccaagattttcttctttcttttccacagtcattagtactttttcacagggacaaatgtgcttgcacataatttttgtaatcaaattcttggccatttctgtaatgaatactccttatttcatctactatactccgcacactcaaattgacatcataatatacttgacatcacctggccaccaacttagggtcccctaaagcttatataatagttactagttttttctttattaatggactaattttcactttgtgatcaagttgacacgacctattgaaaggttgcttcctaactcagcaagccaaaacagagacacctctgatttccatttaattagatttagcattaaccataactacaaagtctcaaatctcaattatataataagctgttaactaaactgattaattatctaacctcacttgtttgcgtaaagtttgtactccaacaaatcctaactacacaggattaaactgaatgatttcacaattaaactataagcaacttaattgtcctttttaacataataagatccaatttgagaaataataatgacaaaggactaactttttcaacgaagaataaagtgattactgagctttcttctctctatatatatatttatataactttatatggtttcatgattataacattgcttcttattctcattcttctgtgtcttttttatattctatcaatctaaggtgtaagagtcttactcatttaatttcctcgtggccgtgggacaacttacaccagctttgagtgttggattggctagagtaaaatgtaagtcttggcatgggccatgccccatcttgttttccagtttggtacattcagtgggccaagagttaaggttttgggctgctagtgtcacaactttcttttcttttctattttcctttttaatttgaaaagaaaaaaaatagaaatgaacagattatatatgtgacaacatatctcatctacactcaatcaccaaatgctaattaaatgtttggtcattttggtgtcttcttatgattgattactctaaagtgggacacttaaattgtatcagaacaactacacaatttaaagtcatatgtgatacctttaaaacgtcaacataatttaatgtatatagcattgctagtaaaaataaaaaagtgcatgtaattttcatgtttatctaacattactc

SEQ ID NO: 193506 - DNA, 2236 bp, Cannabis indica
tgcaccaacccaccaagcacatccacacaaagtccaagctttagggcgatctattggacaagtctgtgaggtaggcggtgaaggacgttacttccaccgccaccaccgccacctccaccgccaccaggtgatgatggaggattgtatggcgggttaccgggagatgaaggtggtggcattatcactggaggatttatgattggtggtgatattataactggtggcgggatcaccggtgagggttttgtatgaggtggtgatttccggatgaccgccacctcctcctccactacctcctttccctccttttcctccttcacctcctttccctccctttcctccttcacctcctttacctccgcctcctcctccacctccgccacctccaccttttccaccgccgccccctcctccaccgcctccaccatggtgcggtgggtttttcggttggcctgggcggtggtaaggtggttgaggatgatgtggatcttgacaaggaacacaagcttgaattggtggtaatgatatcaccataaagatcaagaaaatgaaaaagatggcagggagctgcttaatggaacccatgattttttttcttttttctttttagggtttatatttgtagcactagttaatcgattgagaagatcgatctagtgattggggtagggttttggatggggttttataagttgagtgtaggggttgaatggtttatatatagctagctataaggttataaaaatagcaacccgtgattagtactctgcctagtaattaatagcagtatgtaagatatgtattgttccattgcgaaattaaatagagattttggattgttgttggtcatttgcatacttcaatatgcaaatccgtgactactgcttctgtaagaaaatctcttcgatgatatataaataaatatatacattgtaaatctccatataaatatatatatatatatatatatatatttacatatttccgtgcgaaacaaaccctttcaatatgtgatccgtgagtgattcagtttcacatatttccatgccaaaaatgtgacagtcatactttataatgaacttgatacatacagacaaaattcatcacttatagtacacagtatgtaaatttatataaaagggttgttgaatggcgtggtcatcagcacagtacaataattatttttatcatgatataggtaattaaattgtagaaatgcattgtagctaaactaaacaatatcatgagatcgatgatttgaagaacactacgtactgagaacgtgcgccattatttctaagctcattattttcttatcatactctctctctctctctctcttcactattgaggagaaataagggctccatttcacgaagcaaacatgtgaactcctgcttcttcttttattgtacgtggccactagctggattgtgatactgaagtacttgattttttttttatttgatgcatgtccagtttttattttcaacgttttattactattcgcttagtagctattaaaataacctagttatcattacattagaatccaatataatattggggactaatttcttcatttcctttcaaaattagattacacataacagtataaccaactagcctatatataaagatatatattaatgatgatagtgaacaaagtgtctaatatataagtactagagtatagttgtcacttctttgcgaaaaagaaaaaaaactgtccagtgccaactcatatattctattaacatatatatatggacaggaagtaatggagtgttactttcaaaataacatcttattattggcagagacccccataaaccttttttttccttaattatgaatattgcattttcttctctctggattctagctagcacgtataattttctagcgatatagtgtgtggacttcatgtaggccatgaccatggggcaccatgtatatgtgaccctgttgcttcaacattatctgcaaaaactttttagtcattgtcgtacctaggtagtgtgatagatactactactttatttgatccttatacatatttatataaatataggtagtacccagcctttttcagtggcctccatcttttttctaatttataatactgtaatttaggacaattacattagatgatataattatatctatataaccagttgaggctagctcaagtggcctagtagctgtgtgtgttttggaagttttgggttcgagt

SEQ ID NO: 193507 - DNA, 1690 bp, Cannabis indica
cttagaggttttttttttttttttgagaaaaatattttagagtttagtatattgactttttttctaaaaccatttaatatatatttttataaattggattattcagtaatttttttttcttttaattattcgttgaccagaattttgtttaaattaaaaaaagaaaaatatattttttcaatgatatttaaaaatgaatttttaatactttaactttataaatattaaaattaaataatataaatgtcttttttatgattttattttttaaaaataaattttaaatattttaaatttaataaataattattttatttatttaattatacgcatgatgccaaaactgctaccctaagctccaaaatcgccacatagagccacttgtgattaaagaggcaaaactctataatgagaatagttcaaggggatttttacccaaaaagaaaaattatggccaaaaatttgaatgtggtaatagttaagagggaaaaaatcctacttattctaaaataaatgataggtttttattttttttacttttttgaatgagaaatgatagatttagttctatttagaaaaaacaaaatagataatactaaataaagagagtcttaaattaaaatcttaaataaataagtaaaaaaaaaaaaaaaatttggggacctagataattttttccttttactaattaatgttatatttttttcaataattttaagcatcataaattattatcctctccatccatccatactttcttcttcttccattataaattctccaaattgatttttatataatttcattttcctcttattacaaaacataatcatgattataattaatgacaatcattcataatcaaagaagaatccatattatcccaaaggggcctatagtatttctattttttttttaaaaaaaaataatataaataaatggtatattattaaattttcctaaattctctttcaatatttatatttagatccctcaaataattttacacatttttggaccattttatgtataagctagcttagctaaaaatggatagaaagggggaccaaactataacatttattgatcacatttttccaaagtcttaaaatataaataataattcaattaaattattcaaagtgaagtacttcaactttttttttttaggttttgcttctcttatatagctaagtgctcacctcaccacacctataaaaaaaaaataagaaaaaaaaaaaccaatatgagttcaaagccacaaaatatgacattctctacaataacattatatgatgaaccccccaataaataattttgtacaatttatgctgaacaaaattgataaaattcaataaatgagtgaaaatcatgacatttggaataacaataacttgacacttgtattttataatttcattctgtctgtccctatgaattttttttggtcctttatattaattcaacctattaaacaggtaagaaatccttctcacataaacaacttactacaaaagaacaacataatatatatgtatgtaataataataataatattatataaggacaaatgctttgaatctttgatgatgaaaaccctaaaagtctcttatgctgaaccaataaattatatacatccaaacataaaatatataacataattagaatgaatgagatatacaaaaaaaat

SEQ ID NO: 193508 - DNA, 1480 bp, Cannabis indica
ttgcaccacctgaaccacatcagtacgaactatattccaacatttctgataaaatccgggtgtcattccatcgggcccaggacttttcgaaggatgcatctgaaagagagctttgcacacttcctcttctgtaataggaaggagtaattcttgattcaccaagtcagtaatggagcattcaacttcatctaccacttcagaacaggatgcacccaatgttgaaaacaaagaagagtaatagccagcaatcatgtctgatagtccattctcccaatcaatccattgaccatttccatctctaagttttgaaataacattattgccccttctagtagtagcagccatatgaaaatacctgttgtttttgtcaccttccatcagccaaaattgtttggctctttgtttccaaaatgtttcccgttgatccacaatttgcgagagtttatgttttaactctccaaatcgttgcactgaaattgagtctctcttgccccttaactcagctagctttacacttcttaattctctccttaaacgaaccagtaatctctttaccccattcgactaatctttctacacaagcttggattttcttatcaatagatacatttggcaaagaatcccagcaatctttaatcagttcaacacatagaggctccttgagccaagcattctcaaaccgaaacttacggaaaaagagattagagatttcaatttcaggttctagaaaaattggagaatgatcagaaggtgaagtgtcaaggttacgtagcttagcttgaggaaaaagttgaaaccagttcatggagatgagcgacctctcgaagcgaacttcgacccagttagatgtacctcgacccctttctcaagtgaacggatagcccctaagctccatgtccgtcaactcgcagtcacactaagacctgttggaagccttgaattaaagcacggggataaggttgtcctccacatttatcttgctgagagacaacgttgttgagatcacctatgatgcaccacgagaagcttgaggaacgttttcaatgttcggatgagatcccatgttgtatgtcgatgattccttctgggttccccgtagatccaagtcaaacgccactctggtttcccttccattgtaacacaaagtcaatatgttgttgagaaaagcccaccactttaccctcctcgctaactttccataaaagggccagacccccacttctcccttgggcctccaccataaaaactccctcaaagcacacttagtttcacataagaataccattttggatttcttttgagtaaataacctctttaaggaattgaattagtccatgggttgccaagcccacaacaattccagcttaaagcattcataatgattggcgggcctgagaaccagaacccgccccgatctcgttttttgaaaatacctcattatttggaatcatgagtatatcatctccatcttcaagccttt

SEQ ID NO: 193509 - DNA, 1628 bp, Cannabis indica
gatcaatgaaaggaatgactaaatgccaaaggcactaaagtgaaggttcaacggaatcaagaaatggttctgacctttatctccaaacccacaatgattgattctggaaaaaaaagcttcgactaatacataaaaaaaaggtaattaaaaaaatgcttgactcatgctgattccacaagtgtatttcactcaattgccttactggctattactgacatagggccatctattagtgaaatagtactggaaatcgctagaaataaagtacgaactgaaaagtcacatcatctgaagcagcagcctcgagttgatacctaatttgatacgggattggcgactgtaattgaacaaactacttttactgtttacgagaggaatccttaatccccccagaaactagggaattactaaaaagagtcattataatactggagttcaagctcgtacttcgaagaaagcctattggttgtttcgaagcttagtagctaaagcgtacttgtttgtgcgtgttgcttacttgcgtgtgaaagggggtacgcagatttgggctgctaagtggaaccagaccattcaacttgccatttgcactctcctagggtgcgatatcgtagggatcttgctttgaatcagcaaatccttgtttttagttatttggttaagcgtgagcagcgtgggcatgaagctagcaacagcgagcgatttgcggttgtgataaataggtatgaagtatatgattatattagttgatgtgtgtgtaacttgatcttctgctatagaaacagtgaacccgtcctgatacaagtcagccaaagtaatatgcttaacggatgcttttttcactagttgttcggagatcaggtaagttaggtctactactgcttgactggagttagcgaagccgtaaaaggtggcagtaggggaactgctggaacaaatcctgctttttttaattcgggactaaaacgaggcgactaatcttttactatggtttcagagtcacagttgctaacgggcaaatgcgtctgtactagtgcttgtgcttgctcattagaggatgccccggtagtcagtagggggctaattacttgagttaaaagtagtagacgattagagtaatcttatataggctatttgcgcttaacgagttagaagatgttgccaatgaccgggtatcaagaagatttggatgcgaacccctcccatgagaaagagccccgatacgctgaaacctcttatctggtccttaggctaactacgactagtcaggaattgcgtatagagaagaaacgtcgtaagtaacaatagcgcaaaagcacgtggcggagatctgcaaaggtaaccggatgcctggggcttagcacaatgagcgaataagtctaacatttatcttgaataggatcctgtgaaccttccggagaaaattagctgcagcattaaactaaaagaaaattaggatcctgaccctaatcagtcactatatgttgtgactattattagtagataaatgatatatcaaaggcctgacgatcagagcccagtctgtacggcaaatttgaagactaggaacctgctgcctttgaataggactattgttgctgactattattgcttggtagtcataattgttg

SEQ ID NO: 193510 - DNA, 1457 bp, Cannabis indica
gagcctcttaattggcagcaggcaataaaaaaatccaagatggagagcagctatggatgatgaaaacacagccttgattaaaaaaaaacctgggttttggtcccttatatcgatggtatgcaactggtggataataaatgggtatataaggtgaaattaaatatggatggcagtgttgatcggcttaaagctcgtttagttgcaaaggggttccaacaaacagctggtatagactactttgacacctttagccctgttgtaaaagcatcaacgatccgaatcatgttcactcttgccattacttatggatgggatattcaacaagtcgatgtcaacaacacattcctcaatggggacctcaaggaaactgtttacatgcgacaacctaaaggctttgaagattcgaattatcccaaccatgtttgcaaactcaacaaggctctctatggtctcaaacaagctcctagagcctggtatgacaaactcaaacaagctttactatcatggggttttcagaattcagtttcagacagttctctgttttttaccaaacaaccaggccattctttactaattttggtttatgtcgacgatattttaattactggagaaaactcagtcgacattcaccaagttatatccaaactcaacagcaaatttgctctaaaagcactcggccaggtgacatactttcttggttttcaagcacatcggactgagactgctatacacctatgtcagtctaagtatgccttagatattcttcacaaaacagatatgctagatgcaaaatcttgcactacaccaatctgtccaggttacaagctttataacaccaccagtgaagagttctccgatcctacactttaccgaagtacaataggggctctacaataccttactttaactcggccagacctctcctttgctgttaataagcttagccagttcatgcaatctcctacagtggctcactggtgtgcatgcaagcgtgtactacggtatattaaaggcactgttaataaaggccttgtctttaagcctgcctctcgactagttttagaagggttttctgatgccgactgggcttgcgatattgttgacaggaaatctgttactggattctgtgtcaagcttggtgataatttgatctcgtggggttctcgcaaacaaaaggctgtgtccagatcaagcacagaaagtgaataccgatccctgtcaaccacagccactgaagtcgtttggattgcttcagtcttggatgaaattggtgtcattcttccttccaaaccaatcatatggtgtgataaccaaggagctcaaatgcttgcttccaatcctgtatttcactctcgtactaagcatatcgaagtggatgtccactatgttcgtgatttggtcttacaaaacaaagttgatgtttcctacatccctacagaagaacaaccagcagacat

SEQ ID NO: 193511 - DNA, 1628 bp, Cannabis indica
aattttttttaaaatatttaaatataattatttcaaattataagattatatgtgtaataattttaaattataagatcatgaaatgggtaataattttaaattataaaaaattttactacaaatattttaataaatttagtgaaaaaaattgctaaaagaactttatttagtaagattgtaaaaataattagtaactataataaattttattttataattaaattaatcttaattagaattttataaaaaaacaaaaggttattatatatttttatttaatttttaaattaattaaaaccattcaataatgatcaactaaaatttacgtaaccaccatatcattaaaattatttatatacatattataaactatcaaaaaaaaaaaaattaaattataccaatacttaattttgtaaaagaaataaagtgagtattaactaattttatgatttatccgtactttagataccattaaaatagatttctatgttaaataatatcaaactcagaattcaaccagaaataaatttgttttcagaattcaacttaagaaatttgtttatattttgtttttagtatagtacaatatattatcataataactaaaaagagagaaagttgctattcacagatataatttttttcaacaaaatttttctttcaaaaacacttgaattcctactgtcatacactgatttcacaaagaaaaaaaaaataaattaattaaaagatgaaaaggaaaaaaaaaaaacaaaggagcttagacagcacttatgaaaagctctaaacaatacaatacatacatacatacatacatgtatataaataaatacttatagatgtctattttcgtctatggatgactctgaagaagaatcatctagtgttgaatttgaaatggtctccaattggctggaggcctcactatctgaaatcccagatggcctttcttcaacaggttgtttcaaaaaccagtacataatgcttgcagttaatgtaaggatcattttttggttcacctaacaaacaacaaatgcataagatatataacacttgaaatgattaatgaaagtgtcttgttgttcttttatgtgatgtttttttgtttataggaaatttgaaaagaaagtacctcagttatgtcttcgggcagcaaaaatattgaacatccgagctttcgggcaatgctgattatgtatgaggcattcatctttttctcttcatctgaattgtgccaagtttaagagatgagtgtaaattaatcaaagaaatcactttcaagacatacatcaatggtttgttagcacaagagaaataagacataccggttacccctttggtaacaagactccaattcacaactctaggctgcactgcacttagtagttctaggaaaaaaattccatctgacaaacttttatcctgtaaaatccaaaacagaattatgatttttgcggttatataagaagaaatggtggctggcggcaatggaaagctcgcctttttgatacttgaaactgatgaaattgtagtaccttaagctatccatgcggctttggcttccgagttgctgctttggtgtttgccctattctagatactcgacgtctgtaactttctttccatgag

SEQ ID NO: 193512 - DNA, 3846 bp, Cannabis indica
taagataatatatttataatttttacatacttttaggatatacttttaagaaattattattataatactaaaaagaattaataaatataattgtctagttaaaaatattatgagtatacttaacaagagtattttaacaacaatgaataggaaaaggaaattgaagtttggagctcaaaataattagtatgtggagttaagtgttaagatgggttagtattattaccccaaaatcaaatatctaataaatagatcgataagagtaaataaataaacgctgacactaattaactaacctgctttccttgccaataggtgaaccccttgccacgtcctcgcccatcttcttatctccacgtcaccattaaacagtctccgagaagaatacttgatccaacgctctacaattttccacagctccttagatcaagcggctcagaatacgtgttctagagccttcgaatcacgtagtagtagaaagggtagaggagagaggagagagagtggtcagtggtcaccctgactagcctcctcttaaccagggttaaactctctcaacgcgttgggttaaaggggggttcagagagagagagagaagaaacgaacagaacaaatttcagaaggaaagaagagataaagaagagagaagagagaagagaaagagagggttttgtggtttggactagtaaatatataaaatacataccatatatatatatgctagtcgactcgggggattcttcaaccccttgaacctccttccccagaatctgagactctgacgttaacctcatcgtctgtttcttcttctttattctttgtacgaagtggtttcgtcattgggagcttcgtaagcttggtgcttctttcggatcttgcagtctggtgagtcaccgcctctcagtctatatggttcagtgatttcgggagctcacttctcagtaatggctgaggatttgttcttcagtattgggtattcgtaaccctatgaatgaatagagttcatttcatcatttcttgagttttgtccatttttggccctgtgatatttgtctcaaatacagctgaacttgatttggctgagcagccaaacaagacatacagctgcttattttcgtagattgccgccattagtaaccaaatgaatgatcttaactcttcggaaatctatatgaacgaatctacttaaacttagagatttgctagattcacttgaagtggaggatatgttgtaaatttgattattaagttttatggcttaaaaacttaattctttgggtttttttttaggttaataccatgcttatcaatgaaaagtgattttgtttgtacatacaaatataaagttattttcttttgtttcttgtctgcttattgcagctgatcttgtcctgctgatatctcgcaatggcccattcaatgtagctttaagctgtattcactttcttctgcattattcttgtctcgtgataccgttgattagttggaatctttggcttcaaattggatttattctgtttaatgattttttgggaattggtttgatttctaattcgatcacctgtggcatcggtgtttggtgtctcctcgggagggacaaacttctcgtcctccgccacctctgttcgtggccgtcaaacccttcctcgtcttcttttcgcttgatgtctcgtgagttggacagccctgttcagactcagatggcagtagcaatttttaagagcccgcttaggacggagtatcatcatggaagccagagaattgaagggaggcagcctgctgggaggagacgtgttttcgtccaaactgaatctgggtgtgtcttggggatggagttggatcgtatggataatgctcataccgttaagaggagactgcagattgctctgagtgtccctaccgaagagagctcgctgacgtttggggatatggttttaaataacgatctcagtggcattcgaaatgattcccctcttcttcttactcggaaccttttgcatagaagctcgtccactccatgtctctcacctaccggcaaggatctacagcatagagataagagtggtcccatcgagatattggggaaatcagaagcgagaactaaagaattagtcaaggatattgtgaaggctgtcaagatgggggtcgatccacttcctgtccatagtggacttggaggtgcctattactttagaaactgcaaaggtgagagtgttgctattgtgaaaccaactgatgaagaaccttttgcaccaaataacccaaagggatttgttggcaaagctcttgggcaacctggtttgaaactctctgttcgggttggagagacggggtttagagaggttgccgcttaccttcttgataaggaccacttcgcaaacgtgcctcccactgcattggtgaagatcactcactcaatctttaatgtaaatgatggggtgaatgggaacaagtctaacaagaagaagctggtgagcaagattgcatctttccaacagtttatacagcatgattttgatgccagtgatcatgggacttcaagttttccagttggtgctgtgcatcgtatagggatcttagacattagaattctaaacactgacaggcatgctgggaatcttttagttagaaagcttgatggtgttgggcaatttggtcaagtggatctcattcctattgatcacggtctttgccttccggaaaccttggaggatccatattttgagtggattcattggcctcaagcctcaattccattcacagatgatgagctcgagtacattgaaaagcttgaaccgcagaaggattgtgacatgctgaggagggagctccccatgattcgtgaagcatgtttgagggtgttggtcctttgcaccattttcctcaaggaagctgccgcttatggcctctgtcttgctgagattggtgagatgatgagtcgtgagtttagaagtggtgaggaggaacccagcgagcttgaggtcatctgtatggaggcaaggaggatagtagcagaaaggattataatttcagaagaggttttatctccaaaaactgatatgaatgatgaggatttccagtttcccatagactacggggaatgggagttagatgcatcgacaaaatttattccagatgaatctatgatcaggtcaccttttcattttggaaatggaagtgggcatggacgatctccactctccaaactggaagaaagcatagaggaggaggacgaagagaaaagtgatgacgaacatcaaaaattgtttgcaaatttcccaaatattgagaagatcccaaaaatttctaacctttcaatgtcgcttaagagcactagtctaagtgagaaaaaccaaaaatacccaaaatatgtgggatcaaaacctgaaaatggttacattgtgaatacatcatctggccacagaagtgcaaatgagcagcttccagcaagcatgagctttgtgaagttagcagacatgagtaacgaggagtggacacttttccttagagaagtttcaagtatttgttgtacccagcatttgcgaaacgcaagtttgtgaccctaggccagaggcagagacagaggcttggtacttcgtgccagttttgagtttgtggcactagtagtgtatggtatgagaaactactaaaagatgctgaataagatttgtagggtttctgggagtcgagtattactattggtataagtgtaggtttggtttatatgagtcttctccctggaagtagtgggggttcgacagcaggaggatgtgtaaatattcttggcatcagctgagcgatgagcttagtagatttgatgtatttcttcgtttacgtttgtttttt

SEQ ID NO: 193513 - DNA, 1057 bp, Cannabis indica
taataataataataattaatcataacataacctgtaataaactgcttaaccacctaaatttttctattaattataaaaaagaaaacacatggtgacccattaaaggactcatcatcctagctagtttacttattgggaatgagagggtgaacgagtaaggagagaatatgagtcttatagtctgtatgttgagcactgaaggcatctccagattggtagaggctatgtgccactcgagcagtgttaagggcaatatctataaatgataatgatagtgaactactgccgcaagtactaaagcatgtcttgttgatcttcttccatgtttttctaatcatttctcggatatgctttcgggcctcctcttcactactcttcgtttcttgcatataacatacgatagaagatgcagcatctcctctttcctgttcagcctgcatagtatattataatatatcatttcatatatatgcatatataaattggtgaaaataattatagatatttaccgctgaagttcctaaatcgttgcatagtcgaatgatgagagaaatgttgtagacaagatctttgcttatgtcaagagaagaggccgtattagtctgatttggcatagcaagatatgaatgaagaagaagaagaggccccgaagatgaaatccatgcattgctcaaatacacctcaagggatgggatgtacccctttgtggtaccattctgcctccattaatagtgatttacaaaagtctgtccactatatatatatagacatatattattcatagtaaaccaaaaaagtaaagatacttggttagatcattaattagatcgatcttcacgtcatgatgatcgaaatcaaaaggtctatgagcctagctacatacgtaccgctccctttagattaggtaaaactaatttgcaaccattcttagtctcaatttcactagcaatttcacatgtagtatggtagagtgcttggaaacaaatcttcatgcaatctggaagttcctcagtttcccggacatcccacctgtcattttttatatatattaattaca

SEQ ID NO: 193514 - DNA, 2665 bp, Cannabis indica
tttttgaagccatagtgaagaatcctagtaggtaagccaatctaccttttactttggttatcacatttcctatgagatttgagcttaattcatattttactcgaattgtagcccgttgtatggttcaagagttgttctccgacgtcttattagtgctcaagctcagcgtagaggtaaaagagcaatagaggtcagtagaatttgtactaaactttttgttgtggttgtggcacctttattgtcgagatgttctaataactattgttgtttttgtatctaggttctgaagaggttagttcgtcgtagacttttataccattcatattcaatgcaagtccatggttacatctcttcaatcacgagtagtggtcgtggctcattcaccttagtccacggggtaggtcatttactgttaaacatgtattcaaagattcattagaaggaaacctgtgaatctattgtttcctgttatattgcagtatcagggaagtttttctttaagacattggcttcaacaatcagattggcttccaactttagaagctactcttgcattggatgatgaatatgttaggagggtaggagatgacaaaattggaggatctgcagtttctcggcagttgcgaattattaggatattgatgagagatcttttaattggagtatgtattctttcagttggaaagcctggtatatgctctcttttcatggacgaattgttgaaattatggatgtgtgtctttctttaatatttgttctgtttcttttcccttcaggtgaattacttgcacagccatggacttgcccatacagaattgaagctggaaaatgtacacatatgcccagtggatagacatattaaagtaagcaccagatttttactgtcaaattgaagagtgcattttcgtccatgcttgccatcttttcaatcaatgaattaccaacacccagcaaaatttcagctgtgtttttttttacaactattgtggagcctttttcaacacttgcattttaaaccttttttatacaaaaggaacagaattgtctgctaccttagggtggggaacaagagatatacggggtaccacaaaataaagaaataaaattagaaagattggtggatatgtgagtatgctaattttaaagtttaaggggaagcttcgaatgaaacaacaatttacaaaaagcatgccactcaagagccatgatagtttgaattctgatgaattgtagagcccttccatggagagtgtcagctttcctaaatgtttcaaattcaacaagcacaaagtgttataataatttatctaatgtgaaaccattggtgctcatgaaatctacaatttatatttagttcggccacgcgacagctcagctaatttaacattgtatgcactttctacaaaggttatttttttgagtaattctacaaaggttattagtttcatagtaagttgcaccagaggaactatggattctgatactttaatactatgaaatgacattggcaattctcttttctccccatccccttctcttcttgcctcctttatcacttcaggtttttactttcaggtagggatactaggtaatgccgctgacttttatgaggaaggtccaaacagtggtgctccagacaacaatataaagaggcgacaaatgatgattgctttcgacatgaggtactcattaaagtgcacaatatgtttcaattggacatttagagaacatagttttaacattttttttctctttgtggtgcacagatgtgttggattcatgatggcaaaaatggtgctgcgggaactcatggaccctttagtattcacaaagttcaagtctttcctcacaaaggtatatgactcagctagttttcttgtgcaagctgtttattttctcacttatcaaaaagctaattgaatctaagggacataattttgttccctatgtaagacgttcattgtttgaagtgatcatactcctaagttctgttgataaacgcagggaaatgatccatcatgcctacgtgaattcttattgcaattgcttaacaggaattcctcttttggaaatgctggcctacaagtaagcatgtgtgctaataaacacttactctgctttaaatgctcgtcctcagatttatatgtataagtttctgtttctgtctggcagatgcttgataggaactggggtgctggttggaaccttctgtctttattgcttgcaactgagccttctaatagaataaggtgtgctgcttatatatagatgcagaaaactgcacttgaatgtaggagtagaaaaagtttattactaatgtacctgatccccgatcctatcaaaactccacagttaagtgtgtactaggatggctgacctcctaggtagccatcatgttgcacccttaagaaagaaaaacaaattattacttaaaagttgaacatttaatatcctaacataagatagttaaaaattcaagttaaaaattcttccaaacaatttattcacttgcacacaataatgttataatgcccaaatttcatgtgtatctatattttttatgaatgtaacatcagattatttaagtttacatattaacatttagtgtattggaaaaggatattaggtttaattttatagcaataattattagtttagttttttt

SEQ ID NO: 193515 - DNA, 2777 bp, Cannabis indica
cttatattttatttttttttcataatatttaaaatacttttgactttatatattatttttcttagattgtagaggacttgaaagaaaaaaaatgagtacaaaataaaaaaaaaatatacacaataaaaataataaaatatactcatttgataccttatattttaaatacatacatacaaatttagtattcaatattttcaataatacttatatattaaaatagtacatatttagtgttctaaacttaaatttgattaatacaattaaactattttcaattatataaattttaaattaaaattttattatataattacatataattaaaaactgtttaataaaattttattgattaaatttaatactaaacttttttttagaagattcagggtactaaatgaatatatttgtactttttttttaatgtaaattctctcaaaattttggtattttttttttctttttcaagtatttttagctataaaaattttcagttacttttattaaatatgacaaacattactcggttgttgtaataattagactattttagtgtatgcagctttgaatgtacatgatatgtactttagtatctcttatcgctcaatgaataattaactcaacattaggacaaaagattatacattttttaacagcagaagaataccatccaatactaatagtcaataataataataataataaaaagtggaaatgtagatgaagatggatgatgaaagcagcactaggggccattgctttgcttttcttctacttcccttcttataccttgtttctttcatttcatttcattctcgttatgaactgttttccttttggcgggagatggaccccactactcaaaatctcgtctttcctaagtctctttctcataaatactacttccacccaagtcccaaccactctttcttcttcttcttccttctctcactgcaccaacttcagcaacttcaactgtacacaaaaaccaaacacttctcacttctctctctccttttccttcttctctggacgaacaacaaaaaaatatattatcaaaattccaattttgaccctttctgatgatgaagaagaagactgttttttcattgctaacggtctttttcttcatctcacagtctctgaaactcgctctctctctaaccccagatggactctctctcctctcccttaaatccgccgttgatcagaaatcggccggcgaagctttctccgactggaacgaggatgacccaacaccctgtcactggtccggcatttcctgcatgaacgtttctggttttcccgaccctcgtgttgtcggaattgccatttcagggaagaatctccgggggtatattccttcggagcttggtactcttgtttatctccggcgactcaaccttcatagcaataaattttacggttctgtacctgtacagctttttaacgcgacttctctacatagcatatttctctacggtaacaacctttcgggtccggttcctccttcgatctgtactctcccaaggattcaaaaccttgatctctctaacaattcgatcactggagagattccggaagagttgaagaaatgtacgcagttgcagagactgatactggcccggaacaaaatttccggcaaaattccgtcggggatttggtcaggaatggaagatttaatccaactcgacctctcttcgaacgagttaacaggtccgatcccggaagatataggcgagatcaagtctcttacgggtactctgaatctctctttcaatcatttatctggaaagctcccgaaatcgttaggcgaattgcctgtaacggtgagtttcgatcttcgtaacaacaatttcagcggcgaaatacctcaaacggggtcgttttcgaaccaaggtcctactgcgtttctcaacaaccctaaattatgtgggtttccactccaaaaggcttgccgagacacatctgaaagctcatccgggagttcaaattccggcagagaatccaattctggacccaaaaagggtctcagtcctggtctaataatcctaatctcgttggccgatgcagcaggagtggcattcattggtctgataatcgtttacatttactggaaaaagaaggacaattccaacggttgtagttgcacagggaaaagaaaattcggtgataataatgagaaaacccaactctgttcttgtctttgctctaatgggtttgggaatgaggagtcagaaatggaagatcctgagaaatctgagagtggaagaggtggtagtggtaatggcggtggtgatcttgtggccattgacaaagggtttacatttgagcttgatgagcttcttagagcttctgcttatgtattggggaagagtggtttggggattgtgtataaggttgtgcttgggaatgggattcctgtggcagtgaggagattgggtgagggtggtgaccagaggtataaggaatttgcagctgaagttcaggccattgggaaagtcaaacacccaaatattgttaagttaagagcttattattgggctcttgatgagaaacttcttatcagtgatttcatctctaatggtaacttgggcactgctcttcgtggtaagtttctcaattttcactcacccttttgttttttttacttcttctgtcatgtcaagtcattatccatattattgattggggaagtgtaaaattccttgcctaaagtaaaaatatttgagaagagtcaaaataacataacttacaatcatagttactcttgtttc

SEQ ID NO: 193516 - DNA, 2850 bp, Cannabis indica
gtagagtatttgttttttacagtttgatgacagggatgtaggattttaagatgtaaggaattgactggaatatttcattcatcatatcacttgttagctgcaatatttcttttcatgttccttccatctttcaaatcctctgaatgtaggtgattgaggctcctttaccaaaagtacctcttgatactgcagttttttgtcattggctggctattgatggggtacaacccgcaattccagagaatgctcctgtgtcaggtttgtcatgtattcataagagtaggtatttccattaatagagattacttgcaatagttgtcggatgacaatgttttcaaacttaatctgtttaagttggaataactctttgctgcatatgctgtggtgaagctacagtgaaatgatagatatgtgtagccaggagccacttcattcgagatgtacttcaattaggaacactatttatattgacacaaattcaattatttgtttctatttttattttgttagcccagtttagtatctggtcattgagctttttttttttttaaaaaaaatagtaattgcagctcctgatgatgccaaaaagtctgaacaaaaggatgaaggagttgctgttgacattaaactaccagttaagcacgtagtatctaaagagcttcaggtagattacataccgtctacttttatgtataatttgtttgattgtttttctttttttttttttgttttattcacatgtatttttatgtttgtgtgttggcagctttattttgataaaatcactgaacttgttgtaagtaagtcggattcagttttgtttaaagaagcactagtcagtttggctacagattcaggacttcatcctctagttccttatttcacatgctttatcgctgatgaggtgatattttttgtctttactacatgcttaacataaacatataagagcatcatttgtgccaacagccacttatttctactttcttattattattatataggttactcgtggcttgaatgattatcatcttctccttgctttgatgcgagttgtttggagtctgctccagaatcctcatatacagatagagccttatgtaagtcaacatctgttttgtgccatgttttgctatgcaattattattattattattatcgtcatcatcatcagattggctgagagactggaattttattcttaaaatcctgtgctgtatctttagttacctatggattttgcatatctttgtttttcatttttatgcatgtcagtagtcttgctgatactaacttagtaaactcatgccctttgtttcaaagatagcgtgtcgtctttgtatccagcccttttgatctaatgaaaagttatgtttcttgttgaaaaattatatatatgttctgtattccaattatggctgtggcttgtatggcttaggattcttgtctgcaactctatgtgaagagaaacatttgtgtactaggatatgcatgtgcaactttgtggagtttagttcagatcgctgatattgctacaattgtatttggacataaatttctgcgttaatgaacttgaactggtaacttgtcctggtttgtaatagtctgatatatacgtacagtcacacacgtactatgcatggattgggatctgtattaaagcaaaaagaatgggtcaaattcttaaacaataatgaacatatcagaagctgcataaatttgctaataaaaacccttatttgatagcacataaaaaacaaattatatactcaatctttttcttagatattacccccttcctttgttgaaattctcacttttgctcctttcagcttcatctcatttttggggggttcaatttttccataaaattatcatgttattctgcattgattatgacttgattatatatttcagtagcaatttattagttctttcatagactgtaagattgccttcaatcagtttctaattgtggtttaagcacctaatgagcatcacaaaatcaagtttctttagttgttacttgtcagtgtaaaggttgtactatctctaaatctgagaacacattttttttttctccctgccagctacatcaattgatgccacccgtggtgacttgccttgtagcgaaaaggttagggaacaggtgacaatcactgggaacttagagatttcacagctaaactggttgcttcaatctgcaaaaggtaagctattttttgtaaagttgtgtgtgacaaaggtttgtggaattgagtcataattattttttgtttatgtgcctttgttttctgcacttgagtcgacgtttcttattgatagtattagcataataatctgcagcaagagttgtatttcacttttgttttgtagatgttgcatgcttgtttgctaatttcttcccactaaatttgtcccctggcaacctaaactgacatttggcaggagcttcattcttttgattttcgtatcaaaccccagttaaatatttcatcataattttatttctaataaaacgataccagtcggattgttacatttcatggttttaccttagtcacttctaaaaccatgattgaattgttacagatttgatataatgtaatgatctagtaacacatttcttcaaaaattaggggataattaggttgttttctaattttaaatattatttgagagatgcttagctgtttcattaatactgctgacttaccaatattaccagtcttcccttcaatttaccaattgcaactgttttgcatttgaagagtaacacttgtctgtgcgtaatgtttttttttcctttttagtacagaagaataagtttttcattttttatttattttt

SEQ ID NO: 193517 - DNA, 2130 bp, Cannabis indica
aatgcttgtttgctgaagaaaatctggattgaatgatcagtgaaggagaaaacaaaaacaatcatcaaagaaataaaaataagactacttgggttggttgtttataattgtacataaatattagtcgtatcaattaaaattttctttcttattatttagcctctattagccactattattattagtagtatttttattattttattttctctccctaaattaaaaaataaatttttgtattaatttaatctcatgaaaagtaaacaagaggaggcaatcatgaaaacccatgtacaagttagattgaaatgtggactttcctttccctctaaattacaggttaatatatatatactattaatttatataaatatatatactaattaattatttattaattaaagcctttcttttcacttataattaaattctctttctctcactcactctcactcacatgtctttaccactttcctggatctttcactctttctaattaccttattattattctttgacacttttacggccaaagggtatttgatccacacaatattacaattgtctcattttcatactttaataataatatattatctgtgtattgatttttaataagtttgaccaattaccgtaccaagtccaagtcctctataaatagctagttggagctctcataattcatatcattattctctaaaaaatcccactatatacacatcactatggatacaataattattacaaccatctcctctccctggcttctatgctttctggctttggttttcagccatggccttgttcagctccaagcttcacaccatgtttacagaaatcttcaaacatcagagaatactccaccaaatcaaccttatagaacctcttaccacttccaacccccccaaaattggatcaacggtatttttaatattaatttctttccattacatcttctttgtttatatctatatttattagtttttattattatactaataagggtttaattaattgtttttctttggcttctttttcaactttggtgcttttattggactctcagatcctaatggttagtattctatctttttttccatcttcctgttaattattttgataagaaaattttagagtttggaaaataaatatatggtcaaaatttgaatgaataacattacgactagtcgactacgacttagctaaagtgtattgacagttatacccctgtttgtgattataatagagtttgtttaatacaggaccaatggtatacaagggactataccatctattctaccaatacaacccgaaaggagctgtttggggaaacatcgtatgggcccactcaacctcaaaagacctcgtaaactggaccccacatgacccagccatattcccatcccaggaatccgatattaacggttgttggtctggctcagctacaattctccccaatggcaaaccggtaattttgtataccggaatcaacccccaaaaccaacaagtacagaattacgccgagcccaagaatctttccgacccattcctcagggaatgggtcaagttgcctcataacccagttatggctcccacacaagccaaccaaatcaatgccagctcatttagggaccccaccactgcttggttgggcccagataagaggtggagagtcattattggaagtaaaaagaaccgcagaggattagctatcctttacaggagtaaggatttcgtttactgggttaaggccaaacacccacttcattcaggtaaaggaactggtatgtgggaatgtcctgatttctttcctgtgtctgtggatggccaagttggggttgccacgtctgtgattgacaacaaggttaagcatgttcttaagtacagtttagatgacactaagcacgattattacaccattggtacgtataattttgctttggataagtatatcccggataagggttttgtggatagctattctggtttgagatatgactatggcaaattttatgcttcaaaaaccttttttgatgatatcaagaataggaggattttgtggggttgggttaatgaatcttcaagtgttaatgatgatatcaagaagggatggtctggagttcaggtatg

SEQ ID NO: 193518 - DNA, 2852 bp, Cannabis indica
tctctctctctctctatttggttattagatttatgtttcttcaatatttgtttattttattttgttatcgattttctttcttcaatatttgcttattactataactaataataataaaaaataattattattttcgttttacactattaaattgtgtatacaactcgcaaacaatacattttaaaatataatttttataatataatagttatttttatttaattttatcatcaaatgagtaaatagtaaatgagaggttataaattaaatattttttactacttttatgttaatgaataatatagtaaggcatcattagtttaagaataaaatttttctctcaagtggattcgggtcaggtcgttctctaaagaatggctgtctgttcgccttgattgcatgcagagctgataatttctccgtcgtcacggcacatcgatgtcctctctctttcaaaaaaaataatgaataatatagtaaaaaactttttttctttttacataataatttttatctttcaatcattaaagtaaaaaaaaagtgaaaagtattaaattgcatcatttattaaatatcattcactttattaattgttcatgataaaattaaataaaatagaatgtgtgtcaaaaaaaaaattgaatgaaaggaccatcttactctaaaaattatatttcagtcatatactgtaaaagcacaacttgaaaatgtaaaaaaaaatcagaacgtaaaaatactaattatcctaataaaaatattgggacattctattaattacaatctaattttatcaagagcattgttataaattagttaaaaaaaaaaaaacaaaagagagaattgttataaatgattaacacttcatagcaccatgggtaccatttaaagtttattttcttatataaatatttattttttaatatattatgaagacaagataaaaaaaaataaaaaaaattgagaaaaaaaaataaattgacttctatttattaatatgagaaaaatggtttgagttgaggtatgatacttgtatttgggattaatgtttataaattttaataatttaatgatggactaaaagaagggaatgaagacgtgaacaaaaagggagaaagagtatagatcaaaacaatcgtttgtgtgctcaaaaagtgacaatggggcaacatagtatataaatggttattgagtactcatcttagggtttcttattttcctttaatgaaaggggtactcattttaggtttgatctcaaatttatgacaattactattcattacccaactatacttttataggacaaattaaatctactaataaaaattccatttcttgtcaactatacgaatgatttattttattgtgtagctcaataaagaaagggcaatgatattatggtagtagtagtggggtttcatttcatgcttaattatatagagataatataaaaaataaatatttaattattattactattattctatatattctcaagcttagctgccatccattccatgcttatttattttacatcatcaccctcccacaccaaataaaagcacacctccttttccttttaataattctcccctctcacttttttcctttattaaatataaacaccattaccacgaacacagtctttatttttattattattattattattattattattattattattattattatatgagtgctattgcagaatatattttttaatatttgtttttaaggttggtatttattatagttataatattattttttaacttttaaaaagtttaccgtcctgaaaataaatttgaagtttttttaacacgcgtagtagattggaatatcagtgactctatttttaatactctaaaatatttaaaatttttcaaaaatttacaaaaatgatattttaattataacgaataccactatgaaaaaaatattctatgtaatttcaaacgtaaagattaactaagaaattgtaatagaaatttgtaattaacactcctcaaattattattattgtagtcgagtttttcaaccctcatagcggtagcagtgttgtcctttcttctaaatttaactaaggacaccaaactaccaaaaacataatatatgacctaactaccaaaccataatataatattcaacttttcttttattttttcaataaattgtagtgaaaaaaataaaataagagatatgggcattgggcaatatcatcaacacacaccacaaaacgatacacataaaaactaaggtgcgtctgtatacagagtgtcggtagaccttgccctctgccccactaaacctcttgctgggaccatttccatcttaaccatatttgtatttatgaccacaattggtcccttggattttggcctaatttaattaaaattcacaatatttccactttgtaaatgaaaacaaatcttcaagacaacaactaatctgttcttttataattgtgaacttagtttggattcagagccttgtttccaacatgcattattgtcttattacttaaaaagtaaaagttgtgttgttttcagcataatctacctttttttttttcttttgccatgtttgtctttcattttttagttactcttcatattgaacccagagaaataaacaaagattaaggtttatgtttaatgaactaagtagtattggtgttctttttttcttagctgaactgaggtgaattatatgaggtatagattttgtgggatctagatctttgatctcatttccaaaagctaagatttgaagcagtagctgaatgacatggtgggtcctgagtttgaagtcttaaccaaaaatcttaattgtaagctcctaccaagaga

SEQ ID NO: 193519 - DNA, 1808 bp, Cannabis indica
atctcatctcatctcatcatctctctcctctccctccaaccaaacccactatctctctttctctctttctagctcaatctctcactctctttctctctctgtaaatggaaccagcaaagattgactggaaaaacattgagtcaaagtttgtagaagatgtgttatacgagcacattaacgcaccaaaatggttcgatttcttgtccccaaacgaccaccctgtggatgatgatgagtcttggttttgcagacctggtaacatttctcgaaaacccagctcaatcttttctttacacaactggaaatcattcccaaagttttgatttttaatttctcttgagttacttacttacaggttgcaatcacccaaagacagctgaagattttctcaaatctactccttctaaggtttgatttttgctttggcttttgtgggttatctttgttttcttttatcaagaagatcaagatcttatcttattatggaattttttctcaattgggaaaaatcccattttgtgttttgagtttaattttgtgggcttaagttaatttagatcaatagattggttttctttgtgagttgaatgaaattcaacaaagtctatatatactgcttacttgtctgaaattttggtttaaattgtttcattggtgaagcttgcaagcccagctggtgtttctcaaatatctccacttggtgatagaagtcaaaggtactttagaagcataattgaattgaccttatttctctttcttttatagtaacttataccaactttctaatttgggttactattcaacagagaggccaagttgaagagaagaggggtagctcatcaagcttggattacaccaattggtaactcgaaattcaatgatgacagtgaaaatcataatccaaatttttcgactcctctaaacaacagcaataacaaccatgctaagatcatcaaatcggctttcaaatcaagcaccgaaaagaaagaagctgtagtagaagctccattgcagcagaagaacaataatgaggtgctgccaccgaggctgaaaagcacgctttctgcgaggaacttgtttgcagggcgggatattctaaatcagattactgagttttgtaatgagttgaagagaatggcaacaagaacaaaggagagagaagagagtgtgaaggaaaatgtggtgatggatggaaagattaaaggtgaggtgttgggtgagttggattggaaagggaaggagaggaagccattgcttgatggagttgaagagaatcctctagagatggagagatgcattctcaaagagaagcctcaagagatggagaggggcattctcaaagagaagccaagaagaaaaaagtaagtccacctttctatcttttgagctaaaaaaaatacttacacctagttagtttacttcatattgtgcatgatttgataccttcaagcttctttgcatcatctagttatgtttgttttacttcatgctgtaaagctaagtgtatgcacagctgattcataagctcctttgtgcataatggaattttggtttaagactgtaactagactagatgaatgagaggagtaactcgaatggtttggatgcggttttctcccttaaagtcatattgcagggttaagcagagaacctattttcaaatgaaattagtgttcattagctcctttgtgctaaatggaatttcggttaacactgtaactagctaaacgaattgaaggagtagctcaaatggtctagatctggttttctcccacaaagtctgaggttctattctatattgtagggtt

SEQ ID NO: 193520 - DNA, 2018 bp, Cannabis indica
tactaaaacgcatataatacatactaaattgtactcactaatttttattcaatggaatatggagataaacattaattaacacagaattttgaagtatatcaatatgtattgggttctcaactagttcccagcaaacaaattaagtgtgttgccaacatattgtttgcagaccctctactcaactagttggcaaagataattcaattcctttgcctgagttaaccaattaataaatctgaattccatgtgtacaatgaataaattcattttgggtgcaatgtatgcagatatccagcctctaagctcttttcatatagaagcaaaaagcaactaatcacactgagacattaccacattgtaagccatattcgaccgaagcctttcatcgagtataattccaacatataaggcctcctaaaaagtttatacaagcaaccactgcaattggaataattaataattttcagtgcattataaaatttaaaaagagggagagagaaaacaaagtaatacagacatcattagatgatcttgttactttcttaattattatgcaactatgaagaagtttggtggctgattaatggggccaataaggttaacaatatttgaatgttgcaaacatttcatgatagcaatctacaaccagagtacaattcagaaaatcttactttaatggtgtttgaaaaaggaagaagcaagaatacaaattattcatgcttttaatgattatcactaaaatataaatacaaatacaacagtcattttgttctaaactgctttactccattgataatgcttatgacactgagcttaggtttctaaactaaagaaacatatttgtggcacctgcatcttgggttggattggataagaatttaaaggttggtagaaagatggttcctttcatgacataaaggtacaacctttaccaacttgtgagtcaattctagggagtaaaatggctacagtggcatacagagctctaggagctagagctacaaaatttcttgaattagtacatattgatgacgaatgtgatccaacaaacattcatgtccgatgaagatactgcaattttatcactttcactaatgattatgcaagacgattacatttgcccaaatacacttctaaatgatcaagagatatctataactacttgggcaccatcctctcttaaaaatggccatttgatcaaatagaagtaacaaataccacttggctgagttatatcagagttttctcctagttctcagctcataacagaaattgtagcagaaatgaggcatggagctctttcaaacatggtgaggtctatgacatttgacattgatcgtttcattttgggtataaatggtacaaacagaagcatactttgttaaatgtctttctactgaaatcaacactacaccacatgaattatgaaaagtttgtgctgtgttatacaagaattaggtgtttgacacttaacaagggaagtgaataacaaagaaccttattcagagacatgctttaaatgactcatatttcatggttcagaacgaataaaaacgagaactttataacccagacataacaaaaacacaatggtatatgtttatcatggatggaacggaatgaaatgaagaatacttactgagccacgccacttagcacgataatcagttccaaaagaccctgaaggaatttgcaacagattcagttttaaatcatcacattaataaattttcttcagaatcaaatgcacaacattataggaaacgaaatgcacaattgctatacaaaccctttttcaaacaacatcaattacctgatccaattttctcctgtaaagcaagtttacgccacaagatgagtgaaccctcctcgccaaaacaaaattgaaggttcagtctattctttactggctcaatttggtctattaacaatataatattagctgcatcaggggtaggtagcagtggtgactggtaagaagaatgtgattggttctaggtagaaaaagctagaaagaa

SEQ ID NO: 193521 - DNA, 2232 bp, Cannabis indica
attagaagttgatttgcaacatgtaggagagggtgtaagtgcaagaggggaggaaagagtactcagcgagcttgatgattcgtcaaaattcttatgcattttaatgtggcatactaaaagaccatagacaatttttaaacatgaatagtccaatttccctttctatttcctaccgtactaacccccaatacatatatatttatataaatatatacacattgatggaaagataatggagtcatagcacttatgaagctcaacatacatctcctcttgtactactataatcacctatcaatatgtaaaatgcctaattcctatttcctaccgtactaaccccgaaatatatgtacacatattgatggaaaatgagagggggagaatgctatattaatggtgccaaacactctctttcgtgttaaattgttattagtataattaagtagcgggtcctatataatttaaaagattatttttagagaatatcactaaccaatcgtaaagtggcacttataaaaggtgttaggcatcattagtgccaataacaaattccgctatgaagcatataggggtggcaatacatacctatatatgctcttgtattattgtccaagactggccataggctgtgaaagctgagcaaattgcacgagacctaaaaaattaaaggacctaatttatttattttttaatgaaatatgagttgttattttttatacacacaaattatgagtctaaaattcactcagttcccaaaattcttcataacttttatagtgctattcatttatatacacacgttttcaaaattaattcagatttttttttttaaaaaaaagaaatcttttatatgaatttatatatactcagacgtttaattcaaaattattgttatcatcactatttacttcttaaattgtgcaatttctattattattgttattttaaaaaatattattatttttttaactttgtaaaatatataatcttaacatgataatattaaaaaaatatatatattattcataatttacatttttttaaggaaaattatccaatgtactattttttattttttttttttaaatttacagtttgggttgtagtttttccggtagtttctatgtgagttgttatgtgaattttggttgtaagttgctccgttagttgctatagagatttttgtgtagaattttgtaaaaaatacaaaaaaaaaaattattaaaaaaataaaataaaatagtagggtccaatttttaaggctacaacatagcccaaaaatatttaagagggactgctactttcacaagcccctgttaggctcaacatacctccgctcgtgtactagtgtcacaataaatcaatcacctattaggtaaaatgcccaatttttatttcctaccatactaaccctacatatatttatatatataaaaacacatattgatgaaattatggaaagatgagggggctacgaagctaaacatacctcccctcctgtactactattacaataaaataggtaaaatactcaattcttatttttattgtactaacccccatatatatacattttaatggtaagaattaacaagatgaaattattggcaattagttaaagtttggcgattcagcaaagaaaagaaatatagatggagtttggcctattgggtgccaattaaattagagtttggccaacatggcattgaataaatgatcctataagctttttttttctccgcaacaaaatgatcctaacctattaattacttatagacaaaatttaaaaaaatgatcctaccctattaattacttgtagacaatttaaaattaataacggggaacaattttagacctacgtacaagttagtttttttttctctttttcttgaaatatatggagatgtatcaaatctttttaatacatgggtattatgaactctacaaaattttttatttttaattataataaaatttgtgactaaaattacaaatattgtaattattcataaattattatttttatgttgtgattagtatattcgtggctaaaggtatttataacaaatatgtctttgagtggggctgttgttagatcttttaggttcttgttaattgtcttttcgggtgtatgtcttcaacatattatgcgaaatagtaataactaaaatcttagtacatagtgagtatgatatgcactacagatggaaaacgaaatttcttggttggaag

SEQ ID NO: 193522 - DNA, 1840 bp, Cannabis indica
ccatatatatgccatgtcccacaccccaccaaaaggtccaatggaaggaacacatttacacattaaaaaaaaaaagacccaaacatcacattctctctctcttcttatctatatgtacgtagtactactatagaattatattgtcaaagcttcacgcaatgcaagtaggcaacaagcaacttgagaagaaactcagccctctcttctgcaaaaaaagacattaaatattaatacatatatactatacattacacattttatggtaaagtgggccaaaaataaaaaaagaaaaagaaaaaaggaagaactttataataagaaaaatgcaatagtgtaaataaagctttataattttaattacctttttgtgttttttgaataggagttcgggtgagattctatagaggtcttcatctactggcttaggggttggccttggcataggaggagcaatctctttcaactcatcacttacccaactttggtactcatgttgtttggcctctttttcatggcatgagtctcgagctttggtctataaaaaaaaatcatatatagaaatttaatcacacaccaacacaatatatataaagagatatatactagctagctagctactaggcctttctcaactatcaagaatataactttatttcttttcttctttttgttctctacactattgactctttagcaataataaagcaaaattgcaaaagctaaactcatgcaaatctcaaagagagtcatatatatttccattattgaagccactaaaactgactttttttttctgggcaaatattaaaactttatttctaaagaaaatttcaagaaataaaaacatcacatgatatgacataacataaatataaaatcttgatgatgatattgatatacatgatggtgtaagggggaaaacgacatcattttgagtgattatttttagcttacccttctacgaggaacgacaatcattgcaggtgtaacgacatcgttctcatacaaatcccctgttacgtacaaatcacgatcttcagagtagctatagcgtagtaagccagcttgtctagctgactcaaaacactcagtgaatggaacattgtcgttccaatcccaactcccaaacgcaggcaaatgagtccttctgtagtcctgtaattccaaaccaaacagaaacaacttacatcattagtcccacatcggtgagatacggtaaagtttcactctttataaagaaaaacttaaagaaaacaaaaactaaccaactaaaacttacttccatatcaatttttttgaatgagctcctttcaaagagagagaatacagaaaatgtgttgtctttctttgttttctttctaacctgtggttgtaagcgtgggtttttttgagccaatttaaaaagaatggtgaagagagagaaaaagagtacagtaaaaaaagaggagtagggattcaaagctaacttaactggtagtgtggaataggtaaaaaagaaagtaaccacagataacgaagtatcactagtaagagacagagggacaaagaagtaaggtaagagagagaagagagaaaagagagtatatatgtatctttattattaccttttatcagggcttaatagctttcccctactttgtctctcttcagagataaatatatatatatatatgtatattccaaagcaactacataaaagtctttcattcattcttctctctctctttcaagctcagcttcttggcttgttgtggggtttctttctttcttcaatctcgaagccacacctcctctcccagggttaaaatagtaattagcaactgtgaatattaatgctact

SEQ ID NO: 193523 - DNA, 3388 bp, Cannabis indica
ctgagcaacaaagggaggtaaagtctatcattgttattttgggtctcttttatttaggaaatggtgtgaatgagtagagctataagtgaattgtttaacaaaaacagaacgaatcctcttttgaattgagatactgggattttcttggctttcttcaaatttgctactctctagtactatataaaatgatgaatgcttaccttgttgatactaaaattcaggggtgttgattttacaatttgtggctttctaaatatgatagttactttggacaatctggatgtctccgatcaagctttagtgattggtctaaacttgcatctcttaaattgcttacctttaacaattcactactttgatcagttaataatgagcgtgttagttatttgttaagcttaaggatctcaaaagtaaaacgcataagtttccatcaatatcatttaagaattcaatttatattattatgtaaaaactggttccttgcctaactcgaccgtacactgacaatatttgaggaataagtacgtagggcattttgtaggtattcaggagggaccagaacagtaacactagaccttgtatgagcaaaccagaaactattatttagtaaccttgtttgagttactcttcttttcttgggtgatcaactgatatttagtgtgttaagttatttgttaaatttgtggatctcagaattcaacattaactatcaccgctcattcaaaaaaaaacaataactatcactaacgttattaagatttctaactacactctaaccatttcgctgttgcatagaattgaagttcctttgagaacagtgtgaagttggttcttaaagctagaagaggaaaaatgagcaaaaccacctattgattaaatttattaaagtaaattcgttttaaatccagtttctattgattttgcaaattcgaaaaatttccttttacattggctggaggattagaaattactaattctaggtgtgctgtgaaaagaaatatcatgtaggaatggtaattgtattttcatttcgctaaaaaattattgtgtttggattttcatctaagacttaatatgtgtttggaaacttaaccaagaaccaaaaggtgccagtgttgagacttgagaggtgatgcactgatgcctaacatttattatgtgtgtttacagcaagtgttgactcgtgtcctcgaggaatcagggtatgcaaaagattcaacattaggcatatccgacttcacaaaggtatatcaaatttccagtgcattgtacggtacatggtcatatttataaactacttttgcataatcttttttatgagaggcagaggatacttttaaatttgattgtgcatcccttccttcctgcataaataataaagctctttaagtcatttggcagtagaaaaagagctcgcagatgaaaagtttggtagtatatctatgtataaccattaattccaatgttgcttttttctcatcttaatcaagtagtagcaagtattgtcatgtcatccattacttgaacttagtcatcttctgacttttttcctacatgatctctttgacaatttcttcgagacatttcaacacatttgaataggtgctcttcgcattaactttcaaataaattgagtggaaaaacacattaatcaagtcactccactccaatacgtatgaaaagactgtaattgatggcctcattgtttgcaggttctgggaaacactggcataaagatggatgttgaggttccgatcgactgaaaaagaaaaagaaaaaccgaaatttagcatgaaatcgtactctaccaattcatttagtggataattgcataatcatctggtgtaacttgtaagcctttatgattatatattggctgtagttcaacctgtttaataacatggtttatggataacttcaagctgttgagtagggacatttttagataattgatacaattatttaacttaaactcaaccccatgttttccattgactgcagccgaataggcttattcaaaaaaagaaaaaaagaggcattttttgaaatgaaaattctttctaccttccctacttgaaaccttttataaatcaccaatcagattgggttaagtgttatctaaacatgttttaacttaactcacaagattttgttgttatgtcatccaagagttgtggtaatgacaccaaaccattttcttccatatactactcaagtggcccttgatggtttcaatgtcattttctttcactctaatttattttagagctaggcttttattattaattttcatatttctaactatattcaataaaaaaaatataaatttccatcgactatttttataaaataataataaatgaaagtgttatttatatattatataacattttttttttaattatgttatcatataaatatgataatgtttgacatacatattcaggctaggctgtgtttgaagttattgtgtaatttttaggtagtgtaattaaggtggtaattatattatattttaaaatacaagtgtatttagatatgaagtggtaattatatatgaattcataatattttgtttagcaaaatagttagtaattatacgagagaataatattttttagtagttaatgtttaaaaatggaaatttttttagtaattacacagtgtaattttcatagagtaccatgagaattgaagattataattgaaactcttcaattactttcaattaccttcaattacacaattacagtgtaattatatagtcagacagacatgtcaaattgtgtaattaccactaataacacataaatccaattaaaatgtgactttccaaacgtgttcttagtaagaaatattaatataaaaaatgtaaatagatataatttggtgtatctaggggtctctctataagttcttagccttgatttttttgcctaaccaagacttgctcgctatttctcaatcttatggcatggttctggtcaggtcttgttgattctcacactatttttgatttcgctggggttgttattatccttctacctatgtattctttattttcttcttgtcttatttctttaaaggtgtgtcttggggatttaagttgctcattgaatttggattagaccttcactagtgttaatctttttggtgtattatttttatttgatatcttttatttttattttcaataacggtgttgttacatgtaacgtccccgcttcaagcctccattgggcccttacacccacggactaatggctcttatacacgagtacggcactctggctgcttcatggactgatgactgaccctacagaccaacacgagtgttttcagcgtgctttgtcctcactcacacgcatcctggggaaaaacttcccca

SEQ ID NO: 193524 - DNA, 2164 bp, Cannabis indica
tttttgggtgcagttccatggattgcctaccagatgcttgactaattataacactcctatcgtgacaaagaaggtgggttcttttgtgaaagctgatgctaagagcaaagaggagctagtgagaagaggatacctcagagcatggatagaagtgtggttgtcgcacccgatccctccgggcttctttctgatggaaaatggaaaaccagaatcatggattcagtttaaatacgagaaattgccacatctctactttaactatgggaaattatctcactgagataaaatctaccgtgttcagacggtaatggtgattcgaaaggcggtaaaggcagttcaaatgtatggcttgtggattaaaagcgatataggaaggagcaattgcttcactatgaatgaaaagggaatatcaaaacaaatggtcgactctgaagatatgtcggagttggacctcatcatcataggttgcaaggagacttgtagaaggagactggccacaaagatgtcaaaaacaaatattacagtcaaaaaagggaaggaaaagatcaatggggcggttcaggacattaccccagtgaagcacaattgtcgttttccagagaaggtacaatgtttaaaggccactacttggtactcgattgtcagagacggtacgagtagtagtcgtggaaatgagacggttgggaatgttggtaatgatgttgctaacgtgtcaaaggaaggaaatttgaacgtggaggatacttgaaaggattttacttttgggcttgagaacttggaattaccccgtcctaattttttaaatcataattatagaaatgagttaatcccaaatattgggcctactattgctcaaagtctagatattccccatgattggttgtgtttgtcctaaaagccacacttgttccctgagcccacccctttatgttagccaaaccatgattcagaagcctagtaaatatttcttaaattgtacgtgcctaattttctaaacctttataagacccaacaatcaattatctctaaccaaccagacctatcaaaaatgactatgcacttgttgggtaacagcaggaagagaaaggcccacacgtggttccaaccttaccctgctgttttgaactttaatttaccgacttgcccagaaaaagaagtatgcgcctgagggagattcgagtaacaatgaagataatcatttttccattggagctagggataatactgatggatcaagtttcggcaatggaaggaagtctatgggaaagaaaagaaatgctcgaccaaacgttcatctgggttgaaaactcaaagttgatgaagaggagagatacaagcagctgagacttcgaagatctcaggtaattttaatgaaattctggcaaactatgttgaagttatggtggagtatgatcatcattttggaaatggtgaggaggcggccaaaagcatgcccctaccatctttatgaggagcctcttgtggaactgccatgggctgtgaaggtttgcggcagagagaactcttcggggtttaattcgtgattgtgatgcagatttcctttttcttttggaaactaaagttgatgtggatactatgagtagtgttactaatcgtttggggtttgcaaatgcttggtgtatccccacgtctggcattgctgggtgcttttgtgtagcttggtgaaggggtgttagttgtcaagttatggaaacttttgaagcgggtttttcgtgttatggtgaacgaggggatgggacgatgccaatggtgtttattttgtgtctatggcactccatattatgctctgaagagaaatttttggcaatggctcacggcaaaggtgctgagtgtcatgagccatgggctttaatgggagatcttaacgtcattcttgcgattccaagaaggagcgaggcaaagctttacaaggcgcgaaggaaattactttcgaatctttgtttaactcaggtggagtggatcttgggtgcggaggaggggttagtacttggaaaaaattctagaaatgaatgtagcagagttcagaaaaaggctgaaatgggtaattgcagatgcaaattggagaacttaattctaaaggcagtgaagaaatggaatcaagttttttttttaggctttgtgatagaaattaaaaatctttgaa

SEQ ID NO: 193525 - DNA, 2390 bp, Cannabis indica
gtctcatcagtagccttttcgaactcacaactccatttaaggacacttccttcttctttaggaaccacttgaacattggccttgaaactcttgtagtactttaacagatctccttctatcacattgtaacaaaatatcttgtttggcacatcaactacttcgatcctttcttttgacactttcacaagtggagaaccttgtttatataataacaaaacaaaataatattattcttaaataaattataccatcataggaaaggaaacccttttgaattggttgatccaaaatgggttattattcatattaaataattttgaataaataaaatttgtcctcactcaactatattacttggattttgtttttgttgcaaatataaaaatgattacaaatattctctttaaattttatttaaagtaacattaatttggtgtgcccgcaattaattcaaaagtcttagatataaaataaattcaaatgcattataaaaagatcgactaattaagattttttttttcttaaatttttgacatgtactaaaatcatatcccctgaatttttaaaagttgttaacaatgtttcctgaattattgagattattgaatttaatgacttttttttttttaattttagttaaaaagtactaacatggatgaaaattcaggagcatgatttagtacatgtcaaagtttaaggaacataatttagtatatatcaaagtataaagatcataatttagtacataaacaatcactaaaatagtgtatctattgtagtttggattgaaaaaatcttattcattaatatatatatatatatatatatatgtatatgtaccttctccatatgtaatgaatctgacagatccaggcttgatgccatcaccttccaaaacctcaacacttttgtaatcatgaggaaatgcctttgggtaaatgtagatgaaatccctaagggattcccaaaccttatctgcatgagatttcacctcaacttcaacatgaagctttccagtacaagccatgttgtttcttttcttttcttaacaaaatatatagtaataatagtaatataaaacacaccacactcaattagatcatatgatattttgtcacactacttatatatatatatatatatatatacagtattatatatacgagctagaactagagctagagctgttttaatttagtggatgggaagagagaggctttaaatggattagatagaagctcaactaccatgttgaaatgatatcatgagaatattggtaaaagagtagttacatataaatcttacatctaatttaaaaaaaaaatagtaaaaaagttataactaattataaattattattcttatgttgtgactaaaaaatttgtggccggtcaaaagtagtcactactataaaattggcttttcccaacggttaataagaggatcaattataaaaaccgttagaaaaattataatttgttgtgactaattaaatgtgtttttagttacaataatacttattgtgactaaaactaaatcagtgatgacttgtagttaaatactatattttagtcacaaataacattttgttctgattaaaacttacatttcacaaaaaaaaattatattgtgattaaaaagtgactaaaagtagttgtttcttttagtggatcatatgaccctgtatatgagaattgctaaaagacattattggggtgtagtactctccttacttctcggtatcatgttattaaataattaaatatcaaattgcatataattaaagaatataattttagaaaatattgctacgttacctaatttatcgtgagacaccacctataaaaaattttgtacactaatatacttttaatataataacaatgttctagcgaaatgagtcgctaaaaaattcatgacattttacaattaataaaatacaacgatgaggctaataaaattaccattactatatatataaaatatttatatatggatggacgtggttcgttgtgagcttcttattatatatatcagaatcacaaagctaaggtagaaaacgttcagaatcattaattaagtgttacattttgttaggttttgtcttctttgtgagcaactttaatatcatgatgagctttactttacatcattaattaagtgttacatgatggattctaaagcttaattataaatatgatcagtcacctaattcaccttttgtactcattattattctaataaactaagcattttattccaatagtattatttgctctaatataacgtgcaaaagatacgggcggagtcggctctggaagctgaattttcagcgataattcttgctctgaacagggcatgtgatgtagggtggaaggaagtgtgtgtta

SEQ ID NO: 193526 - DNA, 2266 bp, Cannabis indica
gtaagtttactttcagcaagaaaaataatactcggggtcaaattcccaaatatgggattgtaaagcgcaaacagtccaagggttacttggacgttccaacttaaaattttcattgctcttggcggccttgcattgcgaggctcgtcgctttcaaatcagtatcctgagcagggaaatccaaattaagggaaatacccaactcacctgtagaattcttactctcttctgtacatacctctaaaccattttcatgttgttgtgtatttttaaactgtctctgatctccctcgccgatcgccgatgggtatccaccccattttgaatgttattttttcttcaaatttgtatctctgcatcgcgttcacttcctttcacatctagtgattcatcattcagtatgttgtgacgttatcgataagcaataaagccatttggatgaggatcttcttcctttaacttgttcccatacatggggacgaagtctcgctgtatcatcttttttcattcctcagcctcacaattcgattgaccatggccccaaaaaccacattaaaaacataataacgataactgatcaaacttcaattttatccaagcttgtccctcccccgacggaataaatcgtccaacaaacaaacttttatttaaaggaaaaccaatacgaacacgaatatagccattaatgaaagcctgttataggttaccccagcgcacttctgcaacatcacccaccaatgtgccaattcacatattgttcaacatgaaggatttcaagggaaaacccaaaatttagacccaacaaaacatcttgtccaacctagcatctctccaatctcccgaagtcggccatttgtccaaaatcagagctcctccattaaaaatccatggttgtttgtcaagaacagctttagcatccttcctgaattcaaaattaactttgaatacatttgtactgctctgttcatctatttgtttcaccttccaattcagaatatttttccacatcctgtggaaaatactttgagataaactcccattcaattctggctttgcgaccacccggctaatgagagtttgttctccaaattcgttcgctatctcttcattctcctcccaaacatcctcattctcaacacccaacttactagtcatatcatccagttcctcaaccccaccagaggaattcgttgtaaccatgcagcctataaacatcagtagatcaaacattatgccgaagcaatgtcccaaagacaaagaagtgtttcaagtccctcagaccatggtttagctatttagaaattagtatgtagaattttaattgaggcttcaaatttattaaacaatagtaaaattaagaaatattgtcacaaaattaaaaatgtaaatttacaaccaacttaacttctatttcaactgtcaatcaatgtgtacctcgatgggatttccaaaacgatatacttgtttttctttttcttcaatatgcctttgctgatgtatagcacacccacaataatcccttttcattatcaatcaaattcactctttcctttgtgtgtggtccatttttaattttttgtttgaaatggaatctatcctatattatggattattattaatgtttgttgatatacaaacgatcggagtacgaaattgaatacttttacttttcgtaattaattataacaagggttggatctaagcccagctattgatccaatggttatggaaccacataatttcactatcagttgttaactaaccacccacataatccaccatggatcattggattatgagacccaattaagttgaccgccgaaataaaatgttatatgatacgatcacctctgacctggtcaaattgtctgtacaatacgtgtccaaccacttcacactttatttatttattttttgaaggacttaacacatagtttataataattagaaaataattatattatttccttcacaaaacctacaataaaacaaaagaggtctttagaggttttggattatacttaatatatataatggttataaatatttaaaaagaaattatattcttttaagctcatgaattctattgcatacttttgctttgctgttaaaaaaaaattatatatatgcagcgtttttttaagaccatattcataaattaatgtaaattgtaatatactttagatatatattgattaagtattatatatataaaacacattaatccttaccaaaacaaaaaagtacacatacttttatatatatatat

SEQ ID NO: 193527 - DNA, 2930 bp, Cannabis indica
attttttgtttggtgagataagctacctagaatcctaccaggtttgatgaaacaaatctaaccaaacaaaaagtatttgcacgtcaatgcccatggttcttgtttgttctttgttcgtgagactgatttaattagaaagcttaatagatgattaaagattggtgattacaaatacttttacatgtaatcaagggtaaggtgctaatctttttatgcgtggaatatttttttttcagtcgtcagtgctgcattcacaaccaaaatccacagtggggactcctgcatacatcgcccctgaagtattgttgaggcgagagtatgatggcaaggtataataatgttttacttactatcaagtcatgttctgagagtgcctctctgctttgaattataatattaactaattaagaataaattataaatatgtatttaacaactcattgattgctggaaccaatcatttggtgaaaaagtttggtactaggctactagcaatatttatcgaaaaatctttctctgtttattgtgcttattctgacttcgttggaagaaagatctctatgtttctggagttttgctgtgctctctctctgtatatattgttgtaacaaaaataattttaaaatgttgtgcacatggtctggatttaggccacaatgaagtccactatagacctaaacttgacctgctatgaatgtagcaaaataatagaccttccatacattaaaatatgcaaggaggaacaagattaggcaaggtgcttgggcttctaatgagtggagcagattggtcatttaatctttaattgggtactgaatggggtataggtatgccttgggatggtagaatgaggatatatatatatatatataactacgttctctacttctacttatgagggtataggttgttatgccttagttctaagtgtctcggattatttggaatttcaattgtactataacacagcattactgcactcatatcctccagttcttggatttactatggcattacttatttctaagagtctgtttctactggtctgttaagttagatcataaaacaaaatagtgatttctgttatattatcactaagagaggttttgtggccaacaaaagcctttctgccacttgctatctcttgtttacttttatgtttttgtcaaaaatattttctcaccatggaaaatgaaagattcctactttagattttattaactgtaatctgttccttcaataaatatatgctgttttgagagagtgttttaatcatagattgcagatgtttggtcttgtggggtgactttatatgtaatgttggtgggagcttatcctttcgaggatcccgatgaaccacgggatttccggaagacaatacaagtatgtcaatttattttttatttgacatcattaggtactattatgtacattccttgacttaagacatgtcattattggtccatgcagagaattctcagtgttcagtattcaatcccagaagttgttcaaatatctcaggagtgtcgggagctaatatcaaaaatttttgttgctgatccagctatggttagtaagttttattctcttaagattgttctgctgcaaatctttagagcaggcttggcttgcctttaaagctttcctatcactagaagttgggtttttatatttttctcgccataattggtattttaagttttatttcatgaacttgcgtctccaacacattcttaaaacttaatacttacgcaaattcaatgtaatctagaacaaaggtgaagtcatgttccatttcctctcttgctttttgtgcttctctcttatctgaagtaaaacatgcattgtcaagcagttgaacaacacttatcttatctgaaccatttgcagattgtgacgcttaacaacatttttgacttttttaggataattcttctagaaagtaatataatatcgttgacaaagtcattgatttttcttttgttgttggtttgtgctctggacaatcccaactgtagaagatttggatttagctttcacatttgcaaaattcccatcattttatgtgagactcatgaatatattatgcagagaatttccatgcctgagataaggaatcatgagtggtttctaaagaacctccctgcagacttaatggatgagaggggcagccagttcgaagagcctgatcaacccatgcagagccttgatgcaatcatgcagataattgctgaggccacaattccagcagctggaactctcggtcttaaccattatatgacagacagcctggacatggacgacgacatggatgacttagactccgattctgagctagatgttgacagcagtggtgaaataatctatgccatttgattgccggacacagctgctggtaatttcaaaggaaaatttctgatgaaagcacgtctacttttttttttttttttccgagttatggctttgcctgaagaaccagcgatgggaatgtgtatgatagtctttgataggttagaataggtaaattgttacttggagtcatatgagtaatgtttataagaacaagcagttttataccttatgttttatggaggcatttgagcttagtgttttatgagaggtgtggtaaagtggaatgaaccagaagtatgtgtgataatccccacaccctcattcctcatccccttccattgaacctatttttatttatcattgcttttcgtttggttctgtacgtgtactttcttttcactctgttggtttatttggtcataaaatatgtgtttgtatactttgtaacaatagctgtctcaacagtttttatatgaaattcggtagatcagtcatcattattattatgccttgtgacaatttgtatgcctaatttcatattccaatttatgttgttgattagaatagaaagtgggttt

SEQ ID NO: 193528 - DNA, 2055 bp, Cannabis indica
gtgcatgtggctccgcccctggttatatctttacttaaaaaagtacaatcataggtataacaaacacaaatagacataagtataacatttattagtaggttagtttgtgatttgttgatcatcttgtgattttttaaaggatcatttctaagtgttcaacttctttagcatgcatttctaagttttgcagaattttagaataattgtatgccaacaaacagaaatctcatatctattttggaggcactggttagaaaattaaacagagcattctaactattgtgggttatgaggaaggttcttttcctttaaagtacttgggggtccatttaagacccacaagatagaaagtatatgatcgtggccctattatctctaaggaccaacatcacttacataattcggctactcgacacctctttgctagaagggctcaacttatttattctgttctgcttagtatcctaaaagtattgttaaagagattgacaaactttatagtaaattcgtatggggtatcaaggacaacggatgcaagcttcaatttatttcttgggataaattttgtctcccgaaacaatatggagggattggctttagagatggctcaaaatggaataaaccaatggtcagtaaatacatttaggatgttgcttctaaacctaatgctctttaggttaaatgggtgcgaagtatttacttgaaagggcaagacttttggcatcatatggctagggagaccccagttggtattgaaaaatcttcaagcttatattgaccatctctcaatccatgatacagtctattgctgtaaatggaaggtttaataaggttaacaaattttacaactctctccttgatgttgagacagtagattatgctcgtgtgttgtggagtagactctcgatttccaaatcataagtttatcctttggcagatggtgaactcttagttgatgacaaaagataaacttcaaatgttacacttgtttattgcttctccttaatatcaagtttgtaatgattttattgagagccatgaccacttttttttttctttgccccttctctattgcgctgttatgcaaggtccatgtatgtatgggcgggttttacaacttgacccattgtgtattcatataggagagggtttggatttggctactggtctgggcctaatttacaaagtcaggtgctaattattgttactactgttgtggtatctactttatctgagttaacaaaaattgatgtatttttatattttagttcatttactatttagcatactagtgatatgattaaacatggaataaaatctcattttggttatttaagtagaaggaaaatgtctactaaagataaacttattactaattgtgaacaattggtaatttgctcttgggctttatcttcagtattgcttgtgatggtgttgcttgtgtaattttgatgttggtttaatgagaatacttctcctttcaaatatatatatatataaaaaatattatagtaattgtaggaaattatacctaaaataaccctacacaacactcacacacaagtcaatcttcaaggtcaaacatgacctttttctagtctgaacgaatcacacacaagtgacacgttttgttttcttaaatgaattgattttactgtaccaaaaatttctttaccaaattgttaatatgttctatgaattgaatgttagcagagatgaacaacaacttcgaaagctcatacacacattcaacatcaatggtaaatcatcaagcacaaaattcaaagtaaggatgaaaagaagatgagagaaaagaagaacaaactcgaacaaacacaacaattttacaaggcttaccccaaagattaggttacatccttagtgagttgccttagagaagctcgagccaaatttactatgatcaaccttcgattacaatggtttgagatgatttcagtcacaactcgacctggtaatctctccaagaacaatctagtaagctttcttgaccttctttcttttctttcttctcaaactatttctctctctctctct

SEQ ID NO: 193529 - DNA, 2330 bp, Cannabis indica
tacacttacatatttgttttcactttacaatgtttcatgtctatatatgttctcacttaacaatgtttcgtgtatattattgcagagcttgctgtgggtaatattgtgaggcgtgttttgcacattattagggaagaggatctttctcttacaacagcagccatggctggattgaatttatcatctgtaagtgacgatgacgatgatgctgaatatgaagagaatccagtcctatcagctgctgctgttgctgctgcttcaagaagtacactgcgccctccttccttgcaaacccttcttgaggatttacctgatgctgcggctattcatcgcacttcgtcatctggaggtgattctgaagggaaaagcaaatgtaagattcttctattctgggttgttggagtcctttcatctatataacgtttatttttttggttaatgcctgatctacgtgttgaattttcattataaagtttctattttataaaataaaactggccagctattttttttttaaagtcagttgacaaagacttcaaacgcagtgagagtaagcaagaaacatctattaatattttactagatttatgaatttcgtggccttttatagatgtaagcatttaatttctatacagctgctgacaagagctcaagaagccggaggctaaagcacgatgtcattgaagcagttaatgagcttatacaagatatcaacacttgtcatgagctgattgcagagcaagcagtagagcacattcaccagaagtacttctcttttccttattcttgattatttaagcttgattttacaattgtcttgtactgtatttttcatactcatatagtcttgatgaatcatgaatggtactgaacccaaaaggagtgaacaagggatcaaacattctcttattatgaagagggtgataataaatatagatcaatacgaatagggtttctgacttgtatttccttaggttaagctttacagtttatttgtagtatggccaccaaagtaggcaatatatagaagcataatgattatttcagaagaaaggcatttctattttatttcctctaccctaaattacccacagatgctctatcttgtgataggaatcactattgtctgaatcttaaacactagtagactggcttgatgtgtgtatcttcaatcttaatgattctaatttttttccttgtcttatttaccttaactatgatgctaattgttgaatttccagtgaggtaatattaactttaggcagttcaagaacagtactggaatttctttgtgctgcgaaggagaagaagagatcttttcgggtatatgttgcagaaggagctccaaggttagtaaaaaggctcgttatttaatttaagcaaagaatctgaccatttttttttgtaatacctattggtgataccgtatcgttgttatttcttgcaaatttagatatcaggggcatcttctggcaaaagatttggtctctagaggtttgcaaaccacactaataactgattcagctgttttcgccatgatatcccgtgtgaacatggtgagacaacaatgattagcaccttctttttttcggtaaaaaaatgtgaaatcctgaactgtttgattgaccttcattttttaatgtaaaggtcatagttggtgctcatgctgtcatggccaatggtggggtaatagcacctgttggattgaatatggttgcccttgcagctcaaaggcatgctgttccttttgtggtgcttgctggtagtcacaaggtaattatactattttttctgaatcctttgtaatgtaactagacaaaataatacaatgaacgactacaatggaaaactttcagtttattaattgaactttaaagtaaatatatattttgtgattttttggggtgttgggtctatttcatgatttgcacttttgttgtagaattgtagttttgacttcttttcttcttttgtttgttggcagttgtgccctctctatccacacaatcctgaggtgttgctaaatgagttgagatccccttctgaactgcttgattttggagaattctcagattgcatggactttggaaatgggactggttcccctcttctacatgttgttaatccaacatttgattacgtaccaccaaagcttgttagtttgtttatcacggacacgtaagttaatctgatttcaagtaatccttttgtatagaatggtgtactctctctctctctctctctcttcccttttctttattaccttttctcaatcagtaaaggtttggtttcttataaaaaaagaatgtagtacggtaatatgcataact

SEQ ID NO: 193530 - DNA, 1570 bp, Cannabis indica
tatcgagtcattatctatgtgtcattttttattggtatatttaaatagtttttaataaaaataaaaatacgataataattttaatattacatcactaattctcatcttcgacaatttaaaaaacctagaaatctaaccattcttcaaaatctcaattaaagatacttaaatgaaatatgatcatcatcatacatgtatcataatccaagtcactaaagctaacaccaaatctcatgcacgcctcgtcatcagagctagcaccaaatcaacacacttttagaccgagacactttcgtcagccacgagtctgcgacactagatctgacagaagactaccttgacccgccatataggaccttcgttggtttcccaaatcgttgtcgctatggatctctccgttgttgcaaattatccatgtcgttgagcaagcattcattgcaaagccatcttcgtcaggctaggtcatgttggagaagacagtaactatatggcggctaagttttgtgggagaagataaaaaggcgagagagacataatgaagaaataagggtcttttaaataatttatttttttaagaaaaataataacgacaaaataactcgattaaattttttattctagaaaaaaaacttaataattattttagtttataaaattatttttttcaattaaaatgaattttatataatttttaaatagttatgttaggtggactaatataaatgtgttacgtatataagagtgtatacataagtagttcatgttggtatgtaactgagataaatgaatgacactttaaatttgctaacagatcattagtttggagtgttttaccacaaaatttaaactttgaggttaagtgcaagtaaaataatagttgagtgagtttaatcgcaaaaaactcttaaatttaagtattaatgccacaatttttttttatttatttatttctcggaatgagttttctacctctttgctggaaaatccatccatgttttttttccttttcttgtggtctatctgaatttctttctatgtttatgcgacatatgatatggaacgtgacaacgtgttttttttgttcaattatagttctctttattatttatatgaaatattaaaaatattcagataaatgataacaaaagtatattttatcactaaaagggagcaaggcaattaggtgtgtttccacagtaagaatggccaatttttcggtcaaaggtgcttatttagttgatcaggaataccactttaagtctaagctggatatctggaagtggatttggcatctgtcaattcatcctaaaatttcgatgatgctttggcaaattctgagcgaggctcttcctaccaagaatagactacctttccatagggcaaaggactatcttttgtgtggttctaccttgaaaagttacctacatctgttcagagattgtagctttgtaaaagctattggttcactggtttgtacccctgcagaattgatgcttttgatagtgattctatgttgcagtttgtgaatctattttatgtcttctttggtattggaagctctcgtgtctga

SEQ ID NO: 193531 - DNA, 1727 bp, Cannabis indica
attccatgtaatggagtattgatagataatttaaaaattgattgatataaatacccactttcttccaccaatattggatacataatgtttagtttttgacatttcaaataattgtttttctttttgactttggatcatccatggtaatctgatttctataaaaccatttcttcattacaaaatatttatttttttttttttttttgtaaaaccattacaaaatattatttaaagtgacattttacttcaatttttttatgggcaggattttttatttggtattactgtatatttagtcaccctggtttacacagtaccagactacactatggcaacttcaagtgcagtaaatattttgaattatggagctgttggtaatggcatcaaagacgacagcttggtatatatatatatatatatatctatacatgtacattcttctatcacttttatatatatattattttgtttagtcttaaggttgttaataaaatgatataggcattttcaaaggcatggagtgacacatgcaactcagtggcaaaccaatctaccttattggttccatctggtcatacatttctggtccaacccctcacctttaccggtccatgcaagtccccaaatctcattttcaggtatatatatatacatatacacatatgagtattgatattagcagttggcatcttgcaaaaaattgtataatatcagactcggtcttaaggcgagctggactcctacctaaagcccactcaaactcaagatttgaaaattgcatatagcatacttttatgcttgtaaaattttataaaatagaactaatagtactcaaactccactttagatatagtatacacacaaatattcttggcatgttattactcaattttggtacgaatcatacttaacattactataagatcgaatggttaataatatttcataataattcattctaaatatgacaccttaaaagaatgtgctactcaccaccatctcattacatatatatacattcatataaatcatatttttcattatatatatttgtattagctagaaggaggggttgtagcacctggtgggcctgaaaaatggaaaataaaggctcaaagtttgatatcctttgagaatgtaagtgggctcactcttgatggttatgggactattaatggacttggtaaaggttggtgggatctctcttgtgctcaccatcctaaattaaaggtatataaacaatcaaatcccatttcagatatgtttaatttcttatttcttttttaaggccattaaaacaaaatctctgtatttttgtttgtttgtgtaatttgacagggctgttacgataggaggcctacgacactaacattcatatattgtacaagaattcgtgtgaataatatattcatgattaatagtccacaggttcatatacttgtttggtatagtaatgatgtaaaatttgactctgtttctataaactctcctgctctaagtcccaatactgatggaattcacattgaagactctaaaaatgtctcagtcttccactcagttatcaaagctggtatatatctatatctagctcattgctattaagtaccaaatagtgtgtaatactaagaaaatgcatccatgcatccatgcattctattttgttatataagatcaacttaattatttttcatgacaaataatatttattatgtatagactaataatat

SEQ ID NO: 193532 - DNA, 2583 bp, Cannabis indica
gatagctgtaaagcacattctcacgtatcttgtatatagtaaagtagagttaaatactagtggatatactaattctaatttttaatcatacaaagatagtcaaaagtcgaaacctgggtcagtattcactcttagtggtggagctgtaatctggtgaagcattaagttaactagtattgcaaattcaaccatggaaggcgaatatatagcagcttttgaagctactaaggaagcaattttgttgaagaaattctacactggtctagaagtagaaaaaatactagtgctctactgtgataatagtggagcggtggcaactccaaggaaccaataagccacaagataggcaagcatattaagaggaaatgtcatctactaaaagatagagagagttgatgtgacaatcttaaagattgtattgaaatataacctgtcagatccattcacaaatatgctaccagcgaaatcttctatgggtaatataaataaaatgggattaagggagatgcccaattttcttttaggacaagtggaagattattagggtttatgtcatgaaaaacctgtaaaaacatttcaattaataaataagagttaaacattttttatatatatacataaatattaaattattaataatttatatattaataacaaaaaatttattattcggttgtgacttgtattgtatggagaattaagatcacttagccatgaataaaataatcagcaacatattaaagttatgaaatctttaattaatagttgctagtgtgattcactaatgcttattattcagtgcaagtaatcttgattcagattactgtcgtagccctttagcaccttaagtactcccttgtactttatcattcaaaactaaagaataagatgttcccctcacacacaccatgatccaagaaataaattgacagggaagacaaaaaactttcaagaaactcccaatcatctgtatcataagctttatttagatcaattttcagtaagcatctatgagagattatcttccttgtgtagcctttgagtaagtcttgaaaaatcagaacattgtgagccaacactctattctttacaaaagcaccttagttactatgaattattgtaggaagtattgcatccattctcttgcataataacgtagagatgcatttataaattatattccaacaagcaattggactatagtccattgctctagatagggtgctaactttagaaataagcatcaacaaggtattatttagttgatccaaactcatacttgaatgaaagaattgtgtgactggtttcgaaatttcatgtctaatgtccttccaaagctctttaaaaaagcgagacccaaacccatctgacttcaacctcttcattattggaatagagaacatatcttctttaatatctttctcaatgaaagatttgattcaaagaagttgtttctctaaagaaaaatttgcaccctccttcataaaatggccctatagtattgagttagtcattctctttttatccatgaaacttttcaaatgagacataaaatattccacaattattgaatagtcatcaatattcatcaccatcaatgaatgatgctatcctatttgtcctccttttcttcaaacaagcatgaaaatatgttaaatttttgtctccaaacttctaccatgttaccttagatttttgctacaaataacttccatacattttaggttggcttataaaatcttccctcacttgtttctcttgttgtagcagcaatctagaggttgggtctctttgcaaattctcatgattctcatgaattttagctcttaataactcatattgttgaaccacatcaccaacttggttcttgttgaacttttttttagaatagattccaacactctctccttgaattccttgtgctcacatcaaagattaaaaaacttgaaaaattggtaacccaagttccctattttcaagttttttatcaaacaatgacaacaatggtctaactcttgttcctattggaaaaatatacttttaaattaggatgaagatccacccactcttcatttttgaatactctatctattctagaacagatattactccaagcatagtaagacccctttgaatttcatcaacgagccctataatcctatctaagttgtggcatccatcaactcactagaactaattacctcctctccaattatgttataactcgaaaacctcacatactagttaaagtgaaactgacatggctaaattactccgacctctccacaataagtgcctttcttagtcatacgaattttacagtgtatatactgcttattttctgctaatacatccattgagacaaataccttaagtaaaaatttaaaaaatttaaggtaataataatttatttgtttcagtgcaattttattaatattttcttaggatttcaattaatgaaataaaataaattgatttttttttaaataaaaagattaatgaaattaagataataatatttcttatttaagttattaactaataaaagttatttaaattcttggaaaattaccctatatacta

SEQ ID NO: 193533 - DNA, 1334 bp, Cannabis indica
gttaagacatgagcctcaactgttacattgctataccccagccacagggtatcactatgacccttgtacacctcagcaatccgtgcataaggatattctctctaacggctttattggatcctggggaaatcatttgctcatgattcacaatatttttctgttatgattgtatcaattatttactgccacgtgtcctctttgtaatcatcctttaatgtatcttcactataaattcaatacaattcctcagctgtaatttgagctgagttttacatttttttatcttctttgcattttctatctgaattgacgaagagggagacgtgtgcatgcatgggccatgcaacacaggcgatgtaagacattaggacttgtctgggtcagtgtgtttctcaaatagccaccgtagggatagtcgtctcgtggctcaggcaaggtggtcgaccaagccttgaggtctactggtcaacgtcgatggcaagcagagaggacagagaggtccgggagccttagagctccgcctggttctatatctcctatcacaagtcttttggacccgatagctccgactggagttgttcgaccttgccgctccgaacccgtacgacccaggtggctctcgagccaccggtcgtggtccacctcatcttatcagcctcctagggcggggccaccctcccaaccgctagagtatatatatgtatataatatataatataataatcaatttttttgataatttgattaatgattaatttaatttttaaaaatttattaaaaagatatttagatatctaccttaaatatgtgcattattttattttaaatttgttaaaatattaatttttgaaaatatggttattagttttattaatacaatatatatacatatattatcttttagagttataaatattagatatttaatttgtttatatgttgtatataatattatttatatatcttgtattattaataaatttgaaaagtggttagtttttatatttttcaaatataattaaataataatttgtttgaaaattattttgaaaaatctcatccagcttttgttgaaaacattcatttaagcaaattaattgcataataagagaaagaaaaagaaatttcctaacctatctaaattatataggagtacttatgaactaaccaaattcaagaatttataaaattcaacctatttgaaggtcaataaaatgaaatttaatctacaaaacactcaatatgacaaaacttctagcaattcaaattaccaaatattagcctttcctttctagaggttcagaaagcaaatataaataaaacataacaatagt

SEQ ID NO: 193534 - DNA, 1232 bp, Cannabis indica
aaggtgaatgaattagtatttgtgttttttggtttgttgcaggtgcatccacacatcagatagagtcagtagaggaaaattccaataaactttctaaaccagagaatgattaaggattatcaacctacttttgtggtctttctgaaaatttggcatctggggtgagttttcttaatgtctttcttgtttatatatatataatagaactttgtgtcgtgtcagattagagtcaataatactaataataataatcatgcttctgcttgcttgtgtttgaaattgaaaaggaaagtttacattgttataaagtttgtgtttctttgttagaccccatgattaatagggtgagagagagacaatatcaaataaaaggatatatgggtctttgtattaagggtagagtttgagagggaatacaacagtgtatatatatatttatataaaggatactaaagagaatgggaaggttatgcaatgaattgagaggttatctatgtctatggatcatttgtctgtaatttccttgctacaatatcagattacaatacaaagctttctctatttttgtgctactgcccttgtacattctctattgttcttgttagtctctatcattcttaaggtggggtttggttggttttatgtaaagtatttaaatgtcattcttattctagctatgttttcatttcttccaaccaaacgacacttaatgtgatgtttgtcacgtgagtttgagttagaggggattaacattactaccattttaacttgaaagtttgtcatttccattcccatcaaatctaaacctcatatcaaacgtggagtattacccatcgggctatatcattcttgttctgatattaggctagtgatgccattgatagcttaagatcatataacttaacaataagtatatatatacacattattctaattaatgatggtatgttgaaaatgcaggcttatccagacacacagagagagacttgtaaattaaattaatgtagaagaacaagttttttaaaaagaaaaaaaaacaaagagagaatgagaatgagtagatgctgttattttccatgaaagggaaggaaggtctgttgttgttgtgtacagatggaaactggtggtgggttcagattaagaagcatgaataatgatatgaaatgtgtattttcttaattaaaaaaacatagtaagataagatataatgtttgatgctttttgttatatat

SEQ ID NO: 193535 - DNA, 4294 bp, Cannabis indica
aatttcacacagcctttcagtactttaaatcagccattttccctaaagttagaccgaaataactataccttatggaaaaccatggtatctactatcatacgaggccatcgtttagatggtttcatcaatggctcacgaatctgcccccaagaatatattcctgctaccacagctgctgatggtcagcctggctttggagttatcatgaaccctgactatgagcactggatagtcaacgaccaacttctaatgggttggatctacagctccatgactgaaaccgtggccactgaagttatgggctgtgctacatcagctgctctttggcgtgccttggagaatctgtttggtgcacactcaagggccaagatggatgatacaaggacattaatccagactactcgaaaaggtaacacccccatgactgaatacttaagacaaaagaagatgtggtctgatagtcttgctttggctggagatccttatccagaagcacacttaatttccaatgttacatctggtttggatgctgaatatcttgctattgtggttcaaatagaagctagatctaatattacttggcaggaggttcaagatatgttacttagttttgacagcaagctctcaagacttcatgctgctggatctaccagcaaaggcatgacttcggctgctggaaacccaaatgttggaccatctgcaaacttagctgctgctaacatgggaggaaagccatctggtgcaaatcgtggcaggggcaatcataactcgtacaataacaatcgtgggggctcatctcaaaatggcagtcatcgtggtggaggcactcaaggcagaggcaggggcagatccaacaacactagaccaacttgtcaagtttgtggcaagtatggtcatagtgctgctcattgttacaacaggtacaatgaagcttacatgggacacgaaccaggttctcaacaaaaccagcaaactggtggtcatgctgcttatttggctacacctgagattgtggacagtgacatgtggtatgctgatagtggtgccagcaatcatgtcacctctactgcatcaaatctgaaccaaaaatcagattatggtggtaaggaaaaactcacagtgggtgatggaaatcagattaatatttctcatgttggctctagctatttgcaaactaatactgatgatattcttgagctcaaagatttattacttgttccaaaaattgctaaaaaccttattagtgtgtctaaactaacagctgataataatgtgattgttgaatttcactcaaatgtgtgttttgtgaaggacaaagcaacaaggaaagtgctgctccaagggatgcttaaagatggtttgtatcagctcaacctacctcagtccaactctcctttccaacttcctaaagactcaagtaactctcatcattctcacaagttcactggtgttttgactctagaaaaacaatctgtagctcataatgagcagttagtttctcaaactgatatttggcatagacgattagggcatccttcaattaaagttttgaatcatgttttgctgtcaaacaatgtaaaaatttctagtaatgaaaaaatggttcatttctgtgatgcttgtcaatatgggaaatctcatgctcttccttttaaattgtcatccaatagagcctctaaagttcttgaaattattcatacagatctttggggccctgctcctgtcatgtccaacactaattttcaatattatattcactttattgatgactttacaaggtatacttggatttaccctttaaagcaaaagtctgatgctctacaagcttttgttcagtttaaagcttttgctgagaaacaatttgaagagtcaattaagtgtcttaggagtgatggagggggtgagtatcaagctctttcagatctgattgttgaaaatggaattgattttcaacattcttgccctcacacttcagctcaaaatgggagagctgaaagaaaacataggcatatagttgaaatgggattaactctccttgctcaagctaatatgcctctgaaattttgggttgatgcttttcaaacagctgtgtatcttataaataggttacccacacctatcttgaaccttaaaacaccttttgaagcattatttaaaagaaaacctgattatgcttttttaaaggtctttggttcagcttgttttccatgcattagaccctaccaaacacataagttccaattccactccttaaaatgtgtcaacttagggtatagtgatcatcacaaaggttataaatgtctaagctctaatggtagagtctacatctctaggaatgtcatttttaatgaaaaagaatttcctttcaaaaatggctttctaaataactactcaccagaaaaacaagctgttatacaaacctcccaatggtctcaactacctaaccttcacaaccaaaacaccatgtcaaacacagttactacaccagaaaaaaccagcagtactgctgcaacatatacatcccctggaccagcactttctgaccattcacatgaggttagtgatcacatttttgaagttgttgagcacactaatattgttggcaatactgatgtggaacagggagatatgcagcagaacattgagtgtgaaattcagcagcaggaacaacaacaaccgattcaagttcaatctcatcctatgatcacccgttcaaaggctgggatttttaagcctaaagtttatgttggacacacagattggaatccaatggaagaagagccaagaacagttgagcaagccttaaagtctaaggtctggaatcgtgccatgcaaactgaaatgggtgcactaaaagccaagaaaacttacatccttgtccctagattgcctcactacaacctggtgggtaataaatgggtatataggataaaaagaaacgctgatgggtctgtagagaagttgaaagctcgccttgtggcaaaaggctatcatcaaaggcctggtgttgatttcagtgaaacgtttagtccagtgatcaagtcccaaccatccgtgtcattcttactattgctgtgagcaaaaattgggaagtaagacagttggatataaacaacgccttcctaaatggaacgcttgaagaagacgtgtatatggtgcagccacaaggttttgaagacagcagcaaacctgactatgtatgcaaattaaacaaggcgttatacggcctaaaacaagctcctcgagcttggtttgataggctgaaacaaactctgcttagctggaagttcactaattctatggccgacacatccttgttttttaaactgactgaacaagctgccatctttgtacttatttatgttgatgacattattgtcacaggtaatgacactagtcagctgaaacagtttattactgatctgaacaggaattttgctcttaaagatcagggattgctacactttttcttaggcatagaagtgcaccgtgacacaacaggcatatatctttctcagggaaagtatgttacagatcttttggaaaaattcaacatgactaatgttaaaccttgccctactccaatggtatctggcaaacctttatcaaaggctgatggtgaaccacttcaaaatccaaccatctacagaagtatgattggagctcttcaatatctgtgtcacactagacccgatattgcatttgctgttaacaagcttagtcagtttctgcaatgcccaaccacaagtcattggagtggagccaaacgaatcatgagatacttaaaaggaactattcaccaaggtcttcatatatgcccaagtgacaggttagcaattgttggatattctgatgctgactgggcttgttgtctagatgatcgtcgatcaattgctgggtattgtgtttattttggagaaacattagttgcctggtcctcaaagaaacaagctgttgtctcaaggtcaagcacagaatctgagtatagagcccttgctcatgttgcttctgagatagcttgggttgagtctctgttaaaagaaatcagttttaaactgccatgtactccaataacctggtgtgataatcaaggagcaagtgctttggcctcaaatcctgtctaccatgctcgaactaagcatattgaattggatgtccacttcattcgtgacaaggtgctgcaaaagaaacttgaagtctgctatgtgccatcctcagatcaaatagctgattgcttaacaaaaggtctttcacattctcgattcaggtttcttattgacaaactcgggatgaa

SEQ ID NO: 193536 - DNA, 2983 bp, Cannabis indica
ggtttcattttcttaataattgagggattattactaattattttcattttctggaatcagttcattcactaatggtagtactgttgattaattcacatgtctaggcaatggcctaactataacatgtgatgttaggatatggaaatcataattgcatatgggtttttgtcaaatcacttacttaacatctgcacatgagtttctcaagctttccctttcaatatggattaagctgtccccatttttaatattctcttggtattttaatgagagcagagaaatgcttgtccattattatctaaaatatctaaaaatgtaatttaatatatcacttagtgattaatagcaatgctctattttaatagacacaagaaaaaaacaaaaaaaaaaaagtgaaaatagaatgccaataagataattggtaaacctctcttgtccactaagaaaatgcttgtgaagtgtgaactaaagagagaaccccaccacttgtattaaaaccaactcaacctcacattcatcaacaacaaaattctagaaaataacacaagagctcaaataatccatggctgaaagaaactaaacaaagaaaaggatggtaagaagaaaagaaaaacaagaatatattcaccattacaaagaagaaaaaaaaatgaaagaaaagaagaaaagattcaatctttaagtatgatattgataatggctgcagctacttcagaaaggtcatgtagaagagtgttcttctcagccaaaggagacttgtcagaacctgaaaatgtcttctcacaagcttgggcttgcttggctgcatctgatataccatagttggcaaaaccaaagtggcctccagtcaaagcatcaatgacctgaggaagactgtatttcacaactgggatatagagttcagcacagtaagcaagagatttctctaaattttcatctggggcttgcttaagcaaagctctaatgaaatttaaagtgtcacttgcttttgagagaacagtatcaaccattatgtgggcaagtcctcttagatcagaatcagagctttctgggttggatttaagggtagagacacagagatcataatggggtgtttttttacaggtttgctcaatcaaatcattgccttcatttaaaggaagaacatagcagtaatgggattggagtagaatgaaaagggtaatatggaaaagaagtagggagattgaattcttcttcattctttttcttttattggatttgaaatgaaatagtttgtgagtgatgatttttaaatggcttgaagttgggtttttatataggggtttggagatcatctttagctaagaaaaatggaaacttttttatttatataaataaaatatttttataattttgttggaagtcaaatcattaggatcacatgtttgcatttggttatagtgttgttgttgtcttttgctaggtgttcttggtctggaaaattgtttaaaaacatttctttggctctcaagaaaaagaaaaggaactcaaaagaaaatcatgtgaaacgaagaataaataaattatgtgacttttaatgggattattatggaccaaaaagaaaggacactaaagcaaaaccacaaatgtaaagaaatgaaaaactatgagctataaaaacacaaaaagggtaaaaaaagaatgcttcatttttttaatttttttatttgtgtggtcttataaaaatactgacaaaatggagtcttcaagaacacgtacggaactatttttagtgtttcaaagaatttctcttctttatttgcaaccaatctgtgttctcacacaatacaacattacccttgggcatttgcttaatcataacactaatgatatttgcacacacacctaagtcatttaaataaaaatgattatttaaaattacttgttaatgttaagtgtgtcaagtttgtgtttacacatgcggattattaaagtatctaatatgaggtgacacataagttaaatattaccattaaatattatgatgaccactgtatacacttatatatatgtaatagtaaaatttcgaagtcgatacaataatatctaactaacactttaaacttacaaagaaaagtaaaattaaggaggttttaccacaaaaaagaaaatatttgggttaagtgtataaaaattaaaatacaaggggatttcgccgcaaattactctaaaataaataagtaaaacctaatattaaattataccaataacaatattatatctcataagtgtactaaacattctgggtgccttttaacatttctattattatgtaataaaatattgatattagacatattaaattacactattaacaatatttaacatttcataggagtgttaaaagctattccacctcttagcatttaaggaatcttgtcattttaatttttttggcttggtgtttttgttttcatatggttttataatagcttctttcttatctcttattattcttattattataattgaaaagccaaaaagggttatctcttggaagatggtttggtttggtttgtttctgttaaaaatggtagagaagagagtgatgatccctttagacccatctgacatttgttgtgatgcattggattgcgtttaattctacacgcaaatgataccatatgtgatttgccaatcttcactaaaattttaccaatttttgttttctctccctttttattttggtctcatatatgtaataatacactaccacctcttgagtgttccatctgaacacacgtagcattattttgtaaataattcatataaatagttcatattatgtaagcaaacaagaaaaatactaaggcgggacctgttatttctcaggccaatgctagtaaaagctaatgaaacttcaaacgcaccctagactccattttactttaaaacaaggaaaatattttaggtaaaacagcgctctcgtgtcaactggcctaaagcagggggacaaaaacga

SEQ ID NO: 193537 - DNA, 853 bp, Cannabis indica
ccccactacgacccaccttctcaaccattaactttccaacgaagcataagttgatctgcaaaagttccatctatgccacagtactaagagttttagaaaaaaaaaaaagaatatcaggattaacctctcaaacattggcgttgagaactcgaaacgtcctattattgcccacacctagtacgttgcatgccaacacatttatattaattggctgccctccaaagcaggcaccaccaagctatcagagacaaccccactgtccaagttcttcttgataggtgccacaaaaaaactatcaaaaacttttgcatcacatacactagccgtcgcatcaccgacctcgtccaccaaaaaccccaaaaaagaaatccatccgttcctgagaaacaccactctcacaagccaatcttttagctaatttaattgaggaataagtaacataagcccaactggaccaagagatttatcctaaactttagccttagaaccattaacaaccataatactcaccttgaccttagaaatcgagcttctttttcccatcttaacaccttcaccaagtaaagaagctgatagaactctcctcttgacacacactactcaccttggccttagaaaccgagcttctttttcccatcttaacaccttcaccaagtaaagaagctggtagaactctcctcttgacacacacaaaaggcagccaattaccatacttagccttaaaaccattgatcttggtcaaacgaagttccttaagagtcgtcactgcatgcacagagaatgtaggaggagctagggtggaagaagaagcctcatctagaggcatgtgacttttaaaaagtgacctgtgatg

SEQ ID NO: 193538 - DNA, 1851 bp, Cannabis indica
ttgcaggttgttccacaagctgatagagtccttgttcgtcttgaggagcttcctgaggtatattgattactttctctctcattcttagtgccaattgttcctaagtttaataattttgaatgttaaacattgaggtgtcgtattaaattatgaaatactcatagtgtaccttgcttgctacatgatttgtgtttaattaagagggtttttattttttttttaaaaatccatattgaaatgaatggttgaaatattctcgagatggtgctttagataatctcctcattattctataagtttagaaactaataagaaattagtagaagaaaataaaaaggtggatttcaaccctgtaaaacttttagttgtgtattttcatgccactgtgttttttttttttactttttttttttgtaaggtttcatgtcactatgttagtttgccctgtagtcagtttcaaacaatattattatttttatgttttatgttattacctacagaaatatagttctgaaacctgataccattctttttggtggtttaagatgaattactagaaaatataatggctctagttctcttgctgaaacatattgctatttcttttataatataacttactatttgttataaattggtgttgtgtggcttttgagaggtatgtctatagcctataggacttttcgggagttgatgtaaacattggcgaggttaaaagtaaagaaaaatagaatgagggtgcttttcgagttagtttttgttatgctattctatatcaaatgcatcaaatgccataatatttacatatttctacattttggaaaggcttccctacgtgtatagttcaattccataaccagtcgttttttctttcaacagaaatcagctggtggagttctactgcccaaatcagctgtcaaatttgagcgttatcttatgggtgaagtaagagaaatcccaacactttgtactgttttatgaatgcgttttgacttattatattttgtttttcaggttgagtatagtatacttagtttgtaaagtaaatatttgatttttatgataaaattgaaacgtaaacttcttttttattagatatacgaaatcaaatactcaaacccattaatatatctctggtctcaagtctcattaatagttcaataagcaaatctttctttctcctagcaaagctcgaatagcatgtctctaaagggacctcctgccatgggtttctcttgtctttgtggagtacaaaagctttaaggatctctagaaataaataagtatcttagagtatttttgacgatcattgttgcaattgtctcaggttctttctgttggtagtgacgttggggaagtgaaagctggtttgaaggtgagtatttaaaacattaaccagtgtgataaattcctatactgaagagtattggctcaaattttgatggagtgaatggttgttcttatgcaggttcttttctcagacataaatgcttttgaggtaaatagtactaattacttaaagaaattgaagctttcaaatggtgtcctttatagttcaagttcaagacatcattactgttttcttactatgatttctgtcatttttagtattaaatcaaaagcaatatcttagatgaggttattttagctgcaatcccaagtgtctaaatattgctatattcccataccaatgaatagctacaagctcaataaattctgaagattatgaatttcaacacgtataagtattcaaaaattgtgtatccttagacaaagtatacacacttgcatatccaagtgaaatatagtcaagtagactcagtgaaatttagctcttgctaataatagatt

SEQ ID NO: 193539 - DNA, 629 bp, Cannabis indica
cagaataacttgctgaagacatagagattaatcaaaatacgcttcacggaattaaggttaactacaacatatatagacgtgtatatgtaaatctatatttgcattaatgttacaagagagagtaaaaacctttttaaacgtgcgaggtagaagttccaccaactgcaattatatatgataaacaaatggctatagcaaatgaaccaaattccgttattgatgttttaaaatcaatccagaaaagaagttaaagtacatagcattctgaagtctgacagtaaaatccgaattttgatatgtactaaattgtaactcccaaattaaatcgtgtagcttgaactttcatccacatcacttccattggtaaaattgaacgtaagtccttaaatccagtaatctttaatactcgagataatttttaacggccgaccaaattcttaattaacctataaaaaaaataggataatatgtacaaattagtgattaaacacatatctcccaaaacacttcccataacacaagaatactaaaacttcatccactaagtgtccccttcgttccacttctctctccaacaaaactacattagctcttaatgaatgaaatcaacgaaaatcataaataggtta

SEQ ID NO: 193540 - DNA, 2779 bp, Cannabis indica
atgttgtgttggagtaaaatataccaaacacttgtcaaaccattggtttagaataaataaaatgacatttaaaatagaaatttattagaaaaataagaatgaaaagtatagtaaggtcacaaattcttgtcctttaatttattttgctagctattttattttgaataatttggaaagacatagcaaaatgaaactctctatttaagcaaggtccattttagatggtttaaagtttaatggcattttgtggccaaaagtcaatgtagtgtttcttagtggaggttttaatcctctctttgattgttttcttcttattttgacatgtgttgctttagttatcaatcaaattaaggatatttattcaaacttttctagaaaacacttatttattacataagataaattggaccatatgtatttatacaacccataatttaatttgattcattcaaaaaaaaaaaaataagtaaagaaaatgttgcattgatcaatcttcaaaatattcataaaaaacacaaacatttcaaataaatacagagtttcttaacttaacaacatagtacaataattaaaagcctaatgtaaaaaaaaattatacatatttatacaaacataaccaattatataaaaattgaaactttaaatctaaaatttcagggccaattcaaacaagggtcctaatttaggcaagtaacaagaaccaacaaaaaaaaaatcaaaactgaagaatgagattatgagaactcaatttgatgcagtgcattatagtttctgttctcaaaagttataaatgctatcaaactactcttttgtgcaattaagctacaacaacaaatggaaaaatcaatactttgcaaacctcaatagaccatacttttttcatatgaacaatcaatcacactctaaattttatttgatcacacacacagctcgcctttttctaatgcctcgcgcagcagtcatgcttctggtttctgcaaattcttcataggtcctgaaaaaaaaaacaacgaatttcaatgttattagataaagaattctcaaatttataccacatgtcatggagaaaaagatcaaaactaatcaatttcaactagaaactaagaccatgtttgatttggccaatgataatagtaatgaaatcaccatatcacaactccattatttggtttggttttgaaaacattataatacttttacaatgtaatcaccagctctacacttatataatcaccattacactatctatataaaaataaaattactcttatacccttctctagttatcattcaaaaaatacgctaaatatcataataccattcccattactattctgattacaatcaattactattactattccattgcaacgaaccaaacaccatctaaactataaactagtacttgtagtaatgtaagaatgagaaactttggttgatcagtttgtgcttttccataacaaatgcctaaatagagagctatgatgttgataaaaaaacaaagacaagttttcagataaagctagctactattagagaagtgtgtaacctgattatttgaagattgttcatggaacttatgaggcttcatatttaaatcaatcattttattgtcacgtttagtgtgagtgtgtccatcagcattggcctcttgtaaccgcacaggagaaactctattatgattttgctgctgttgattctcttcacctgtcattttagaacaaggctgctgatgattctgtcctctccgagctgcttcgacttgatcgctacccgggtttgaaccaggttcctcaacattaccagcaccaggcttatctcctggaaactattcaatgaaacaagtaaaagagtaaacttttacaacaccatttcttacataaatatttcatacattttcttacttggggcagaaagagaatattattagttgtcattgagaaaaagtgaacaaacctcaactctctgcctcaataagagatatcttccatgtgttcttttaccaccaacatgaacaatcatatcacattgtaaacaaagggaacttccatctatttcgcagtagaaaaaagctacatataattttcacagaaaaacagtcaatgaaagagccttttatataaagaatatacatattatataatatgattagagcccataccaggtgcattttcacaaatgtcacacctaggaacttcactgggatttgctaagccaactctcacatgtcgactagcaagtttgttgcacatgtgtacctacaaaaattgaccccaaattattagattcaaaccagctttaattaaaagggcatcaaagaaattaacacaacacacaaaaaaagagctaaagactgaaactttaacaataatttgctgagactaaataaaactaagaaacaaatatatgatgggaagattcaattaaacaaaattcacttccaaaaataattttcttttataaaaaggggttctttagattttgatgaatgaaatgaataaatgataaaaattcaaacttttcaaaaaaaaaaaaaaaaaaaaaaaaccttttaacatcgcaggaacggcaaagggcagcctcgtcagcagcgcaaaacacgattgcggcggcgctttcacaggcgtcacaaagtgttcgcataattaatattaccaccttctaataatctcatctctctaactcataaccccataaaaacacctccataataatccaatccaagggatactaaaaataaagagctttaaagccacaacatcaaaacgacaaattgaag

SEQ ID NO: 193541 - DNA, 2479 bp, Cannabis indica
gattttctatcattaaaagaggaaaaaaagactttcaacatatgcttaagattataaattgaatgatacaacctttagtagaacagaagataaaaaacctgaagcaaattgagaagttgacgctttgagatcatcaagagtgaaccatttgtagccacgtgagttggtgagaagaagattttgcaacccttctggtatttcactaaaatcagataatttgatactattattagtgtcattatcaaagtcattgagctctccttccatgttgggattctctactattgttggacaatgtaaatattgcattggagaccgatctggtaagctcatcacccaatgaaccactgagatgttccttgcctttggggtatgtggggcccctgaaattgattttctaagcaaaggccaaccaagcttttggtccatagaaaaagaatcggttgaaagaagagaatctgatcttgaaaggcttcttctcttctcttgatggcttattagactgaatgagtcagtactcctagtcgtttcacaaaaggataccacagtttccgtctccgcttcagagtcgccaaattcagacacagtttcttttgttgtaaaaggacttggtttaagttctttccgatcattcgtcgcagtgtctataaaataaaatcagaaaacagaaatttatttattttcttcaagataattaatgcatcaaatggggtcctttttttttttctttctatttattattttcttgggaaacaaacaccaaacctgaaagtttagtgatggggcaccttctgaagagaactttcccattgtgaatagccaggacttctgtggttgaagatagcctcttggcacaatatttggctgtggaaatcctactcctgcagacaaaatctatttagaataatcagaaagaaaccaaactaaagtttggaagtatataaataaacttatatatgtctcttttttttcatttggactatatttaacttctgaacctacctaatattgcttcgtttacttatgcccaaaaccagagcttcaacaccatgactgattgcctctctcaccagagcccttctggctgaacttccagttaatatctgaccagtaagtgccacctaacaaatttaatcacaaaaaaacaaaacatccaaagtcaaaataaaaatgaaattcctaaccaagaaaaacaaaaacctgttggacaaaattcagttttgtaacaaaaacagaaccttttttacactacataaaccttgatacacttccaggtaatcatctaaagaaggtttctttttcaaagcttcatctgcaatactagaggaaaattttatcaataacaacatttaaatttctgtacaactatataattaatagagatttttacatataaagataatagctattgacctgaatttctacagacatgaatagcaacaacagaatctccaggctcagcaaccttcacaagagcccagctgagaatctctctgctatggctatcaattcgaataccaaccaaaacaattctctccttttttgtattatgaagaacagtcaaaaactcctcaaacacagtcatggtagtaagatagtcgatcagtctctttctcttgtacaattttcaaagtttgtacaagctaaactctcttcttccttgactatgagtcattactgctcctgtaataataataacaaagatatcaaacgtggaaatgatagaaaggtggaacacaaagagtgtgaatatgaagttgccactgtcactataaaatggtgtccttcttatttaaaataatcatttatttttatcctctttctagagtatttaatgcaattaaatatgatggaaaaattagcataaatagaaaaagataaaagtgacccgacaaatgaaatggtacctaaaacttggtttggttccatctgttgttgaagcccccaccatgacaatgcccttttcaaatacagaaataccgccaaataacatcaccttccatacctactgcaactctgctattcaatactaaaataatgaaaaataaaataaaataacaaaagaatttgcaaattttaataattcttcttttttgatttgaaagtgtttaaatgaagaattattattaataaacgttttgtttttttgttggaaatatggtcagaagaaagtgtcggtagaaggctgaaatccccccaacgagacggcactatttcttttatttgttttttttttatttttttttttatataaaatttgtttatttatttggtggatgagatcattcttcttctttgttctgtttctttggaatgtgattttttttgggtgaaaatgtgttagttaaagtgtagagataaattgaaaggagtccgttaaagtcaccggcaaatactgcgggaaacccccgatacccggtcgctctaggtgaaccgacgtaacaggagaatggcttttccaacggccattgcgggtgca

SEQ ID NO: 193542 - DNA, 2077 bp, Cannabis indica
aaatacctgaccacttaggttatttgcctttagatatgattggctgctcacaaatgaaggtatatgcagcattcctcacaggattttaaaagtgcaaaaagaaaagtcaaaaaaaaaggaaattattaattattttttcttacaaaataatcgttatatttaataaaggaaaaggaaagaaatgtattaaaaaaaaggaaaggaaagaaggggacccacagaagagagagaaaattgtattgtagtttagtagggtggggttcgcgtaaggagtctccctctcgagcttcgaccttgtttcctctccttcactttccctttgctataaattgagagtgtccgttacttcctattctctcccaaacaaacccttacagcatatgtctcaaaggtctaacgttcctcactcttccaccatagctttcggtctccattctcatctcctggtctccagtgagatgaaccctaattcctactggtcttcctgatccatctactttccccaatatttcttctcattctttttattattctttaaataaacacaaaacaattataaatattaattcttgttacccattcttttgtattcaccttaaagcctcaatttttttttattcgattcttgagaaaaatcaaattactcaacaatgggtgtcaaaggatttgttgaaggaggcatagcttcgatcgttgccggctgttcaacccacccaatcgacctcgtcaaggtccgtatgcagctccagggcgagtccgtcacccccaacccggcggcggttcaaaatctccgaccggctctttcttttcaccccaactcagctgctggatccgtccgtatcccaactccgcctcccgcgccgccggtgcgcgtcggcccaatcgccgtcggagttcgcattgtgcagcaagaaggaatggcgggtttgttctctggtgtctccgctactgttctcaggcagactctctactccaccacacgtatgggtctgtacgatattttgaagcagaagtggaccgatcccaacacggggaacatgcccttgacccggaaaatcacggctggtcttatagccggcgcgatcggagctgccgttggaaacccagctgatgtggcgatggtcgtatgcaagccgacggtcggcttcccatggctcagcgccgtaactacacgagcgtggtcgatgctctgacgcggatgtcgcgccaggaagggattcggagcttgtggcgcggctcgtcgatgacgatcaaccgagccatgctcgtgacggcttcgcagctggcttcgtacgaccagatcaaggagacgattctagaaaaaggggtcatgaaagacgggctcgggacccacgtgacggcgagctttgcagcggggtttgtggcatcggttgcgtcaaacccagttgacgttatcaaaaccagagtcatgaacatgaaggtggagcccggatcgcctccgccgtacaacggagccattgactgtgctctcaaaacggtgcgttcagagggtccctttgctctctacaaagggtttttgccaacgatctcgaggcaaggacctttcactgtgatgctgttcgtgacattggagcaggttcgaaagttgctcaaggatttctgattagaatgatgatgacgacaattaagactattaattaatattattattatttactattgatattattgtattagtaattaagtttaatcctcctggagtttggggatggaatttagaagatattagaaagaaaaaaaaaccattgaagatgtgttaaacgtggtgttatcaatttggataatgatataataaattttttgggataaatctctttgtgttgtgtcttgtttgtaatatttagctttgaatgaaatcacgggtgaaaaaaaaagaacatgaatttggtttagtcttaacacttttgatattaatgtgaatagtgagtacttggtggtgtgggtggcataagagtgaagcattgcaggaaaattattgtgcgacaactatgactttggtcttgaaataatgcattaaaaagattatgactttgtttacaactttgaaatttcgatt

SEQ ID NO: 193543 - DNA, 1717 bp, Cannabis indica
aaaaaaaaaaaatacaaaagaatgttaagaaaaataagtacaaattatgtgattgaatatttgagctaattattattaggtaattgtatgtatgaattggatttgcattttctcgagaaagtaaaccaagttcattgcctactaatctgtaattgataagggtgctttaatcttatgtgattttcagatgaagagacagggtggtatgatggtcaggtatgaatcacatcatcaaactatatatgttttgtcatttgagttgaacacactactgtatgctttgtttggatccaaatctcttaattctcatttcttattgttctcctcatgtccttacactcattaactgaggcgaaatttgaattcgataatgtcgatcgagtttgtttagcaatgtctttctttttgagtggtattgattggcatcctaagttgatttgctgttgtaaattatgtgattttgaaccaagagagagatgacaaatcaaattaagtgctctcccaataaaacaataaagcttttgttactatcttttattctaatgaatgtattgagactatttctggtgcaaaatatgtcaaatctcttatttttgtggcaaattgtctatattatgtagttgttttcacttatcggtgatgagaatttaatccaaattgaccaaattggtttgattggattagatgaacaccttaatagatgttgattatagttcggggttaatacttcttggcatttttgtgaaagcttaaaattcaattttactggcagatgtgggttaagactgctgaagttctcgcacgcgatcggctgctcggttcattctctgtaagtctaattttttccttaattcacatgctattagtttgatttaaatacaaccaaagaaaaccaattagattaggtagaattttctgaagtgatttagtactttctttgtatccaaacaaaaaaacaggtgaagcctgtgctgagtagattgaagtacacactagttggtttgggattatcattgttagtctgcattatgtttctggtcaacattgatgagactactcaaactaaaataatgaagatgatgagatgagagtcatacatggagtctataatgatgattcagccaggtcttttgagccagatgctttctatggtgaaccacctcctctcccttaatatacatacatctctatatataactgtatatgtgtatatatatatataaaaatgctgttactacaatatgaggaaattaatatttatataatatggtgattgaaagaattaatcactctttggctattcttaatttttgtttttgtttagctctttggcaattgaaacttgtatggattttcttaatataattacatatttgtaatgactaattggttttactgtaacaaattttgaaacttttattattaagggagatcaaataatattaaaaaaatatatgtatttcaaatagaaaagttatcatggccaaataaaaatttatttattaattgaaaaaaaagtttctatattaatgtattattattgggtgaatgatataacaaaagtaccatcagttatttttttttttttaagttaaaatcataaaattcgtaaacatatttaaaatttcacacaatatttttgtaatttttttttttattatttttatgtagttgtgaaataaagttactatatcaaaattatttccacacttgatac

SEQ ID NO: 193544 - DNA, 1514 bp, Cannabis indica
ttcaattactttaacatcagaacttattattactattcttaatcaaagaacaaaagaaataataataaagaaaaattcaccatcaaatcatataccctttctctccacaaccacattggttaactattttttagagtcaataagacgataagatgagctcgtgatgatatactttaaacttgctttaactctatggtcgttaataatatgcttgcttatgtaggattcaactaaaccagggcttgattattgcctatggaggtggatccaacaacaaaatatcaaaggaaaccaacaaagaaaaccacttaatttctattagttttttcttttcttttctcttttttttggcccatctctatcaaacaagagaaactatattcaaggttctattttaagtaagtattaaagtatcacagaagaaaatattccttcacgaaattaattaaaggcaaatttacacatactaactaactatatgtaagcacacacaacttttataatctttttattattttggctgaataagaaactttctgttttgtaatattaaaataatggccgacccattatggcggtgggtaattcctacatgaagataggatccatataagactatatatcctattaagtatgtataagagagatagagagagacttggttggattgtttttatcattttgttatgtgttggagtatggattccccaagtgggaagtgggcccaaaatggggctttgtctggtgggtttgggggcacttcacgccctttcatgccccatcgtatgctctttactagaccaatattagtcaggaccacactcctcaaccttacctcaaccccctcttctatataaactccttctttcttaattctcaataacaaacttatcatttgcatttgcaattgcaatagctcctcactactcaaacaacaaagtactactacatttcaaaataacaatgaagatgactagttcagccaccatgggaggatccaagagaagattatcaagcagaggacttggaggagcccttagggaacaaagagcaagactttacatcattaggaggtgtgttgtcatgcttttatgctggcatgattaaatacaaactccttcttaattagtctcaaaaaagaaaaaaaaatctgatgcataaggcaaagaaggattaattctctgagttttcacttctttttgtgtttttttttccttctcttcctttttttgggggggtgttaagtgtaaatagagattgcagatactatgggatgggaaagaagtaaaaggaaatttttgtatgggatcatcagcaactagatgtacatcgaatagtggatttattaaaatctccatatttatattatttttagctataattatatatatggttaattcttgatgttaaatcatctttacgtttatgtgtttaattttgctattgtcaaaattatgtaaaactcagatttcaaatattgagattccatctctctctctcacacactctctctt

SEQ ID NO: 193545 - DNA, 1312 bp, Cannabis indica
ccggaaagttcacaaaccttcaaagattgttcgaaatttcgtcccattagtctctgttcagtcatttacaaagtgatttcgatgtgtcttgctagccgaatgaagaggagtcttaattttgcaatattgaaaaatctaagtgcctttattggtggtcgtaccaatcacgataatgctatccttggatatgagggccttcacagtatgagaaaagggccatttggtaatggatcaaaaatggcaatgaaacttgatatgtcaaaagcttatgacagtgtggaatgggactttcttgaagtaatgatgtcatgtttggggtatgaagatgcatggattttgaaggtcatgaattgtgttcactctatttcattttccattcttattaatggattggttaggggaaattttaatcccgaaagggatttacgccaaggcgatcccctatcacccttcctctttctcctttgctctgaagggttatcttgtttaatccacgaggctgaaagggcagggagaatccatgggctaaaattttgtttaatggaacaacggctgtctcatctcctatttgcggatgacagtcttgtttttctagaggccaatttagaggaagggtgtgccttacaagaagtgttgggatgttatgctaagttattcggtcaatgtataaatcttgataaatcagacctgtgcgtgggctgaaagataagagaggataaggcagaggagttgtctggccaacttggggtaaaattggttaaacatcacactaagtacctgggtatgcctacctttttcggaaaaaaataggtctttggaaaacttagggatcgggttgaggctaagcttcaatgttggaagatgggcctcttttctgaagcgggaaaaaaaagttttaatcaaggttgtgatccaagtgcttccttgttacgtgatgagctattttcaaatcactaaagtgatcgttcatgatattgagagagtttggttgctcgcttttggtggggctcttcttcaaaaaaacacaagcttcattgggggaattggagaaaattatgtaagatgaaagaacattgttgcatcgggctccatgatttagaagactttaatcaagcactcttagctaaataaggttggaagttaatctccatgtcctagtgtcttttagctcgggtgatgaaagcgctctactatcctaatggtaatttctttgaggctaaattgggtcattatggtttggttatatggaggggcatcttatggggtagggagctcttgatcaaaggctctcggtggtgtgtgggcgatggtc

SEQ ID NO: 193546 - DNA, 1406 bp, Cannabis indica
cacctttttttacccgaacaattactctcgatcattaataaactaaaaaaaaataaggaactaaattttaaataaaattaatatatatacgttgagtatatgttgagtagtgagtagtactagtcaagtagactctttcttcagaaacttgaatctcctctcagtcaaaaactagtggcggactccatttgaatcctaatcattattttatatgtaaacttatttaaataagtttttgtccttttttttctaagacgtacgaatgttccccctcacttctatgtggtcactttcatatctatatatatatatatatgcattaatatcttcattcttcatatcatcaaatcaattagtttcacttaatattgaatctttttttcttcatcaatctccaaatatgagttgtgctcagccatcagttggatgttattccgcgggagaagacccatatgtggctccaccaccggttggttaccccaccatggacgcctctgccgctgttggccaacccgaaaacagagttgaaaccaaatctaagggagatgaagatgatgcctggttggaagcatcaaggtaacaacaaacatcttaatcaaatcctacgtacatacatatatactgagactgagactgattatatttgatgtgtgattatgcagttggacttcgaaatgttgctgtgctatgttggaatgcatctctcgaataacagcatgactcttcttattctaatggatatggttaattatttaccactatttgtgttatatatttgatcattcaatatgtatgatcacatattgtatcagctttgattgttttatatattgaataatactacattcaatagttctgcttttcaatttttacttaaattataattgcttcaaggcccaataactcaatcaaatggccaattatgtcattatatttactagtgggattgcacaactattttagaaatgatatggcagccattatgcctaatacccttgtgagttataatattacttaatattgggttattttttactttaataaatattataaaaaattactgactaattataaagcgacactttatcgtagtattcagcacgtgaatgtctcatagcaatgctcattttaaaaagtaataaattagtattttggtctcttaaacttataacactactaaattatacctctaaaacatatatcatcttaaaaaaaaaaattaatctaacccttctatttatataaatataatattttggttagcattcatttctttttatattctttaaaaattagtatatgatattattaattagtatggcttttgtctcgacattatctacttttaaatcatactttctcttaaaagagaaaataaaaattaattaatttttataattttttat

SEQ ID NO: 193547 - DNA, 1006 bp, Cannabis indica
gatagagaattcatacaacaaatcacaaattttcatgtaaattttcaggactttagacatcatttttcatttgttatatcaattcatgtcaaagactcgagaattcaacctagatgaatggctccttttcgaaaatagattatgctaatcatgacagtaaaagtttgatgttggagctttctttaattataataatccattaataaatacattgcctactattgttatttgtgaatttagtataacaacattccagttcaaacttgtaaggtattattgcatatgaataaactcttagaacatggtaatcttgtaaggtatgtcaaaagggttaacactgagttgtctagactggtccttcatattccaaacatcgatttttgtaaggacattatcccacaaatagattcacagtacattaagattgaaggtatttactcacttatattattactgctcaaattctgcacttgagtcaatgtcttgtgatcaaaaatactaaagaaacagttaaaaaaaacagattatggtttcggagtttatgttttgcatatatcttttttatagtattgctgcccattctgatcaaatactgatatatttatgtatacataattgtttcttctagagttgttacaggtagactttagagtttagttttgggatctttttcaacttaaggtatatggatacaagaattggggaaaggacaaagttatgatcgaatttcgaaacttcatgatgaggttatcttttacatccttttgtttctccctattggagatgtgtttcggacatttgctctttcaaagcgttaaaaaacttattttgtattcacttcccatgttttacttttctgataaaaaatattcagaagaacaattcttcaattttgtcgaaaagtgtttggataactgcaaaaatggtatggtcgattctaacataactagttgactaaattggagttgaacactgtcgagttgaatacttcttgttcatttagttt

SEQ ID NO: 193548 - DNA, 2124 bp, Cannabis indica
gcacagagaggataacagagcacttgaatatgataactggttatatttacaagaactaggcatttcagcacaagtaattaaaatggactctaccagtctaaatgtagctacaaagatgagatcattacatacataaaagtatgtgtagataataataataataataataataataataataatgataataaagatatatagcagccccaacatcaactaaagaaacaagaaaaaagaaaaaaaaaaaaaaacccaacttttcagcagcagcaaatactgggttggattctttccagtcccttattataccctacttcaaaaaaaaaaaaaaagaaaaacattagacagcttaaactctagaaaataaagtttgaagaacctggtttctccaaagtattaagatgagcctcccacttaattaccctgcagttacccaaattactgaagcagtaaaagtcttgtgatattgttctggtttcagaggtaccagagggagacatcctgctttggcagtgagtccacagcaaattcaactggtgccatgttaaatggagaagaaaatcttaagtctgcaatattatcattgggattattgtcgaatggagaatcgaacgccttgcactgatcaaactgaacctctgcggatgggaaaaccacttgttgtgatgagatattatttgcttgctcagacatgtttcctcccataacaccctggctgaagaagctatcatccatctgaaattggtatttttgttgtggttgagtatggttctccatgttggtgggaacagaatggttcccaggattcaaacctttgttcctctgctgtgcatttgtgtcataaagtgacataaggtcagagatcatcttctgcccatcttccggaatatcaaggccagtgaaaggagatgattggtttatttgttgaggagccaatggtggcttaggttgggaaaatggtaaggagaagacagctggtttatcgttgttaatctgaaagcttggcattccaaaagtttgctgagaagcttgagaagaattgggacggtatgcacaattcatctggtgattgtttctggaggtcctatcgagaaagccaagacggtaatcatgatatggacactgagagtactcacaggtgaatatcttctgatccatcatcatctgtggctcatcacccacttgcttcctcttttgaacaaaatcagggttggtttcaatgatttctcccttaattcgagaagccacttgaggcataagaatcctatcccttgaaggaacaatagtcccgatgttgaagcgaccaatatcacggggcttgcattcctccacttcaaaattaggttcatcatccacaccatcaacatcataatcactggtctcactgattacaagagacccattcccagtagctgacataggtggacatttatcaggatacagctttcgggccaaagcttcctcctggtttataatggccaaccaagttgcactctccttagcagtcattttgtcctgcaagcatttggattgacgaacaagcttgcgaatctttgcaatgtcaggagacatgtgcttgatcacagctgtgaggacactaaccttccaagccttttttaagtcatgaggtttcttataaggtggaggcccctgatccttaggcatacccaattgaggccaccactcctcactaccagtaggccaccatggtggggcaatacccttttccaatgggaaacgcctttggggtggatcacagtgctgcatcaaagcagacaagagcgagccaagagtagtgtcttgaagctcctgcagggtatgaggagtcgacgccatggtactgcagtcctcattctgaccagggatggagtgttctgcctggtacctagcaattgcagctggaccattccgatcaaatctaaccttttctttccaccaagcacggagattgtcagaagcaccagtcacaggctttcccttctcaggaataataccatacacaaaaccttgagctttacaaacctccatcatttttagcatgtacttcaagatcccatcttgtgctctagacatcttcttcctccgcgcttgctcctgggattgacgctgctttgcattgtcaac

SEQ ID NO: 193549 - DNA, 1098 bp, Cannabis indica
ggaaaagcaagcaagctttggaggatggtcatagcagtgggccctaccacgtacctgtccaggaaacacggctctcttttgtgggacccactcattcattcatttatttaaatgaactaattatttctaataattttattgaaaaattaattatgtatttcaactccaaacattgagaactaactactcaattttcttgcatataccaccactaacttattataatttcacttattaatattaatattatttcttagcaaaataataatagtaataataatattacttaactaagaatacccttttaaaaaaaatcgaaaatagtcggataagatttaaatatttagttgcacgtaatattttgtaaaacgtgcatatagtgttggttcgattcattttttgagcttttaaaaataaagattatgccggactataaaaaaatataggtcgtgctataaaaaattataggtcgtatcgtgccgtactaataatttatagggtaggcccatcatggccccacaaacccgataatttcgtaccgtgttcaaattcgtgtcgtactttattcagattggtccatttttcttaagcagaccaatttattttcttataggggcttaaattcgtgcgccatatttttatatttttattacaattgattgactaattattaaaatatatgtgtatattatagttttaattatttttatataattttttaacaataattacacacaatcatctaaaaaataattataattattaaaatttgaatattactatccttttaattgataactaaatatttatcattgctattattatcaacaatttatcaagttttttaatgtggcgtgctttcaaactaaactgtttgtatttacgtgtcatgctttcaggcttgtcttatcatgtcgtgcttaagctcaaatttttcgtaacatgtcgtgccaattcgtaaaaccgtgctatatcgtgcctaagcctgtatttttttatgttatgtcaaactgaaacacatattttttcgtattgagtcctgctcgtacctctcgtatcgtgtcaaaaaatccagcccacatttagagcactagttgc

SEQ ID NO: 193550 - DNA, 1365 bp, Cannabis indica
caagtaaactcttgttgtagattatcatatcagtaaaaccctgtgtctgataaatctaggaaactttattcacatagtcatgtttactttccaatgtgatgacaacacaataaacaggatcaagtatgtgaaaagggtttaagatgaatttataaatcaaatagacaagcaattgataaagtgaaccaaaacatacacaaatgaatgaaaaatacttctgtttctttattgatgttgaataaaatagattacattgaaatggagttttatttagggcataaaaactaacagtttcgtgacttccataatgcccaacagatcaatgatagcacaacatgagacatcatcatcatatttattaaaacatagactcgagccaatttcctattgttgatgatgtatccgagagtgtgatcaatccgcattttgtccaacagctaattgcaaaagaacaacttaagaaagcatgtgagactgtttctgcagcagcttggcagacgggacacaatgacgataagtcaatgtgttttgacacaagttcaaggcaagtgggaagggtattagtgacaaccctccacatgaaattcttaacttttggggggatttttaggtgccaaaacttttgccaaaaccctgagttatcatgtacctgctgcccgtgtttactctactgtagcagctcataagcgcttcgaacagagaagcagccggtcttctccccagaccaggaccagcagtcttcggttgctgtattgctgagaggaatgccgaggattaatgttgcatcatggtgattgaacatgtcagtgataagtgagtaatcccagcttctagcatgaatatcgaagagagaattcaccattttattttcaagtccaattgtaccagatgtaacatacggattggagggatcgggcaactaatgatgcttcaggatgtttgttgtaacaccattaccaactgttctgcaacttccaagcttaaccaaattttgtgcgctctatatgcttcgccaaacaaactaggattgttgcctaattctacattgattaagtcagttaaagcttattacttaagtgtagcaaatatatatatatatatatataaacaaaaataaaaataccaaaaataatgtgagtatgataacaatatacagtaagagatgtggtcataaatatagtcttataagcttacatttttcttcatataaaggaggttcaaattctaatccatttcctatatataaaaaaaaaaatccattcttatataaaaaaaaagtgaattaataaaacataataaatttcaaaaggagatttcatgttcgaatctcccctctcctttattataaaaagtaataaataatat

SEQ ID NO: 193551 - DNA, 1117 bp, Cannabis indica
tgttccagatctccgaggtaaatgctttttttgcctaagtttgttgcggatgattgactatgtgtttgagtttcaatatagaatatcacttgtcaggtgataacaagctcataataaaagaactataacttgctttagatcttggtcatggactagtctatgtaaacttttattttaggctccttaagtctgaagtatcttgagctctttttacttaaaactgccatttcagcttttttctttgtttttagatcgttatgacaagattccgacttctatcgaatcaaagctcttgccatttcaaagagatggtgttaggtatgtactagttatctgagatctttcctcttcaatccaaaccattggttacatgtgacatcaagagaaactcaatatgtttttaaaatatttatttgttagtttctttttaataacatggaagcttaagttctttcttctaattccttatctcgctcttttcaggtttatattgcagcatggaggccgagttctccttgcagatgaaatgggattaggaaagactttacaggtaaattgttcttcatgaagactctttccatacctgcaatttatcatcccttgtttgaagaaatatcttatactgattgtagcctaaatgatttccttttattgatttgttaataacatgaaacaaaatatgtgaattttaacagcaatcagacgaataagaagagttgaaagcctaatagattgcattatttaagcagcacacttgctcatgtattttttgtaggctattgctgtagcttcatgcgtacgtgagtcttggcctgtactaatactgaccccctcttccttacggttgcattgggcttcagtaagtatctttctcaattttgcagtcagtaattgtgagggatagttgcctaagatgaatatactaatcggccttttctacagacaattcaacaatggctgaatattccatcatcagatatacttgtaggcaacctgtcattcctctattattattattattcttttatttcattttcatgtcattttgtattaggaacttgatatattgtgttatgttgtattaacaatcccaaaaaagtctgttatcaggttgttt

SEQ ID NO: 193552 - DNA, 1425 bp, Cannabis indica
aaaaagaagaaagctacatttttattcaagtcagttttctttcggtcctcaagcttttctgtaacttgaggcaaatccaaatccatgtccactccaaacttctgagactggtctacatcaatcaaagacatatatctctgcgcttcatctggatctttaacgaaacccttggtatgctcaattccatccgggagcacatacgtacacttaaagaggttctcttttccagatttccttcaaaacccaagaaaaatatataataaaaacaatcaaagtcatccaaattattcccaacaaaaacctagatatgaaaaagttacatacttggcgatccgaaggtcccgagagacatccatggaaacaaagcagagcttctctttcacatcgtccattagaaaagtctcatccataacattaatagatcgatacgaaacgagctctttcaggtaattggtcaaggctttcccacccaaatcgatgcgtttagcagcgtagttaattgtgaaattctgaaacaccggagcggcgtgagtaaacgagaagccacaatcaacgacaaggctacattgggccctggagatgaggctcgtgggccggcggcgactagcctcgtagagatgggtcagagaaggggaatcggcgacgtagagagcggagaagttgaaatcttcgaagacaagctcgtcggtggtgcgttgaatagaagggagtgtgaagaggggttcagtgaggaggagtgaggactgagacggggacacgtggaggagagaggagaagaggtgggcccagatgtcgcgttggaggtctgggtttatgaggtagccacggtcgatggggcggcggactggggcggaggtgaggtcgatggggtcggcggtggcagtggtggtggtgattggagagggatgaatccattttttggaggagagtgggcggtagaggcagttgggaatgatcgtagacgggtcacggtcgccgccgaggcccgccttgattagacccccgccgttgtctaaaaccacgatgttctgctgcatgtcgcggtgttgactctgtgagtgagcgagtttcagttcccgctaaatctcggtacttctccaactttatcgaaggggttttacacataaagaaaaaaataaaattgtcgttttccatcattgttgtagttttctagttatattaattatatttaacactatacatgtcgttcattatttttttttttctttgaagaactttgctaaaagcagaattcgatacccagctttgttctacccacaaagagaaagtttggtctcatttccaagctataagggccagttgataaaaatgtgtttgataaatagtaaaaaaaaaatagtttatttacggagaagctacagccaaaagttaaaattagtacaaacttaatttttttttaaaaaa

SEQ ID NO: 193553 - DNA, 1807 bp, Cannabis indica
ggcttccttcaggggagagagtttggatatatcacctggattttcaatatccttgtcgaaacaatatgctggctgggtaattggaggcccttacttttcggttcctgggaagtgtcatttacttcgacttggcttgggatgggatgaaggaggatgccatcagaagcattccttttccttgggcctgaagagtgttcataaaccctgaagtcttcaatttctaaaatcggattgaagagagtgggctccctatgaaacttgtcaacagttagtgagcccataaacaactctcttcctttggggtggccccataattgtttagagggtgaagcaacccaacgggcctgggtaccaagaggggagtccaaataagaagggcccatatccatactaacctttttggatttagagtccattaacagggggcatatatcctttttcaacattcccacatgttcagagttctgagacgtatccttcccctttgagttaggagttggagggctttccttagtacagtttctgtcctcccccaactcggcaactaagttggtgtccatggagttgtcgttgttacgcgtgccagctgatgaagcacttgggtcaggtatctctctctctggcaggattgctattttggaattacctccaaatggggcaaattctccaatacccggcagattaaccaaaggtaactggataataactttctgattagttgcctcctcgggtggattctcggtgtcttctacaattcttcttttcgccggaagttgtagacggctttctcgaagttcagcagactcgccatgttggatggccttgtgaaccttcatttgatttctgagcattgggtcacgggccaactgcttttgaagagcccaatcctgaaaccattttgccaatggcgtcgtgaaggtcgatttctcttgagcgtcgctcttgagccaaaccccaaacatgggatagaagttgccgtctacgtccttaaccaccgtagggggcttaaagcaggagttttggtcatgagtcataatcccacacttaaagcaaagtttagggagcttctcataccgatattgaatccagaggtccttaagtttttgacgcctgaggaagaacccagaaaatatgggtttgttgagatcaatcgtagccctgaaccgaagggtactcaatcccactgcatcttctatgccgttaggtagttcaaaaacaggggatgctttagtggccatttccttcagattggataaattccaataaaacggtggaatgctttccacattcacccaaatgggcgttttgtcgaatcgaacttcagctggagtcagccaagaaggccaaggcattatgacaataagggaaccgcaaacaaaccaagggcgtcttgccagaacattcaacgcatcgtccctgtttgtgaaggtgaattgtattagcccgccttcaatctctttccatttccagcgtttgatggaatgccatgataactttaaagagccctgtattgccgattttcctaacttatatctactaatgattttcccaagcagcaccaggtttgactcttggggttcatctacttccccagggtttagactgaacgtgatatcgctttgggatatttgcactgcctcttcgaaaaggttacacacagtagagggatccatgagggaaaagttaagagcaattgtagaaacaatcctctatcgacttcagtgaagtatactcctagagagcaattgatgtgcgattaatctattggagtgtaaagttgaaacccacttaatcagccttgttgatt

SEQ ID NO: 193554 - DNA, 1944 bp, Cannabis indica
tccatgtctaatttaagagcggcccaacccactttgccaatttttctattgttgatagcattaatgattcattagcaattagaatattgtcaaagataattctattgggaagggaagctccttgattgtgggtgatgaaatcagggagaaccactttcaaccagttagcaatggatttggccacaaccttgtaaatggtcaagcaaaggcttatgggcctaaaatccctaaccatgaccgcattattctttttcgaattaagagtgacaaaagtttcattgataggagccatgttagcaccattatttaaaacatccaagatagcaaaacaaaggtctcttccagaagtggacttgttcttttaatagaaaagggggttaataccatccgggttaggggccttatccctagagagttggaagagggtatatttgacttctgagagagagaaaggattagctaggaaattgaattgagattgattaatatgtttggtgatatccctgagaatcaagttaatagattcaaaatcagcaccatttgaagagaaaagattggaatagaattggacaaagttattggtaatgtcaagatagttgtggacagtgacattatcatcaaggatgagacttttaattctattatttcttttcctagaagaagccttgttatgaaaatattttgtattcttgtcaccggcttttagtcaactgaccctggatcgctgcttctaataaacctcctccttaagcaagagggtgttaacagaagactgaagacttttagcacgcttgatattgtgattggaaatgggctgttgagagtaaatatgatccatggcattgtggatatcgatgatttgcttcttaaaatcaattatatccttggctcaagaattcatggccagaatgcagttggcttgcttgtcaagaaaagagtcaagagtggtaggagcattattagagaccctattattattccacgtgttagtggtgagggtaaaaaaacctagctccaaaatccaatggttttcgaagaagaacatgttatggtttttattgagatagggagtagcgttgtgaacaagtttaataacacgatgattggaaccgtgaaaggggtaggtgaacaagagtcacattggggaaaatatcaagccaagactgattagtaataccccaatttaagcgctctaaggtcctgccatgtttccaagtaaagcggtttctaccgtagtgcaaaggaaacatattgtatttaccaataaatttttaaaattatggattgcgtgagtaggggcaaagtagtagtattacaatcattataacttaaataatcattgaaatctcctattataagccaaggggaaaaaggaagaacatcaaagagatgatccaacaaaacccaagagttatatttatcattaacatagggtgaaccataaaaacaagaaagaatgaaataagtacagtcaatatggttaaacgagaaagataaaatattaacatttacaacatcattccaaaagagaagtaatccgtctcctaaaccatttctatggacctcaaaacacattatcaaaagacaatctaactttaaacatatgaccagaattagcagccagcttcatctccatcacaaaaagaagttgaggttgatgttgtttgatcaggagggagagattttggaatgcttgggaactcccgtaatccacgagcattccaactgattaaacttatttttctgggcaaggttgcctcgtaacacctgcctgttcattgaagtcagcatgaaggaccacgacaagtcagaattggaagagcgagctcttttagcatactctacaatggatccgacctcggaaattctgcctactaacgagtccactcctgccagcctagttctagtagtagtagagcgtcgaggggttgaaaaaaacccccg

SEQ ID NO: 193555 - DNA, 1353 bp, Cannabis indica
ttttttaattacaaaaatagaagtaaatttttactttcaaaaaataaaaaagtgttcagtaacttatttattttttaattgtaaaaacaaaaatatatcctctaacttttatttttttattttgttgtttttatttaaggaatgaaaaattgaggagagagaaagtgggtcgggaatcaaggtctgggtcaggttcggctggggccaacactaggtttgtggtttaggattcaggaatcgagctagggtttgggtctagggtatgagattgggtttgagattaaggtctaagtctgggtcggggtatgaatttgggtctaggtccggattcgggtctgaggtctaggtccaggttcaagtcccgagctgcgatctgggtctacagctgggttttgggcttgttcatggtataggtctgaggtcgggtccaaatctagtgtcgagatttgggtctaggtcccgggtcgggattaaagtctaggcctgggtccaaaatttggggtatgaggtgagatttagggttgagtccaaggctgaggtcagggtctaggattgagtggagggtcgggtctagggtcaggctcaaaatattgataaaaaaaaacaaataactataattaagaaaaaatattataaattttgttaaagtgactattattttttgtttctaaacatttcaaaattcaatttttatttttaaaattaaaaagtgaaaacagttttataaaatatatttttaatatattcttacttttttaattaaaaaagtcacgaaatgtcctatattattttacattttcatattttctccaaaccgcaaaaaaaaaaataaaaaaaataataataatagttctttaattagatggagtactatttttttttaattaatacttttaggggatgtaaaattttgataatgataactaaacgaaattgggaactgcaagttagcattagacttttaactttaatattagcttattagcttttacactacactgcaatgcaaaagaggtgcttattgtggtggttgtaaattgtttggtgattaacaaagattttttttcttttggtaaaaagtgaaaaaaagctcttaatccaacattgtatgtttgtaataagaattatccaattttatttaaaactaattagtgatgaattaaataattcaagtgaaataatattgtcttattggaaggataaaaagtaaaaagaataaattaacaatattttcatacgaaatagttgtggcaatcgaaaggttttctctctagctcctagttcgtggcttcttgcaactacctcagttggcgccatggcaaaaatgagatcgaaggttcaagggaggcaacc

SEQ ID NO: 193556 - DNA, 1548 bp, Cannabis indica
  modified_base (1461)..(1461): a, c, t, g, unknown or other
gtgcttgaagtgaatttctttttaattttttttgatttaagatttaaattattaaaaaaaattgaatggatggttataaaacaaataaaaattgatgggtgggtggtgatgcgggtagagaagattagaatgagaaaggagagagaatgagaataacaatttgtccataggtgtataggttaggtgtgtaatattttggagtaaaatatgtgtgcgtgtatgtaaatactcttaccatgttttgtttaagttatgtgtcttagaagcataaaagcctcaaattttccaagcaaaaatctggactgcgtggaaatactacacattaacattcaacccaccacaatataaagagtatggatcatataaatatatatatataggcagcggattttgtgactaaaaatgtaaaatatggaatgtattctattgtacgacaggtaggtcccaagatacgtaataatgtgtgtgaatttatttataaatctcagggtacattattaacggctgccgtacatcaaagaatacatcacctaaaatacactaacaggacaaaatagtatccctacatatataaagaggggagaaattgacaaagcaccttttgaagcaagtgaaatgactaaaatgcacataaatctcaatgggggcaaaaccgagaaaaaggtcatttatttcagtacgtggtggtaaaatccttttatttttctttcgaaagtaacagagtcatatataatatagaccaatactatagggacagagagtcgatccccaaaattagaacattatgtcctattatgtacggtgataatgcaagaagcaaaccacgttaataaaagaaaccataacacaagaagtaaatgtaaatttatatcgttgtacttgaaaaaaaaaaaaaagaaaaaaagaaaaacagtttcctcagcatttaggtgacaatattaaatagctaattaaaatttctagcatgaggaaatatcaccctattctagacagaaacaaactttagcaaagttcatcatcatcatcatcatcatcatcgttgttttaattttgttgagcttccctttctatggtagaaaaccattcaagcctccctctttcttctctctgaagatattaatagcttaggccctcaaactgtgtaatgctgctgaatggtatcaatgtcaagacctttcagcttcaccactgactcaacatgacccttgagtgtatgcaactccctaagcctgcaatcataaatccaaacaaatatttttgttttaattttcttcttcgtagcaacagagacaaattcaatcatggtagttcttctaatgatcaaaatattgaggaaaaacaatctcttgctcaccttgcaacctcagccctgcgcttggcttgttctgcaatctctgaaagctccctgtaactacttttttcagggaaatatgttagattctggtggttgaagaccatggngtgtcctctgtgctgcagccctatgtgcttctctctcttctttccgtgtcttctttgtgtaaaggcagtctgttacagaaagcgatc

SEQ ID NO: 193557 - DNA, 936 bp, Cannabis indica
gtggaggattatttttaacaattgtgaattataataccaaactcagtatgacatttatcattcttataatcgcttggacatacggagataatatgagaaaacagtaatgtagttgttccccaaatggtgacacaatagcaacccatttaagagagttattgtctccgccacatggggattagaggaggttgactttgaagcacccgaagaacacaagaccaccctgtcacggtttgtcaccactatcccaagacctacacacctgtggttctcattgatacccgcggctgcatccacaaatagattaaaatcacccaaatgcaaagtctcaatcaagccacttgaaagcccaaccacaatcgtcgccagcttcacatgaacagtcataaccaaattagattgagcgtcttgatactaacaaagaaaactcaaggcccatttactaaccatatcatcagagagcagcttattcttatgaataaaaatattgcgacgatactaaattctctaacataacacaagaaattcttctatatcgtacgtgcttcgaaagaacatccatacaacccttaagcaattcatagaaacatgaagtctctcttttaaaatatccagacctttaacaacccagctgttatacctatattttgaacaaaaatatggtattgacatgtctaatgaaactggaaactaaaccagttcgagttataaagcaataaatgcgttcgattaattttccttagaaagtacagttagtagagatattaaaactcactcttttaaaggtaagagcgagccatgaatataactactgattgatgatgccagcgagacgaacaataaataaagaaggttcatcttcggatacacagaatacaaaacagaatgacaatacttagatatgttgagatactaatgataatatttccagcattc

SEQ ID NO: 193558 - DNA, 2001 bp, Cannabis indica
aaacaaagaaagtaaaaaggaagaaacaggaggtgattggtgaagatcaagattaattattaaacaaagttaaagatttatgtgtgttctaaaggtggcgaactcaagagacaataaacttattattagcaataataataataacaatggggagtataattggttaaacgaaccaccgctgttttcttccggggaaccgataatggcatcgggttttgagttgatggatagggagagggaaatgaatgccatggtctctgctctaactagagtcatttcaggggatttacccaattttactcatcaccatcatcattctgatcaacggctggaaataagtggttctgcctcgtctgttatgggttcggattcgggttcaggttcaggctcttttggtagtaaaaggggaagagatgaaggaggaaacgacttgtcacctgagtctttttccagactttgcaggggatttggagatcatccctttccagctcaaccctctaataagtcagcatttcaaggtaaaatgcttttgtttttcttcatggatttctgttgtatttttaggtcacaaattaaaactgatcttctctttaaagttgtccattttaccattaatgaaacagtacaaatgttacacaaaaaggataataaataaataaataactattctgttcttgaaagttgagcttatttctctccctcgaacagaatattttttaaaaaaaataactttccattaaaccattaataaaacagtgcaagtgttaaattataaaatactttttgtttagtgttgttttgttccttacccaagtagttagtttcttatctaaaagataaggaaaattatgattttatcaattgacttatcttcttcttctaaacatatacagaaacatcatacatgtggagaagcacaaccgtaccagcacaaacgacgtcgttcactccaacatacgagtaccaccaagaaatccctcaaccaggacaacaagaacaacccagaagaaaatacagaggagtgagacaaaggccatgggggaaatgggcagccgaaataagagaccctttcaaagccgccagagtctggttgggcacattcgacacagccgaggccgccgccagagcatacgacgaagctgctctgcgttttagaggcaataaagccaaactaaatttcccagaaaacgtacggctccggtcaccccctggaaatccggcggtgacccagttggttatttccgattcctcgaatacccttttgtcggtttccacttcggctgagccaatcgtccattcccaacaaactcagcttcgcagtagtaacatgtcgagttcttccgatgtagtttcgagaaatctgccgagttactctcctcgtgttttgaattcagagagtagtaataggacaatgagcttgtatgatcaaatggttctttctcattcgatagcttcacaacatgtttcttcgccgtcttcttcgtcttcttctccatttttttcttccgctgtttcttcttcttcttcttctctctcaccacagtttccaacattttgcgttcagccgccggttcagctcggaccatctgcttctgatagtaacccttcaaatttgccagctgaacggtagaaaaaaaaaaaaacagcttcgagtcaaatactagttcctcaatttgactaactgattcgagaaccaagaaactagtttaatattctcttggcatttgtttgagcttttcacctctccatttgaaccgtttcttttagactcttctgtatactttttactagtaatttacctttgattttttattgtaatattacttaatttatatttttgtaacatagtatctggattgtaagtataggtggttaaatttttatttttatttaaaaattaatttaaatatattaataaaaaataatatatgaataatgatttaaaatttaatagtaaagtaattacagttaaaaattaaactattagaaaattaaatttaa

SEQ ID NO: 193559 - DNA, 1271 bp, Cannabis indica
gggggttttgtactaaaggttactagattcttgcatgctgaggctgaggtatctatacaatgttagctgagagtaaaataagagtctctgaagtgtttgaagagcccatgaaagtcatcttcttgtctcaaatgaaattctgtacatgtttactaccctgcagaatgcttaaatacagagctacagacttgaaaagttctcaactttgaaccaatagacaaatcaaaatttgaaactttgttctctacatttacttttacacaataaagtaatctctttccattgatggtatggtatatcaccagtaatctttgcaagagcattccccattgctaaaatggtggaagcgtattcgatctctcattattatgtctctatggtatttcttcgaaatcactttcataaaagcatggcagtcttcacaagatcgcaagtttttcacaatccgaatttcagtccccgggcttgtttttatgagtccaaatgcaagagcaagcttctcactgtggtgactcaactggaacgccttttcctcatcatcgacttcaagcaagacctcgtgaagtttcggctgatacttttcttctcttagtttctcttctatttcatccaacttggcatatattttttcggcttcaggatgatctgaatctcccactatgaattcatgaaccgccccatcaatctcaatcttactagcccccggtggcttaacaagtcctctcttgttcatcaactctctagttcttgccttatcaagccactttcctgctgatgcatacacatttccaatcaacaccaaattgccacaatcatcatttgaatccatctttaaactcttaagatgatctatcaaacgctcagctcgattcatatccttattaactttgcaaccccatattaaagttctccacaaaaccccatcaggtttgataggcatttttttgataagctcttcagcatcacttaagtgtccagctctagcaagtagatctacaacacatccataatgttgaattgtaggccagactccatacttcttgtgcatagtcttcaaaaatctgtaaccttcactcaccaaacctgcatttcgataagctgataaaaccgaagtcattgttctctcatctggttttatgcttagctcttgcatctgattaaacaagtcaatagcatcttcacacttcccatggcttgcaagcccggctatcatagcagtccaagaataaacatccttattaacactaatctcgtcgaaaactcgccttgca

SEQ ID NO: 193560 - DNA, 1785 bp, Cannabis indica
agtgaatgacattgtatttaatacactgtacgtggagttctatcgtgagtttatgagcactaatttatgattacttaataatgttttgctattgtttttgttggtgtaatagtatggacagtgctttttatactggtgataatgagggttatgttattggatgggacgctcaaagcaggaaaagactatttgaggtattatatattgtttgtcaagtgaatgatttatctgattcctatttattaacattacatttttagcatatcaaagaaaattgcatacttatcattcactttactttttgaatctaggatccccaactaatcctacaatgtttgggaaccagaaaattatacgagttgatatgtaagcacctaaaagacttagggccttgtggtagcaaatcacctactttgactatctgagctaccctattgtgttgatgtcattcactatagaaggcctgcatgtttaagagataacagctgtagcttgtaggttatagcaactggcttaggttaaaaattttaatctatgcaaatccaaaagcaaagggagcatttgagctgcagggtcaatttactttgtgtacatttctagtttagattcacttgttcttttcttgccataattgttctggttaaatatacttgccagtatgatgagaaatgtattgcaagagttggctgattttgatgcttctttctcccaaaatttcattgcctagataccccaataacctcacatttgctatttgacaatttcataatgaccaacgtcttaatgccttctaactttcattgtttcagttgcctagatacccaaatagcatctcatccttatcgatcaacaataaaggacaacttttggctgttgcatctagctacacttaccaagaggctaaagaaaggttagtgttccttgtcggcttgtagtattgtttctctttttcgcattacctattatgcatgacatagcattggttctctctttctaagctgaacttgtattgagactctctacaataaaaggtacaaataacaaagcataatactagtataactcccccgtgattttttttcccttcatgaaaacagagaagatattcctcaaatattcatacaacaaattgacgatgtcagtacgaattcattttattgtggaagttcaagtaggaagtgaccattcacaagatgactgcggaggtaatgactaacgaccgcagtcacattacaagaatatatgtcttaaattaagtccttaaaggcggaatacaatttttttaattctgacttaaaagtattcttactatgtttaaggattaatttgtttcacttgatctaatttcagatgacaaaatagaaatggtttggaagtggctgaatagacctagttagaaacttgctcccactttgtcattttctttatggtgatgattgtaacatttctttgtactatttaatgtgtttatataagttgtcaatctgtaatataactcttacttacgaacatcattttcttttatttcatctctgcagtgtaacttacggatgactcttttcagtttctgatatcaattttgaaagtctgaattcaagactttagatcaaatgaagttgtttaaattaacactcaaaagtttattaattagctcttctaattagggaactatgtaacgaatttgttgctcatccactagactttagaatcttttcaccctcgtactagtcaccaaagctataaactttgatcttgttttattcacttgagttccgtttttttttt

SEQ ID NO: 193561 - DNA, 2617 bp, Cannabis indica
tactattcttgttggaaaacacatatgaggaatatgttcgtatacatagccaggctaacatatatttaaatatatattatttataatttgttttgttatatttaaatatatatatatatatactatatataggataatattcttcttataatagtatgtagggacatatatataaatattaatatatatatttttggaaaaggaaaatctattattatatcactaattattacttattgctactactacgtacgtactaatactatactatcaaagcaatattcttaatatactataattttgtattgttgaaaatcacattataataattataattatgagctttgtgtctaaaagtaaatttgtaagtatggcataatcttaagtacgtttatatagtatttttttttttagataatgcatacatagtaataaattgatgaaattaatttataatattcagttatatattttataattaatttacacccaagaatgtgaaaccggttaagattataagatattggaggaggaatgataaaaattattttagagtaaatataatatttatacatatattataatttgaaataaaattattaattttatgtaatttatttataaaatatatgtatagtatataaaaaaagaaaaaattcttatatagaagtatagtttgttaataagagacttagaaaaataattacaatttagaagttattcttatttataattggtccaaattaggatttgatttttttaaaacaaattagaggttattcttgaatagagtatttttatataaaagttctactgtatttaatataatactagcatgtttgatattgatttgtattaatagattgtgtaaggttataatatatttttaataaactcgaccctaacactgactacgggtttgggtccgggtcccaagtgggtttgtgagtccaagtttgggtcttgggtttggttagggtccgagtctcaggtcccgagttcgggttcaggtcctgggtttggatctgagtccagtccgagaccagttctggattccaggtcaaacaatagggtcccatgtcccaagtccaggtccaagtcctgaattcgggtggtcttgggtcctagattcggatctcattagggtgtgggtctatatccatttcgggtcctaatttagatctcttatacgactcttatacaatctagcaaactaaacatttatagcatatctaatcgcatcatatatgcacaaataattactaatttgatttggatgatgtcatatgatattagctatttaattagtaataaataataattaatgaagtcaagccacacttccactactagttttgttgtaccttattggagtatataattagagcaatgaaattagagtaattaacacactaattaatattaattaattaaattcatcactttcatatttatcatcatcatcactagcgcatagcctctatttttatattgagcattgttattagacacccatgatacttatatagtacctttaaacatgtcactttgagattggctagaaatactttctaaaaattattacattaaattatatgagacctgatagttaattaaatcaatacataagagaatattaaatacaactagtaccttttagcatttcttttttgctcttattctccatcattaattaccacctatcaaaataatcccttatactgcttttggtatattattatataccaaaagtaaaaagtaataaaattttgatacacacatctatatatgtctactcctatatatattacacaatcaaattaattgatatatagcaatattaattatatcttcatataatatatacatagcttttcttcttttaataatctcatattgtgatcaattactatatttactagtacaagtcacaatggtttctgctgaagctcttcgaactctagttggtatcataggtatatctatagtgtcataaatcgattaattgtctattaattatttaacttaatttccaggaaacatcatattgccttttctcctttttatcaccagtgtaagattatatatatattgatcataattttgattactattataaataattattaaatctataatatttgttaatatttttgtaatatataaatattttatacagaccaacatttgttcgaatatggaagaaaggggcggtggaagattactcggcgatgccataccttgcaactttatttagttgcatgatatggactctctacgggttgcctgttgtgcatcccgggagcattttggttcttactataagttttttgggagttgtgatcgagattatcttacttattatcttcttgatcttttctgacaagaaaaaaagacttaaacttcttctattgatatttctcgagcttttcgttgtagctcttctcgctactttgtctctaactctatttcacacatacaagaagagatctttgattgttggtgtcgtcggtattttctctagtattatcatgtactcttcgcctttgtctatcatggtaatcatcgattaatgtttctttaaattgattataaataccgaatttgaatttttaat

SEQ ID NO: 193562 - DNA, 1094 bp, Cannabis indica
gccattgttatgtaataccaatccaactgctactaaagacataaaacattacaataactatatgaaatttgaatccaaaagctttctattctcaaattaaaataccacaaaacaaaaggtaacaagagatggtagagctccatcatagcataagtccaagtctaaccatagaaataaaacattacaattactatttgaaatttcaatccagaagctttctagtctcaaattaaaataccacaaaacaaaagataacaagagatagtagagctccatcatagcataagtccaagtctaactatagaaacttcatcagcaaacccaccaataaccacgtagtagtagtcccaatctgatgaagaaataaaggcacagatatcagccaagatccctgtagcataattttatttggatattaattaacctctgtttaatacaatttacctctgcctttgttcatcgaacgcgctccatttacagcaccagtttaaatgaaacccccttggacaagaaatcatccctaataaaacaatatacaataccaagagaataaagacacgctcagtcaagcccttgtgctctcacacaattattagttgatattgggacaaagtaagaattataaagatcaaacagataatatagttactaaaattagacaaagaattataaggaaactataactctagcttctctaataatcaacaaaataaagccaaatgaaaataactgaggggaaaagtcaatcacaattaccacttcttccctattggttgctgcttctccttctcattatttttcttgttcaggtcctcctctgcctctttccctgaatttggcttatcaactccaactccaatgaggcttctcacacatgcgatctttccacaagttttagtatagctcctcacactcttagcctcctttctttccagatcatagaccataagcttcttattgtcctggtcaaaaagaatttgatgggccttcttgaaatacttaagaggcattatagatgtaaaagacccagtcacatttgatggtaccactgtacatagcttagtccaggactctttaaccccgtattccttcat

SEQ ID NO: 193563 - DNA, 1726 bp, Cannabis indica
tgattcttgtatacgaatacatggcgaacggacctttgaggagccatttgtatggaacagatctaccacacctatcatggaagcaacgtctagaaatttgtattggagctgcaagggggctccattatcttcacactggggctgctcaaagcatcattcaccgagatgtgaagacaacaaacattctcttggatgagaattttgttgcaaaagttgctgattttggcttgtcaaaaaacaggtccttcacttgatcagacccatgtaagtacagctgtgaagggtagctttggttaccttgatcctgaatacttcagaaggcagcaacttacagagaaatcagatgtgtactcatttggggtggtactaatggaggttctctgcactagacctgctctaaacccagttcttcctcgggagcaggtcaacatagcagaatgggcaatgacatggcaaaagaagggaatgctagatcatatcatggacccaaatttggctggaaaggtaaacatggcttctctcaagaagtttggcgaaacagctgagaagtgcctagctgagtacggtgttgacaggccgtctatgggtgatgtgttatggaatcttgaatacgctcttcagctggaggagacttcatctgcactcatggaacctgatgataacagcacaaaccacatctcaggcatccagttgacccccattgagccatttgataacagtgtgagtatgattgatcggaactcggtgaccgacgatgatgcagaagatgctgccacaagtgctgtattttctcaactagtaaatccacgaggaagataagaacaaaacaccctttcggatcaatgatcttgtgcggcagtggatgtcataaaaagatgtggttgtcatcctggcctcaagagtgcttggaaaatatgccgagaaatgaaggttatttcttttaattattctgtttcgtgcctcattatcttccatgattattttgtaatatatagatatggctggtgccaattagttcgacagaaattgcattttccatttccttattagaattatattgttgtctttatacaatttatcatacctcttaagtttcccagagatacagattgattgtattaaccttcattatatccacgttcaggaatgagtatagaaataaagcagcatttgtgatcaatgagtataaccatttcatgaccctttcagtatgttgctctacattttgttgatagaacatttaaaaagtttctgttgaagacaatttatatcatggaatcgatgaataacaaggaaattgtccaatgtccaaataaatgactagaaattagaaaatcatatcttgtgtttgagtatattcaacattgatttataaagatgccagcctaagccatgaaatgctagcacaataaagaacgaaaaacaattctggcccaaaagataatggcaaacactatacatatgatatagttgagttgagcttgagattcgctggaagcaaatataatttcaaaagttgactttgtttgcactatgtaactccattcatatgctttaaaatctacatagactttgactcctgaagcaatttttttttttgagaaagactcttcaagcttgaacggtctaacatagcggtacaattaatggcaaatccacaagacacgtaaacggtctaacatctacccgcgcgattcacggtagatgtttaaaattttttaaatta

SEQ ID NO: 193564 - DNA, 1932 bp, Cannabis indica
gagaatatgctcgaaagaatttttgaaaaaactcattgaaaattggcacaggttgacaaaatgtcaacctaggcgctaggccagcaccaggtgtcaacctaggcgctagtcccttgctctggcacccacgatgagctgattcttccccaaaagcacttactctcccatttttgatgaagacaaagaagatgaacgagtcatatattttatttgatgcttgtaagtagcacaaattgactgattgttactttgggtgctagggtgctcgggcaccaggtgtccgtgtgctcaaaaataaaagttctctgaatttgattctaatgcctcaaatatgtttgtgatatgtctagttcatgtcccaatacaaagtttgactcatttgcactagacggtcccataaactgaaaccctagttggggttgtcaacttgggcgctacgtgaaactctaggtacccaggttgattttggatatgctgcttcatgtatttttagctcgacgtctggacttggttgctgcatgttttcatggtactaaatctaaaagatagtgagttggaaatgacttatcgaaatatgaacactcattccagagttcccggagttaacttggcgtagggctagggacccctccgaagtcaaccgctataactcgagactactcaactccgagatattatttttcttgccacgtgtcaaatattaatgtccacgtcaccaaagaaagtttctaagttaacactatgaataactacaatatatacattttttttttattttggtattaatataaatattttttttggtagtatgaatataaatgttatttcttgtatgaagatctacatttttttacataaaatttcatcaaaaataataaaaaaaatattttaaatttaaatgattactacaagaatcatagtttttagtgacgacactattagtgtcacacgaaagtcctcactcatgatgaggatatcagtgacgaaattgatgagtcgatactgataaagcaattttttttataaattaaaaattagttgcgacataccattttcaatgacgacattgttgttaataattgcatttttaagaaaatgaccaatggagttgggctagaattttttcgtctaaaagcatcactgacgacaaattcatcactgatggtctgacaggtcgtcagtgaacaatccattagtgacgactttgtcatcactgatgttggggtagaatcaattttaaagcccaatccatttcttcattttatcttctttgtttcatttcatttaattttttttctttgtaagaagaaaccaccatcctctctaatccattcccaaatcgatcctcttaccatatcatttcatttttttttcacattctctttgaaattctaccccctcttcgtaagaccaccatccgaagctccgactcggaccaccaactaaagtcgctcgcaaagttcccggaccaccgaatcctgtatcaccggtaagtataatttttttgctctctttctcttctcatgtaaatatttttaatttttttgtgtatattatctgtaattttatttatatacatttgatatttatatattttgtcaacctctaattcttcgaataaaatttcacaaattttcaataaggttgtctcaatttcaaccatcaagtcatactttcttcacttttataaacccaattaaaattttcaacactccaaacaccatcattcaacaatcaaaaatatagttgtactgcaattcaatacaaaccaaaatcaactgaatcagaataacaaaaactgaaaataggcaaaacaatcgagaaaatatcgaagacctatcaataaaccattgtgaagtataatatagatcaagttacatacatctatcgagatagtgttgacagataatcgataaatcatcgataacatgg

SEQ ID NO: 193565 - DNA, 1164 bp, Cannabis indica
ttttatatattttaaattgtattacgttcttattcccattttattcctatctttatgttttcgttcttccaactaaacttacttaaatttttttggttactttgatttgatagtggggaaaactgtgcaatgcgttcttgttagaagcagagtggtttggttgtgggaagttgccaaatgaagaggagtatttgaagaacgcgattgtgagttctggtgtacacgtggtgctagttcatatgttctttctcttaggtgaaggtatatccatggaagctgtaaacttactggacaacattccaggccttgtgtcttctacagcagcaattcttcgtctttgggatgacttaggaagtgccaaggtacataataatttagtatattataattatacatagcgccaaaatgaaatgattaattaattgaagtgggtacgtagtactattttagtccaaataatggccaaccaataataataataatttcaggatgagaatcaaaatgggcatgatgggtcttacgttgagtgctacatgaaaagacacaaagagtgttcaatgggcgaagcaagggagcaagtgattcgtatgattaaaaatgagtgggaacgcctcaataaggagtgtttctcgtcaaaacattttcccatgtgcttcagaaagggttgtcttaatgctgctaggatggttccagtgatgtatgactatgatgatcatcatcgccttccaagcctccagaattatatcaactcacttctctctcatcaaacaatataatacactaagcactactcactatagtgattatataaataaataaataaatatgtactttgaggtctcctaattaataagatagaatgagtgataataacttttaattctcaaacataaatgagaattgaaaagacatagtgatttattaataaagaaaaaaaaattaaaatttctcgtacttaaatttatagctagagttttcttttttttttttggtcaagctcgcgactttgtttggacttaggtccagtttggttggagttatgttttgctactgttattagatttgtttctgtgatatggttttgagtgatttagtcttatctgtgtgatatggttttgtttcgttgttggttcttctttgtgcttcaaaggctcgccatcaaat

SEQ ID NO: 193566 - DNA, 2093 bp, Cannabis indica
atgctatgtattattatgtacatatatacttcttcatgaccaaagagtaagataaacgtgtcttcgtgtaaaggctttggtaaactgattaatgttttagagcctaattaattcattaacttctttttaataataggaaaaagtttgaagagacccaatatacgtagaagataagagtaggctacccaccaacaaattaacttcctgtcaaacttcccaactcctgcgcccttcaccaccctttttatgctttcacttaaatacccctcattttcaatatacattactctacgttattaaatttccatcatattagttaccaatgaaataagaaaaagaaagttgaattacttaagctaaatcatgtattaataaagataaaaataccattaatatacatatctttatgtttaagtttaataaatatttgagagagagacgtatggggccaaagggcaaaatagtcatttaactcaatcgagtcaacttcagaggctgcaattttggtagtacatacaagccatagaaaaaggcatatcttatgatcatataataaaccatgcatattacaacttcttttattgcctataaaaaccaagacagagtgacctcttgtaaatatattgtcttcttattgttagttctataaatatatataactagcacaagaattagaaggagaaaaaacgtaataacataagaaaatgaagaccatcatgaggttcaatctctccttcttcttcctctctgggattattatttcaatggccgctgccgagtaccatcatgatcaagaaaaccagttatttggggcgtataacggtgaagagttatcgtccatagccggatatggggaagagaagctttccaccgttcttgttacgggctcagttctttgtgagacttgtcttcatgcagctcatctccatgcatggccagtttcaggtcagtaataataatatattataatttcttcattatattcatttttgttattattaattaattagtgttatttttcataaagttattattgattatgttttgtaaattaataataaataaagtcttcgatgtatagaccacgtttcattaattcttagagagagttgaaagatcaaagtttactttgcttcatatatattgctagtttgcctaactttgaccactactctgtaccatttatatattatttcgaacgaaattaaatagttaatgaaatatataaattaaatgttatattagcaaaattaagatgaaacgcacgtcgatcgtacatagattaaactatttttaagacatttttatatcttttattacagtcttttcgtttcattcatgctgcctgtcttttttcattatagctttatcgacaaatatgtacatgtaacaataaaatgaaataataaagtgatcgcacgataatgtttgttttttatcatttctatatgatgattatttttttaattttatcatggctgtgatgattaactgataattgtgtatacgataaaataaatattcttgttcacttttgtttgattatatatgtattcattatgacattctaattaatggtgatttgagttatttatcatccaatgattaatttaatttgatgtggagattttaccaatatattaaaatcaatatatatttctatgagtgtgtgttataataattaacaaaccatctaattagacaaataaaatctcatcctccaataaataaacttttggattctttatttctgatttcttcatatgaagaaaagacctttttgaagcaataggcagaaatttaatattcaagttggacaggtgaaaatcattatagctcctaatatgatttggacatatgttattttctttggaaataatttaactctctttgcttgcttaagacttagagtagatcaaaacatgggaagggaaaaccacatcatgaaacaagatttgttttatttatactacaaataaatgtggacttaaatgcatagcgaaacatcgttgtaaaaaccttatattccttaatctgataaggattcaacttataaataaaatattgacatgtctagaattgaatacatatat

SEQ ID NO: 193567 - DNA, 2508 bp, Cannabis indica
atccaagttccttcttttattcctatactctcttcacttttctgtttctccccgtcacaaaatgcccatggccttttgtttcttcatcattagaaagtagcagcacacggtatggttacttgaactatataatgtgtagtagggttcctatgtgtttgatttccagtaagatatgttcaacttgaattttaggtgttttcttctcgggttttcatggtactccatatacacatgtgcttccttctgttgcaacagcatcttacagcttaccgaactatggaccaaatggcggcggaggaaagtttcagaacaacaaggttcatacaattcaactattcttaattgatttatttatcttatttacattttaagagtttggttatcattaaattttgatcatcttgacattttgattacattgaaatgaccatttaagaaggcatgctgttaaatcattgatgttcattttaatattctttcttattggtaaatcaatgtaatctttgccgcagttccatctgggttaaagcataatgcctttgagcacactattttgtaggtggaaaagttgatatgaacaaacactataattatgaggaatttgaggatgggaatagtttaagctgattctaaaacacttgaaattacaagatgcttgaatagcgatagttcattctcatcttctcattgtacacattacgagttcgttttagttttaaattggaaccaattagaatcaaaagtcaaaaccatttcttgtaaggaaggtgcttgtgcagaagaaaattgatgtatcgtagatctgaacgcactctgttctatcaaggagtccatgctgttcaccccttaagtttattaactggcaattatattgttcttttgtcatatattttgatgaactaataaaaatccttgtgttgttttaccaggaggaccgaagtaattcagtaactattggtgtttctgatgagcatattggatttgttgttggacgtggtggaaggaatataatggagatcagccaggtttgtagatagccagtttctgaacttgcatctgatatgtgtttttcacaagtggtattaatttagagccttgtgtttttgtaggcaagtggtgccaggataaagatctcagaccgaggcgatttcttgtctggaacaactgataggtactacatagatccgtttattttaagtaaatatgctgcttccttggatgacttcaaatgtttttgactcctgacatactgtcttcttgtgttgcaggaaagtgacaatcaccgggtcccagagggcaatccgtacagctgaatcgatgataatgcagaaagtttcctatgcctcagagagggtagcagtggaatgatttttccaagtaatgcaattcattctttctgagaatcttttggtggacctgatttcaacatttatatacagttggtcatttaaaaatgtgtccacctacatgatgataaattgataaaaacaaccggatacttttgtagggtcgagaacggggaaatttttgttctccttatatagagttgtatgagatcaggacttgaaatgttggaagagagagggcattgtagttgaccaaatagaattattaggttttgatttatttatttatacagttgtaactttgaaagtaagcagggtactgtttgatctgatgttggttgaatttgttttttgattgacgtaacattttgggtattctaaaggaacaagttttgttttcaccattcttttacttgaataatgattttgtgatatctatacactttaatgtacttagcatattgggcaccaatcatcatcttgtgggtctttgcacgattgaccttttgatattcgaaacattcaatgtcttcaatgcttttttttttccccttttttcgatagcacgaaagttcacgcttctttgtggttagaaatgtgtttaactttttttggtcaaagaagaaaaacaaaatgaaatgtgtttagttttacttaaacgtgtaagtggagtgttggttgtgcgtgctctgcagctgtactgcacctacttcagagggctttttttgttggtctgaaagtgacagtttgttaagcttaagctcactttgttttacttggaaggaaacgaactcgcatgaaaatggttaattgactacgaaaatatacattcgaaaaatcacctcagctttatactcgagataacgcactcattcacatataggaaaaaatggttaaaatttaacgtgtttcttacttcatatgggacatgtgattcttttgacttaatattttttttggtgatatgaatacttttggcggttatgattattttggagattgtgttgagacgttttcctcagaattcccagttgaaagaaaaatagaaaaatgccgagggtacaactttatttgtgtttttgaggaaattaagaatataatggctattgtttggcgtatttttaaagtgcatcagaataagtactaatagcaattaattata

SEQ ID NO: 193568 - DNA, 2494 bp, Cannabis indica
ttttttttcctcgcacattattttttccagagctgcgctatagcacctacaccctgtgctatagtgccaagcaccaatttttcatacttcagcttgtttctcgactcggctgctccttgattttggcattttactcagatatgtacaattcacttctaatttatcataatttcatcactttatgcataatactgtgcactatagaaaacacatcaaatttatacaaaacttaagaaataaatactaatttaactaatacttgactaagaatgagtgtacaaatctgcattcatcataaggtataagatttcataccattggagtaaccaatgaatatgcaagcatgtcctcttggagaaaatttatgcctcttattggttagggaagaggcataggccaagcaaccgcaggtcctaagatgatcataagtaggttgtttattataaagcaattcataaaaagttttatgttgtaatcgaggtgtgggagtcctgttaattaggtatacatcattgttaatgaaataaggccagcatgccaatgccagggaagattgaaaagctaaggcccttgcaatatttaagatgttttggtattttctctcaacaactgagttttgttgaggtattttaacacatgaattgtgagtttgaatacccttgtgagcaaagaaggatgacatgtttaactctttagtatagtcacacctaattgcttttattttagtagaaaattgtgtatgtaccaaactctagaattgaagaataatatgttgagcatcatattttaactttaacatgtaaactcaacagaatatgctatggtcatctactatacttaaaaaataacaaaaatcttccacgctatgaacatgaaatgaccccaaatatccatatgaatgagatcaaaaatagaggcaataaagttattactggaagagaaaggcgctttttttgtttggctaaatgacatattgtacatgggaaaaacatagtagaatgtttaacgtgtaacattttaatgatgaaaattgtagttgacatagaggggtgtccaagtctagcatgccaagaatggacactattacatgatgtattacaaacagcagaaggcaaattaggaatttactcacaaaagatctttttcttaataatatttaaatgctttgaaaaatactaaaaagatctttatataataggtatccaaataataaaaatatgtctaaacttatacttattttatacttctaactataagcaaaagtagaagcttagccaaatggaacttacactcactatctcaatttctccacctaaatcccaatatactatttgcttcttcttcactctcacaacaccacaaactcacacttacttttcttttcatggctcactctttttctcacacacatctcacccacacacaaaaacatatatttataaagttacgaaaattgcgcattaagataacttgaggattaagacattccaaagcttcatttaaaacactcttcaaaacttggccaccaaaatttttcttttcacacaaataataataataataaaaaaagctctgaaactttctagcgggctgtgtaccatttcttctggtttctcatcctgtatcccaaatttcttctggatcgaatcctgtctgttttttcaccttcatggtgtcgttttaattgtttctgcttattactaccgtgttgtttcttttggtttgccttgcacttagttggattttcttttgttttggttttgtttggggattgactttccgttccctgtgagcacttattatctttcttttcaaataatcttcatttattactctagatccccatttattatctaatagatcttatttttggtgagtttcttgtctttagtttcttattttaggtttgtctttgtttctcttaaatgattgccgtcgttttgagtaacccaagagaggtggtgatcattgctcctatcggctatggggttgttgtagggttactgaaaggacttacagagcatctttgcaaatctttcttctacaagcttcgtctctccaggtattttaatttcctctatttaaagttctggtttctgtggcgctctttactcattcttttactggtttttcatttctcccctgtcttcctgatttctcgttgcttcccttacactataatggattccttagcccttaatatttctgaaatcttaaacctcacttataaagaggttgtcgttcatgatcttgaagatgatactaggggggttaacctgaataacaaacccatctgtctatttttcgaatccttcccctagaaccatcaaacccgaatggtttgaacatgccatgaggaatgcttgggttactcgagcacctctgactttttcaaactatggctcgggaatgttcatggtggagtttcagtgtgaggagcatgagagagttctgagcgacagccctggcacttgatcactgcttggtactgtgc

SEQ ID NO: 193569 - DNA, 2248 bp, Cannabis indica
gacttttccaccaactgatagtattactgttgatcatgttcatccatcaggttaagtagctaccaccatctttacttagaataacatggtttctttatccttatcatttgtcttttcccatataatacatgatctcatttgtgttttcttttttctctgcaactctctgattctcatacctttagctattgggctctcatcttatattctgttaaaaagtttctgaattattctttccttactgaatcaggtccaggccagagcctgcagtctatgaaaccaacatcaaaagaggtgaagaacagaaaggaggaggcaaatatgaatgaaccagaaaaatacaaaggggtaggaaaaataggttcaagtccaccaagctgtgagcacaagtgttatggatgtgttccttgtgaggccatacaagtgccaaccaccagcagacataaccatatagggatccaatatgcaaattatgaaccagaggattggaaatgcaaatgtggcttatcattgtatagcccataatgaacaaaattactctaaaactactatgttttccaccattatattatcaacatcatcaactcaacaatctcatctgtaaaaagattattaaagtaatttttattatattattaatggatctcttcttgacccttatggctatctctataaaagttagatttcccaggtagaagagccccggaatctcatttctctttcatttacttacaaattgaacttatttttttaaagctaataataatagtaataaaacaatttttaatagaattacataacaaattttgcaggttccttttagtgtggaggctttaaatttgatagatcttttagagttaccattaaaattttcatgaaatagaagtttaaatttgatattagctaaaatatacatattatttactataaaattttaaactcgatacaaaaatgaaaataatttcataacaaaatttttggaggctttaatttttatagatttttttagagttaccattaaaattttcataaatagaagattaaattttataaaacataagaataaaaaagtccaattgtccctttttttaactaaaattcattacttcaaacaacattacacagattttgaggaatcatttaaaagtactataaaaactctcaaaatattataatttgtcaaactaatatgtaattaaatactttacatacattattatacaagttgttaatacaataatgtaataagcttaaatatttattctcaaaaaaaagcttaaatatttattctcaagaaaaagcttaaatatttaaagttttagactttttttagcaatatagagtagattttaactagaatagaacgatttcataagaatatttttatatataatataaaaaaataaaaagttgaaaataacaaatagacactcgttaatttatttatttatttttgctgaaagagacactccttaattggtcatttgtctttcttttaaaaacaaatcgaagaacccaactcccttctccattagcgaactctgcaaattcccccgatctggtatatcgtcgaaatgggcagtatttacaacaattatgtaagtttcgctctctttttcttttacagttctgtcataagatttgtttcaaggctattcgttgtaaagatctattcaccgagttaaatttttgagtcgggaagtattcccttctttttttcagaacgttcttacaaatttctgttacttttaggtgtgaatatcgacttttgattgtcccatttatagatctgtgtattagatttggattcgaaccttgacagataatgtattaagaagataatgtatttgactttatacaaaatcatttcgtcattagatgtttctatggaacgtttttgttctttctgaaatggggtttatttatttggtaaaatgcctcaaaacttagaagaggttctttatataagtgatcatcagcattattttggttctcatattggtattgaaacactaagtaattttattttattgcttttctgataggatttgagcccttcggtgaaaaacattcttttactagactctgaggggcagcgtgttgctgtaaggtattacacagatgagtggccaacacttactcataaactagcttttgaaaaatctgtcttccacaggactttgaagtcaaatccccgtacagaaggtatgcttctaattgattatacagacatgatttttacaatttt

SEQ ID NO: 193570 - DNA, 951 bp, Cannabis indica
ttttatatttatatgtaaatataaatcttctttaaattattaatgaacagggcaactatatatattattgatatatatctctcattgggtacaatataattataacattaattcgtaataataataacaatgtaaatatatgaaactattaattaactaattaagaagaagcagtactaccagatttaatggaaacaattttaggaacgtcaacaggaaactgatgaatctcatcaacccaaggattcttctccttgagaggatcaacggtcctcaaagctttccaaacagcactgttacatttaaaaccagacccaaaagcaatctgccacgtccgatctcctttcctaatccttcctttggcctcagaataagccaattcataccacaaagaactactcgaagtgttaccaaacctataaagagtcatccgagatggctccatgtgccactcactgagttcaagattcttctccaactcgtccagaacagctcttccaccagcatggatacaaaagtgttcgaaagccagcttgaaatccggaatgtaaggcttaattttgttcattttgaagatctttcttcccactaaggtcaggaaaaacagcagctgttccgacattgggaggactagcggtccgagggtggtgatgttcgtcttcagggcttctccggccaccgccattaggtctttttgacagagaaactccaattcttttttgtgtcgtcctccttttggaaaacgcagctgtacgacttgtcgtctgctcctttgtgtgtacggactgtgtggatcagttggtatttggaacgccgccggtctgacgatctgtttgagaggagcacggcggcgccacccatacggaagaggcagttcgacactagcatggaacggtcattgccgaagtccagtttagggttatgttctccatgcttactactagtgcatat

SEQ ID NO: 193571 - DNA, 1872 bp, Cannabis indica
taatctatataattataaaaataagacttttttaattaaataaaaaattaagataaaaatttaaattttcttaatcctaactgagtaatattttttaaaaatgtattcatatatactttatttttatatataattagtattaggaagtcatttgcttatccaatcactaaattccaagaactaccctttcggtacttcaatcaatagccctacttgattgataaaaccttattatttaatcaaaaccattgaacagagagagagcgagagactaggataaaaatataatgaaacttatgagaccatggataagacactagtataaatgccatcgttttggcagcatccaacaatacatggtaccaaagtgtagtagtactagtggagcgaatagatagttctacttatacaatattacattgagaaatattaaggtggaacttacaccacaaaaaatgacaaattcatattgatatattttaatattgaatcattcatattttcttaataaataacatgagaaatggctaataaattgccatataataaatgtagtgttcaacatcttaaaatactaaatggcaattaaataccttaattaaagtactatccaatatatttcgtagtgaaagattaatattttcttatattatatattaaatcaaaatatgtgaaacctaatattaaattacactcataatagtttgtgacttttgacacattaaagaactccttaccatttctcttaactgttcaaaaactaaaatcagcagtcgaattgagattaaagaggaaaaaaaaaaaacgaaagaccccaaatatattatatacgccatattcatcgatctttaaataacacaatgttttttccctttaacttagctaatctcgactgatttgattatcatacatatcttgtattacctgtatctaacatattaaagaatcaaaaaactaagaaaaaataaccagatagttaattattaataattatatatatatatatatatgtatatgtattagttattactagattaagaagagaagcatttcccccagctacaagtcccatagtcgcatttgtgaggaggccaccagtcaagagttacgcacacaaagtcatcatctattcttccaatggcagaacttccattgatataacagtaccattctcagtactgatctcatcacagtaggagtatatcccaaccccaaacaagatgatgactagtattattaacaaaatcacacaaacacaacaacctttacacttgtacctgttactactactactactactatctctcttttggtgaggatctctactgatgcctttcatgcaaactaattgcaattgcagccccagttgagttgaatattattgtggattagtgatcaagattaattatgtgtatatgtatatatatatatgtgtgtgtgtgtctgcgtggggacaggggtgggaagactagtactgtaggtgtagctatataatatgtttactatgtggtatgtgttgtattgtatttataatagatatatttaaatttaattattacttataaatcatttatcttaaaattaaaaaagacatggattgttggtggacctgcttttctaatataattataatatcacaataaattaattatctttttttatagaaattcttacatcaataacataaaagtcaacttgtaatacatctttaactttataagggtagattaatttttataccctttcttttgttttatttatcaaaataccacttgcacatataattatcttaatgttgatatcattgttcttacatcacactcaatcaatctatcttttctatataatttctgcatattatttcaatttcgt

SEQ ID NO: 193572 - DNA, 655 bp, Cannabis indica
tttttttaaatgttttttttttaagtatttaagttatatttatgctactttgattattttgtcaaatatataagcaattaagcatgtatagggaaaaatgaaccatcgaatcgaaccggggccaaatcattttcgactttagctagtgtcgtgtgcttcaatgtcttacatcacaattaccactttgatttttatttatttatttataaattaaataaatactttcatctcttgaattatagaaatatattatgtgtatatatatgtctcaaatttaaatatttattatacccatatccaaattcatgaataataattagtggggaatttcgaattggatttggtttttacatttttttcccaagttggagttgagatatgataaagcttggttggatgctgatgtagatagggcaccaacttaatatatatgtataaatattattgtgaacatcatgatacaatttctcttaaaagcaattagttataggctctaaaccagggaattaaggtaaagatgaatagaaagtttaatataatgtgcaagaagaaggtagttttgttttatctattcaacatcatttaggatatgtttatagtaagtacattagtgtttgaaagaacattgaaatcacgtacaaatatcttgtgtcaa

SEQ ID NO: 193573 - DNA, 1656 bp, Cannabis indica
ctctctctctctctcttgatctgatcatcgagcaaagatgtacagagtcgcggtgctgttggcgctgttgtgtgccatttgccactcatcaacagcctctaccttcactaatggtaactaacccctctctctctatatctatatattacactgtacttttttaatttatacatagagatttttggtactgcattatatatagtttagtgcatttatatatgcatctctaaattttctacttacataacaattaatactactgctagatgatgattttcaaatttatttttctactgatttaaaaattattactaagatcgatctatcgtatgcattaattttgggattttatagtttctagatacagattcatttattaatttacattttaataaaacaaatgaacatttatcaaagttttacatgtattaattgatccaacttagctttttattaatagttgaaaaagagtgagagaagtagttttgaaaagagaaatgttgaaagatatatattattgatgttacaatcctatttattagaattaatgtaattaaatattaaatctcatctaattttaaaaaaaataacttttaacatatattgttaaccaatcaaaaatacgttacaacttttaacatatatggttaactaatcagatactcttttcaaaacggtgttagagaaaattgaaaatcatctagataagggtgtttttttcttcatttattttgctctgtttaatttatggattggttatttatcaaaaagaaaacatgggttggtttgggtacaataaatacagcattctctataattgaagcatgaaaacaactattgtactgtgttatgtcagtttcacttctctcataataaattctcatatcccctaccccaactttataataatcacaaaagtaaaagagtacttgtttatttattatcatcatttaattatctctgttgtgtacatatattttacacagtactattatttgacacaagtatattgtatacatatagtaattcattatttaaattagaaaaataaataactagtgcatgctaagaataaaatacctgtaatatgcttatgtctattactaaaattatttattaattaatatgaacaacggctttgagtcgatatattcatggccaaattattataaaggaaagttttagaagagtagtagatatgaatgatatagtgcatgtcatgcagatctttgatcacgtgacaatctagttgttttgcgctgtacttctattagttgataatgacttgataaaatgtcattttcaatttcccataaattaattttttaatattttacgacaacattattcttctctatcacttcttgactaaaatccctgaacaaagggcattcatgtcattaaatccacatgtcagtcttgggatttgcatcatcatatcctgcccccttttttttattattaatattcatgtgctgctgctaggttgttgaatagcaataaagttttagggttatttagaatggtcccactaaagaaaaatatagccaaatgcttaaacaaaggcatccacctaattaacaccattagaaatatattattaatgtaatttaaaatccaaattcatataaggaaaatttaatttataccctaaaa

SEQ ID NO: 193574 - DNA, 1627 bp, Cannabis indica
acttaaataaaagttgacaaaattttcaaaaaaatgaaaaaataaagagttgacaagcatgaaactatatattatggaaacatgatgatgaaatataaccattataattcatatgttatatattttaattagaacagtctcacaatctgtatagtgttacaaaactgaactttcatgtcacgtaatcacatgtatcaacaaacacgataaagatggagtttttacattgaatatggaaaagaatttcctatagtagtgaatattttttataattacttggcttaagcaaattaaattttgcaggataagctagatggttgaataagtaagtcaagattttagatttgatccataaagacaataccaaattggatttggagtcactataagaggaaacaaaatatatatatatatatacatgtatgtattattgttctttaatccttacattagcattggtggttaagcacttgttgctatacaaattttcattcatctgagatatttatctccacagatgtacagaacaaatgaatgtacaacagccatgatttaatgactgtaaatgacaaagacgaaaaagaaagttatggtagatattgacgccattcttcgggagttcccttcctcattttcagcattcttatggctgcattcgtaaggggtatggcaagtatgtcgaattctttcggggcctgcaaaatcaacgagtgtttgtcaagtcattttcaagaacacaaaacagtttttgtagttttcgataaataaaataaaacccgaacaagttttaccttgggtaccttaattagcttcatatttgcttcttcaattgttttgtgtcctttctttgagttgcatttagaacaagctgtaacctgttaacaaaacacaacattgcaaaaaccttcaagcacctgggaaagatattgtttgtcagttagaaccgtaactagcacaactctgttcccttaagagaaaaccaatggtttcagattctcctctttaaagctttgtaggattaagaaaatggtacgaagaaaaagcaaatctcacaatttcgggtagcatgatctatgcaagagtttgaggtcatgcaaagtcccacattgactagaaatagaaaagatcgtgaatatataaaggatgtacactacttgaggccttttgagaaggtgtccaaaaacaaaaatcgtgaggacttaagttcaaaacggacaaaatcatattaatatggaagttaagatgaaatgacggctcaataaggtggaagagcggggccaacaatgcaaaagtaatatgccagcattcgtatcgatattcatagaatcattttaagcagttacacaagttgtggcctgcaactcatattttcgtgtttgacacgaggtgtttgaaatattcctattgtttgtagaagcagtttgcatcaagtaataatgagttgttttcgtcttaccaaattttcccattcccattcgccaccgcgtgaaattggcaaaacatgatcaatggtcaagttctcttgagaataacagtaccttccgagaaaaggaacataaaattagtatgccaacattttttgctaatcaaacatattttcctaacaagtaagataatcataaaaatt

SEQ ID NO: 193575 - DNA, 1069 bp, Cannabis indica
ctacaactcacagtgcttgttctatgttgtggaaaagtctgtgtgagtctttgtagaagagtgtcacaattttcctctcaaaaatttgggttagcgtcgctttgcaaatcctccagttgagaaattgctgctcatccaggtacccctgtacgtagtacatttaataacatattgtgtatgtttgatgcagtaccaatatacatatattgtctttcgcagttatctttttagctagctatatataactgtttttaaacctgaaatccccggccctatatccataaatatatatatatatagccccatcatgaaataagacaagtttactttttagtataataatcttctagtttgcttattttatatgattatgatttcattaaaaaatatatgaatttatactattattcttagtttttagacacgaagacatatgatgataatgttccaaacttaatgcgatagttttattcgttgtggctcactcaaatttgttccacatcgttgtcccaacccaaaagcattaaagtaggaaagaaagttattcccaatattgtcctaggacaagaactcttttataaatgtgtgcaaaactatattaatcgttgtctagctatatataccaaaccaatcattgctacttacttagtgatttgactaaaaataagtgtaataataattaattaaaaagacgtgacatctcattcatgatcatcttatgaaagttcaaataattataattataataaccttatatatatatatactactatacaaatgttcacttaggaagattttaaggcacaaaacctgttcaatgagagagctcctcattagagcaacctgacgttgtagctgatttttgttcatgatgtttagcttaacttggaaaatgtagaagaaaatgaccacaaataaggataaggaaaaaaaactacaactctgaaaatgcaactgtatagatgggatgggtgtagttgtatttttttttacatatatataacaaacattatggtaagccaaggtttatatagtagtacagagagatattgtagatggtgacgagagg

SEQ ID NO: 193576 - DNA, 2033 bp, Cannabis indica
catagtatttatatttatgcgacgtgtttacgagtttttgcgacatctaacatatgtatttgcgatgtggtttgtaaacctcaaatacatcgcttaaactcgcaaagaaatcgctaaatatgcacatgtttgatgtgtgtgactgtttgtgtaatttttcgtgcaatttctatgcaattcagcactacatttaatttatttggtcttttgtgtgacatatgtacgatgtttgtgcaatttatatgcaattttacttataattgattttgtatgatctttgtgtgacctatgtgcgacatttatgcaatgtgtttctaattttttttatttgcaatgcagcaaattgatgccatgatgcacttgttgagaagaagacaaaagctcttccctagtgtatacactcagaaatgtgtagttctaagacatctgccccacaaatattacaaatgtgctggaattttcatgatggtgataggagcacgttcaaatgggatcaatcggttcttaattaagtggtggggatgaagcatagacactttccgtgttgggagaactaagaatatatctactttgtgttgaactttcccgctgagcaccattaggtggttattgaggtagacattgagaattgagagattgttgtatatgactgtgatatcgaggccacgattgaggacaacatgaaatcatatttgaagcctttgatcaagctatttgcatccttattgtgggctagtgatgattttcaattaaactgttatgtacttccaaatgatttcggtgatctcagccacctcccaccaatgcattatagaagagctacctccaaagttgtatcgcagatggacaaaagataaatgtctaattttccatttattttattttgtagtcccttgtgaattacttaactttattatttctaatagtttctatttatttaatttgtagttacgattgtggaatgtatgtcgttgaatacattaagcattgcatgtttgatcattcatttgagcatgttatagataataacatgctcacctttagatataagtcgtgtgtagacttattttaccagaatttgacatggtaattgagttcatagtatattttttgcgattagttcacgacactaatatttttgcacatattttgaaaaaaaatgccttttaatcacatattaacaaaaactattagaactaattataagtacttgaatcattaagttttcaaataatgttaaatgctaataaccccaatttagaatgtcacaattgagataaactacccttctgtgcctaccaatttggttgtgcctacctttctatacagttgagataaactcgcacaaatgtcgcacaattataaaaatatatcgcctaaaattgcataggcaattaaattatgaaaaattactggttatggttacaagtttagtcatttagaattggaagctgtgaatctgaagagcagatactggaagcttagtgtggatccagaaagccctatgttgaaggtcttgtaaaatccagaaggtatttccaaataagcttgtattgtgcatggaatttctctcccagataacttgtcactgatttggaggtgactcccggacagcttactgttagccttgaagtattcggaaggaagccatgtatgtatccaaaaggcttatgagtttataaagcttttggattgttcatactgaaagcgtgtatttcaagatgacgtggattattattgttggtgatgagctggatcatttaaggcagtgtaaatgtgccataattatttaggagatattttttacaataacgcaaatctatatatacttgtaaatctttgtaattgtttgtgagattcagaccagatttgcttaagtgaaaatcgtgatagtgtaaggttgagagagagactctaaactagagagagaaacttcttctcgtagtctctgagaagtttgtgaagattcttgtaatcttgtaaatactaatatcaataaagatacgatttttgttgttccaaccgagatgtag

SEQ ID NO: 193577 - DNA, 1508 bp, Cannabis indica
aacagaactcttactttcgatctcagagagagtggcacgggcctcagaaatttgagtattgagtttcctaaaatgcactttattccatttctgcagactatccttggtggctttaattttacgatacatattgaccatcggatcgttatgatgtagggacttccaagccttgcttacaacccaaaagacacgtgggtcactctcccacattaattcatatttgaattgaggcttagtgcagtgtcttcccccacttgtatctaataagattggattatgatccgaagaagccgcagtgagatggctgactatagcattaggccaagcgagtctccagtccaccgaagcaagaccgcgatccaatctagccctcttaaggctggtacctaacgacgaagtagagcctttcttgaaccaagtgaatttgatcccttgatagcccaaatcaatgagacccaaccgttgaacagctcttctaagatcaaaagagtaccgcgcacagttgctgaccctcgagtaattgagacaatcattatccaagagcgttccattaagatcgcctatgagcataactggcatcgagcaattgctaacaatgtcacctacctcactccagaagccttctttatccgtgtaagcaggcgggccatacactcccataaacatccaaggcttatcagggggatccgaagtaacacaagctaggattttatatttatcagcactttgaatattacacaccactcctaacttccagcataaagcaagccctcccgcagtacccaccggaggcacatcacaaataccatgaaaaggaattttagacatcaaacaattgaacttttcctgagacatcctaacttcagagggaactaacatttcaggattcgacttccggatgagatccttcagttgtcgaactgtcactgcattccgagaccacaacaattccaagcaatggccctcatttggattggggagtcttttctgggcaagactccacagccccaaaacgaaaaacctgcttgtcaatacattccttctccacttgatcattcttaagttcctctattacacacgaagagctaggcttcgagttgcaatccacgataacaaagtggttatttaaatcaactttaagatcaaataccttcttctcccaggccgataagatagtcccctgacgtttcttagcggcgtttgttgattgtttcttcagcgaaagagatctaggaccacgacccaaagcattcttggggggtcttccccttcgtttaggagttggacttaggttgatatccactgattcatcaagagttacatccttcttactgttagctcgtcttcctcgcttacgcccagggatagtcttctccgacgaacccggggagaaggtactgacagtattaccagcgtttgggttctcctctaatcctatcccaagaatcgtaactgcaggcgaattctttgcagggcaaaggagctctattaactttccgacctcagac

SEQ ID NO: 193578 - DNA, 1386 bp, Cannabis indica
acaggtcattgtatcaaatcagtaggtatatttcaagtcaaaatgattaaactatatatgaatgaaaatcacttacaagtatcgtaaatttgataaatacccaaagtaggcaggtattgaaccagagattgagcagttcctcagtacactagagatcatagcatatctcagaagtgaattaataaagataattttgaatatgataaatgtatgtgtatatatatatttacctaaaagtcatgacaagtaattatatatagtaaaaatggtgtactagtaagtaattttcatctgtattgctttctatcatatcaaataattaaaaaaaaaaagttactaattataataagttgtttcatctatttccaagagtactttttgtttaaaattaattaacataaagccaatattaataagttttttttttctttttgttaaagaaaaatgctatatatataaatatatatatatatattttcactcacatggtattcacttccggcgtaaaattatctacagataatttagggaacgtgaaaggagtgtctccaacatcacaaataatcctgcatacatattgtagtcaacaaaaaaaataatgtataacttatcgcctaattaagaagtgtatatataacggagtgtgaatacacgtacaatcttttagccacgagaataatgtttgcagatatgtatccgttaaaattgtttccacaaagagacctgtggaaggttgttataattaatgtcactaaatactattaattagtggggaaattatatatgtattattgtgggtgaactaatgaagctagctttttaaaaatatatgtattattattattattgttagaaaattgaagttacgtacactgtactagggatatggtcacctgtagcccagtttgatatgaagttggggaaaggaccagacaaataattccctgatatagaactgcatggtacgttcatgtgttattatatccaataattaataacaattagaaaatgcagaagtactctatatatataattattgaagagaactttcaagagctagatcagcctaaaaagaatgaaatgaaaaaactcacaatcgatccatcatttcaaatttggcataactctccgggaaaatgccagtgaaattattggatgataaccagctgcattattgatttcaaattatataaaattaatttgtatatatatatagagatatactataataacaatatatatgcatagaaaaattatcagattagtgagtttggtgttaattaaattgagtaaattttattttaaaatgaaatagataaatcactttgagaggttaaacaataaacaagtaaataaatagaaagaaaattttatttgtacccccat

SEQ ID NO: 193579 - DNA, 2041 bp, Cannabis indica
tttataaaagaaactaaataattactttgatttcaaatatattctttggtgaaaggaaaaaaaaaaatataatgtttctcatatatcaaaatgatacttaaggagtaaatcgcaataatattattttttaagcaaaataattaacagtgtaattgttatttattttttaaattataaaaaataaaaatagatatagatataaatgcaaaagaaaataataaaaaaaacaaaaaaaaaaataaatcaccgtacataaaagagaaaatgattaaaaaaataaataaatgtgcctcttgaatctaacactaacgtcagaaaatgatagcatatatttgtttatatatgtggtacagttaccgcttattgcatcatttaaattattgatggtatatttgttaattacttaataattaagtatataattaaaaattccccttattttttctcattttgtttttaggatcatttgatcttagagcacttacatcaaatgctttaaaatagagaatctttaaaatatttaaaaaaactaaactaaaaacacacttcatcagatgttctaaactcattctctattttaaattttttttaaattcactattcatgctccacatttataaaatattatttgtttaacgagaattttaaaaattaattacataagaacttaagaaattaaataagtaaataagtaatagagatagagattttaacgtggttcaggtgttaattaatcctaatctacaaatcaatgtattagacgaatggatttaatgtattacaatgggatcttacaagctcaagatcctagttccttgctatctttttctatctagggtttttctagcttaaagaagaagaaacaaagaatgaatagtcagaagtattttttaaaaaattgctaaaatagctcacagtcaaattcttgatattttttcatcactcttctttatttgaaagaaaagagcattatagctcatttaatgtacgtgctctaagtggccttttaatcaaaatgtaacttgtaggtaacattggttgttatggacatgaggcttaacttgattactagttaatttggattaagttaaatacataataataattactactacaaatttctttttccaaaaacaaagtactcgatcgagctcgtccctgccataaattaaaattattttcaaaactcaaaatcaattctataaacacatttggtacacaataaaataatttacaagccaagggcaccaagaggggtcttcccttgaccagcctcgaagtagaaaataagcatagccaacatcgctattctcgcgtgcttaatctcagcaagcttcagtctctccagtttctccacatcgggaatgtactcaccgttctgcagtgttccggccagtcccaatgggtcgaagaattttcctccggggtatccttggtctccggtggcattggcgaagttctcggcagtcctcgaccatggcgtcgcccactcaaccgactgtgattcggggttgaaaaagtccacccatctcttgctctctacccaacccattaaaattagctgtgttcccaaaagagagccgaacgagaatggagctatggctgatgggtcagctccagcctcgaaccatggcacgccactccatgcttgaccgacgaagattccaagcacggcagccatggcccaccttccgtggatgagctcagcttctctgtaccacttgagaaaagctgggtccttgcctaatcccaatgggtcgaaaccataatcacctggaagcctgtaagattaaaagaaaagagaaaaagactcagtcttgcttttatggtgttcgatgaaatgtgtaaccagagttttcagatgaagttgtgaatggacttacgagccgtcgagccactctgggtcgatgaagttgccaccgcccttaacagccggaatccacgatttcttgggggcggctgcagcggcaacgacagttctccttggtgaaacagagggtccagctctggttccggcggaaaacaaggcctggctgcggct

SEQ ID NO: 193580 - DNA, 929 bp, Cannabis indica
attagtaaaccaaaaaaaaaatatgtacacatatataacaatagaataataaataaacagcaagacaaattcaggaaattaatagttttggggttatattacaattaactaaattattaatgtatgatattatatatttaaagacaaaatctatatagtattttgtttttatttgataataatatcatgttctcgactgtttcgataagttgtcttctaagtaaaaaataaattaatgtaactgtaaatttctccaaattattaaagccagatagctatatatatattgtataaatattattactgaaactgacgtgtatatatatatagatagatatgtaaaaatctcactgtgagggaacaggttaattaattaattaaattaagttaatttgggtttttaaagaatgtgcacccaaatatgaaacaatataacatcacatctactattgttatttcgtaaattacaactggtttttctacaatttattccaaaaatattaaatattcttatattgtaacaatttataaatatatattgtaataggaaacgtgtatgtacatatcatgtatgtactacatttgactataaaaaaccaacatatattatatatatttatatatatatatcgatcttattaataaattgtatatatatttacttttatatgacttttctacaagggaattttcttttaccgggcaacttataaaatgtacattttacataatataatcataacaaaaaaaaattacattttgagttcgagtgtgttatcatatcttttatatagtttgtttaataaattgatgttatatattgagaattagttttcggtgagaaattatattcttacttaaaaaaaaaattgatgctatatggggttaatatgtattttttttttgttttagggataatattatgctat

SEQ ID NO: 193581 - DNA, 1076 bp, Cannabis indica
tttttatatttattaaataataatttaaaattttgtattttttaaatagacccttaaattaatttttgttaattttctttttttaatataattaacctaaaattagttttagtacaaacagttgtaaaaaatataactattttaatcataatatttttaaattagattattattgagttttaatttaataaaaattaaattcaaaatctatgttatactatttcaaaaaaacacaaaatttaatttactatttaacaaaaaaaaaaaagtgaaataaataatttttacaaacctcataacttaaaataatttttaccatcttttttaaaaaaaataaataataaaaaaaatgacagtagtactttaaagttaaagagtgccatgtcatcaataggagaagatgacctgtaaagaccttgattagaaaaataaaataaaataaagatctgtttttgaccttaatttttgttttggttactaaaaataataattaaaaagaaaaagaaataattttctttgggtagtgactgagtctctgacgtgaagtactgagaaaccacaacttaaaatttggtcactgtttttcctttttttctttacttactataaatggtatcttatgatctttcttgtaatctatttcatttttaattaattaaacttaaaccacttaaatataatattattattattattattattattactttaaaatagactataccacaccaatgacaccacaactttaatttaataatagccactcaaattaaatctaagatagatgtctcatgtgttgttatagaaaatatttttaaaaatactaagttagttaacaaaacaacctatgcatgtactcaaataagagtttttaacgggtaaattttcttaattattatttcacttgtatttaattgttttaattttaaattttagcggtgaaattttctaaattattgaactgttagtaaatttaatatgtcattcagttaactgttatcatgaacggcttatgtatacactcttatacatatgacatatctatattgttaaacttaatattattatttcaaaat

SEQ ID NO: 193582 - DNA, 1020 bp, Cannabis indica
ataataaagtaaaataaataaaaaagattatatatgcttttttgtcgttttctaatttgatgctctatatttatactatatacctcttatctctattctagctaattaattaattaattaattaattatatttaaacatttatggagctaaaagtaaactattatctgtattttatatatactttactcaaatgaaatgatcatgaaaaataattaatatataatacataatatataatatggcacattatatatattaattgtctctatttaccgaccatggaaaaataaattgtattgctttgtaggctttcctctacgtattattattattatgattactattctattaattaatactatttctcatattaattaattaaactatatagtgcatgatttcatcatcaccatcataatgccttgattaaatcccagcctttagatcacactaacaaatataatatatagtcattagttctatattgagcatatataattaagaaataattatataaagcattattttattttatttttttgtaaaattttatacttttatagtgttttataaaattaatacgaaaacaacaagaaaattatattaaaaaacatataaaaatagcatttaaacaacatcaaaaaaaaaaatcaacaacaaatacattcaaaaccgaccttgaagtgagatgaaggggtggccgccttaggcccccactgttcaggaccccatttcaaaaaaaaaaattaaaatatagttagttttaaaataaataataatactcataatattaaatatgtgctggaagtcagtggtaattttattaatttaacaactaagatttagagttcaaaatacggctttgaatacattaaaaaattatatttcctgtaaataaaatcgtaaaaattgtaaaattatttaaaatttattacaaccgtatttttataatttttttattttttttgtgtaatttataaaataactctattaattaattgtgttaaaccatattatta

SEQ ID NO: 193583 - DNA, 1205 bp, Cannabis indica
acttgcccagaaaagtctccaaacacctcatgaagatcctagcttggaactgtcgcgggctcaggaatgctgtggcagttcgacaattgacagaggtgctccgtcagtccaatcccgatatgatactttatctgaaacaaggttagtgaaagagaagtttgagaagttaatgcaaaagcttcattttattcatttcaattatatccctcctactggtttatcggggggctttggcatcagttggaaaacaggggtgttgtgcaaaattcacgaagcagacaaaaatgtgatatatggatcaattgaatctgaccccccgggggtgctgtggaatttttgggcatttatggcctcctactcttacgggcaaggaaatgttctgtactcgaataggagatgtaatctctaattgtaattcccctattgttatttttggtgatctgaatggaacactggcggaccatgaatgtattaattatgtcaacaggaaaaattccgccaaatactcattcgatcttagaagaatggttaatagaacgggtctcattgaccttggatgccagaaggaacgattcacttggttccaaaaggcgtcaagacttcatggaagttccacagtgaaacgtgcccgtctcgatagggttcttgcctcgactgattggagagtcttgttccccaatgcaattgtggagctactatcggtttgtacatcagatcataaaccaatcattcttaatacgattgggggagcgagatgcctaagaccccagtttaagtatgagttgatgtggggaagacagccgagatgtttttgggtagtccgtaatgcttggagggaggagctccacgccaacccaatgcccaatctctactgaaatctaaagaagacgaaggatcatttgctgaagtggaataaggatcagtttcggaaggtaagacagcaagttgaagaagcaaagtcggctttgggtaagattgaggcaaattatctcatacaagaggaagttctgggggaggccaaggctaaccttagggaggctcttactacagaggagatcttgtggaaacaaaaatctcgcgtggcttggctcaaacacggggatagttgtacaaaaaattttcatggcttcaacagcgatcggcatagaagaaattacatccaaaacagtgaaaaactgagagtgggggactgggttacgggatat

SEQ ID NO: 193584 - DNA, 1914 bp, Cannabis indica
cagccatattattattgttcatcaaccgactttacttgcttatgcataatgcatgccttatttaatagccatagtttgaagcaagtaacggctactgtagaagtgatgtgtactcctgaactgcagatgtggttgagacgtccaatctgtatcttaatttcccgctagagtctttatcacattgtacgaacaaggattttcgttgatctggtcacttaaagtgaccactataatacaaaacaaaatggcattttttctttattttggtaataatttacttttttgctatcatataaaaaattaaaacaaaaagaaagactttaaatgtacaaaaacaacataaatacataaaacgtgcactttaaaaatttatacattttgaaaatatattacatgaaatcatacattttaatttaatcattaaataatatagggacacgattttgttccgtgattgtactttcacggaatgtattccgtgatgtacggcagccgttgaatcggagagttatttgatttgagggctgagattgatctaggggtaattagggttaaaaaatagtaacataccacactcatggaacaaattgtagagccccctatctacctaagattttgccattgacggcaaaggcaaggatgctatcgaagagaagttgaaagatttctcctccgaccacaatgctatgagcataactcttagggaaaatgctctcgtggaggttcagggtattaactactaggctctttgatgactttgcctttgcgaggctatcctttttattaactattttttttctatgcagttatgacgagcacgcttaagggcatgctgaagaggaagttgggtgactcttccgaagagacgtctcctactaggcaacatagacaggaagacgcccctcctttgaccagttcagacttgagtctcaaattcccccgtctcgggcttggataaaaaattccatcagattcaaccctagaggtggaagaattatggatctggaggtaccaaactctctttctgtagagtgaaccccgtacaaaaaattttcaaattctcacccacagttgctcgatcaaagcttgctaaatcatccaaagacacttttggtgttgagattgttaacattgagaggcttaattttcttatgcctgctcttgagggtcaccttggaaaatcaaacaagactaccatggcggtgcagcctgagacaggataggccaatgatgtgatctgtgtttattaagactatttaatggtcgaggtaaataagcaattgaaaggatgtgatcacctacccctcgaacttctgattggaggcctactgaaggaacataccagagtgagtttgtaacctttaaattgttgcatggtacatgctattcaatcttttaacttgccaatttttttaattctttttttattttttagacctacatgaagctcggatatgcttattttcaagccaaatctacagctctccagtccaattttgcgttcaccgagctggaaaaagctttgaaagccaccaaggatgaagttgaccagagaagcacccaacttgatgaggtgaataagcaactaactatcgcaaataacaagatcaaggagttaaggtagcacctatacaacatgtcgtatgctacaaagttagaagaagatctggaacaagagtaaaaaaaggttccgtgaacttaccaacgagagagaaggcctccagaaactcctccaaaataaagagacaaatattaaggatctgactagaactctcatggaaaaggaggaatcccactagaatgagaagtcaactcttgaagaggaagaaaaataagttaatgaggtgtttgcagctaagagagatgcccacgctaaagacataaaacatcacgagtctattgctgcggaagtac

SEQ ID NO: 193585 - DNA, 2758 bp, Cannabis indica
tatttataactaaccctcagatgactctatccgataaagggactctctcacagtgaaaatgcttagttgaatactaattttggcattcttggacatttttgttgttcgaaactgtgaaaagagcccactttattggtagaattttgagcttgctattggagagatgtccaagttggtgtagttctccaaaaaagaactattgggggtgcaattccttctctctcccgtttacttttttaacttttgttttgtctacaggtatacgcaaagaatttagccatttcgggtggcctttgttttgttttggttgtacactgttgtaatgatgctttgttggttaattgtatgtatttgtgattatcaaatgattctcattgattctgatatttcttgcagatggatgccaccacacccaaatactccaaggccaggtatgaggaaatcgtgaaggaagtctcttcctacttgaagaaggttgggtacaaccctgacaaaatcccattcgttcccatctctggtttcgaaggagacaacatgattgagaggtctaccaaccttgactggtacaagggtccaactcttcttgaagctcttgacaatctctctgagcccaagagaccctcagacaagccactccgtcttccacttcaggatgtctacaagattggtggtattggaactgtgccagtgggtcgtgttgagactggtgtcatcaagcctggtatggttgtcacctttgctcccaccggtctgaccactgaggtcaagtcagttgagatgcaccacgaggctcttctcgaggctcttcccggtgacaatgttgggttcaatgttaagaatgtggcagttaaggatctcaagcgtggttacgttgcatccaactccaaggatgatcccgccaaggaggcagccaacttcactgctcaggtcattatcatgaaccaccccggtcaaattggcaacggctatgccccagttctcgactgccacacctcccacattgctgtcaagttttctgaaatcctaaccaagattgaccgtaggtctggtaaggagctcgagaaggagccaaagttcttgaagaacggtgatgcaggtatggttaagatggttccaactaagcccatggtggttgaaacctttgctgagtacccaccactcggacgttttgctgtccgtgacatgcgtcaaaccgttgctgttggtgtcatcaagagtgtggagaagaaggacccatcaggagctaaggtgaccaagtctgctgccaagaagaagtgacttttgcaaatggaaatcgctttgaatggtgtttggaagaactatttatctgtttatcgaaataagttgtcattttatttttactgtgttgttttgaactatctattcggttatgtttgggatcgtcttgtttgtctgtgctcgctttccagtcgttgcactcagaattgggtgctcgaccggcggtggtagcattccgtttgagtttgttttgttttgcacttagttgtgcttgaacagtattatttatcagttttacaatatcctactttttattttgttacattgtgtttttctggttttttctatctgttatgtctttttatatgcatcttttgatttttaaaggaatggtcaatcgatattactggatacatcatgagctgttgaactaagtacagtacatagaaataataaagttatgatcttcactaaaaaaatcttaatggagatgaggatggtgaagcataaaaaccttcaatagaaaaaaagcttaaagcaaaactcaatctcttgctaatgaaacaccctcgatcagtgtggctgccacactctccttaagcaagctcaaaaaacttacaccgagtctctgaaaagcttcccgaaatatcaaaaatggagaaaagtaatagaagacacccaatagtattttgcaaaaatggttagactttttatttgttaaatgataaattgaactttgtatctttttaaatagtactcttaattgattttttgtcaaaataaaattttataataatttgatgtagaagctttatgataaaaccgattactttatctattcgtgttaggaattatcttcaaattgattatattaaaagaaattatcaaagatcaaattaagtgactgagaaagtggcttattgcataggttattggctgattgtggacaaaacttcactagtaatttcaaagatagaattcggtagtatatcgtagggagattcaacagtgaaagagaggaagggatgctacttcaattgagaaatatagagaagctgaaaaaaactcagtttgagatttagactcaaagagaagtgttttagaggcaaagatccaagcaactttggcttaaattaggtgatcaaaatagtaagtattttcatgcttatgctactgctagaaaaaggcacaattctgtatctcaacttcaagattcgcatagtaattggattagttgactccggatttttacgagcattgttggagtattgtaggatcagggttactggtgatatgccacacggtcttaatgatactaatatgattcttaataccaaagatcaaaaatctacttccatgaacgatcttagaccgacatcactttgtaatgtcctcaataaaattctgtccaaagttcttgccaaccgtctaaaggttggttttactgcaacttatttcagacaaccaaagtgctttcgttcctagaaggttgatcactgacaatattatgatctctttt

SEQ ID NO: 193586 - DNA, 1791 bp, Cannabis indica
atttctttgtgatgaatactatcaaagtgacttatattttactaataaaatactatcaaagttgaggtttacaaaagcattcatactattttcgattcattattttacaaaagctatttattagattctatatattaattgttaaatgatattttaactttgtattttttaaaatgtataaaatagtatcgtgagtttaatttttaactaatttattttaatgtaatcaatttaaaaataattttttacatgaacagatacagaattgaataaattttatcataatacttctaaattgaattattattaaattttatattaacaaaaaatcaattgatagtattattttgtataatttaagaaaatataatataatttattatttaacaaaacaaaaaatttaatcggtaatttttacaaaatacacaaatcaattattaattttaagtaatttttgcaaactaaaactaaaacagtacgtagggtttacacacatatttaaatgataatcctttctaataatgaattaattaatttcatgtaaataataaatatatatatacacatatgataagatggaataaaaaaaaagtaatctaagatatatagagattactaaaacgtgaagatttttttaaatttttttattaaagaaacgtgaaaaaatttaaagccaatatataactaatgaggcaatggcaacgtgtacgtcctagctggcgttgagatcgactcgatcggctatatcaaattaactagtaattttcagtcattctagaatgtagttgtagtcttgcgcggcccaaccaataatggtatgacgcgtgtccaaattggctgccctttcatgcacgatgcttaattaatttatatatatatataaataaataataatgatatttgatgttgaataattatgagtagatgatgacgagagacaggacgattccatttatggaccaaagtgataatagccgatcagtactgtttaactggaggctcttttttaaacacgttcacttttctgtgactttaacttcatactcaattgttttctctctcatctctctatatatcttcatctctatcatgtataataccccacattttctttctcatgtactcagtcatcaccttataatttcttagtcataatgatttgtgtgtgtcgatcgacaatacggattactaaaaatatatattattttttatatatatatttctttaataatgtatagttggtcgacttcaatgttttttaaatatatattatataagctcggtttagtgggtcatttattcaaagtactttatggatatattgaggaatatgtggaggataatgagctgagctatgttttagtgtttatttatagagagacttgatgatcatgagcaaacgaatatctttccataaatgtctaaaatcctgtaaattatttataaatctgagataatttaataagtatgataaactaaaataaattaggtcagagacccgaccactagacacgaaaatcctctaaagaggcatttaatttatagctaaagaatgtgctaaaacattattaactcttttacaataaaaaataaaaatactagagaaagacttccaaacatgtaaaaatgtctttaaagaacaatatcatactcatttaaaacttacatcttattagaaactaaatttactaaatataaacagtcagtaaatacgataatacgagaataacagagacgcctacatagaagagagaccttgtagcatagccgaagcctccaccacatgcggtt

SEQ ID NO: 193587 - DNA, 1608 bp, Cannabis indica
tcttcttcagatgatggtatatgatagttgataacaccatgcttttattcttatattgaatatttatgattgctttctgactttgctacttttctttttacaaacatgtcttctaggttgggagttcttgcaggtggaccttcagatgagcctaccagacgggtgagggccaaggtggctaggacctcctgtggtgaggatgctgccggaccatcactgcctcctcctccactagggcctgcaccaaccagatagcctatgatacaacttgccggccaaggtacacgaaggcccagtagaggagctgggtcagctgttggacagaaggctgctgagtcagccaaccggtgcataagagggttctttctttcttggatgagactctaaaagagttgggtgatggtggacttgatagactttactcttccaggattcgagatctttctttggtgagttatactttcagctctattcatcttcttggcactgtataggctggccaaccatggtgcttcttgcatgtggctggctggcattggaagcctacatgggggtctgaccggccatggcggtctaaagaggggactggctggccagagttgtgaagtttgataccgatgttcctttgctttatttttgggccatgatgaaattgagctcatctcgagatatctctaaggggtcttcaaatgctttttaggagcctgtgaactgtgaagatcttggaggcttcgcttgcaacaaaagacaaagccaattctgagctagaggcccttatggcagagaggctaagaatggtttttgggttggagaccatgcttggtgccaggaatatagagaacaccaccaaggcctccctcatctcttgtttacaaactaaacttgaggatcacaagaagaagttataggttgccacctggtttgtaccctggctggaccgattcgctaacagtctgctctcatacttttcgtctactatgaccagaagtaaaccacatcttgctagcattatcctttcatgaaaaggaaagaagaaaagaccaagccaacttaaagcgacatgtttgccaacaaaagcttgcaaggtgcttcagcaaacaagtctgagaaaggaaagtcttcttaagcgatttagtgctctaaagaatattccttgacaacaaagatcatgcaacaagcatgcttagacccaactgaaaaggttcgcatcgagttaccagataacaataaaagtgcatacaagcctggagagtacaacgaaaacttggagttggctcttctaccaaagtgttggaatagagaacatctcggtaagtgctctcactagccaacttgtatagtggttcctctaacgtttcaccgtccatgaatccataaaaaaatctagtatccatcgctcttcagcaagggcctcccatcactcttcagtgatggcctttgcctggtaagccctgcagaggtagccaaatataaaagagatagtacccatcgctttttagcatggcctcccatcactcttcagtgatgtctgttgcgcagtaggccacgtaggggtagccaacacatgattttaaaagcggacacaaagctgtaagcttttgttacaca

SEQ ID NO: 193588 - DNA, 1917 bp, Cannabis indica
gacatatcttggtgagtacagtaaaggcctgtggagatttaagaatatattcatagttacagacaatgtatttttttttttttgtcactgctttctaaaaccaaggaaccaccatttgttcaatacctgaaagtgcaaagcttgagagggctaggccgctagtaagaatgcccacaacttcccaaggaggcaatccaagatcaacggaggaaagagtcatgcaaactgcaggagacataaaggcaattgtttggcaaagttttcgcacctgcatgaatgcatttgaaaatattagcaacaaatctagctttaccagtttatctattaacatgtttactcattaaaaattgtgtgtttgtggtttaaggtctaaataaacacatacacatcggagattggagcagcaaaatgattttgcaacagaagctatgggagctacatggtagtaatgcaatttttctaactttagaaaactaaaatatatattatgtattattacaaaaagagattgttcgacaatgaatgtcaggtatcatcacgaacatttcataatttctccttaccgtagtggtttcaactccatttgcaatcaagttatcagcaatctgtgaggcaatactagtcacaacaactgaagccaaaggaggtagaatggaaacctgaaacaagtacatgataacaatcaaataccaaactccacaaacatttgtaagcacatttcacaagaaatggtcaatagaatttcagagcacgctacttgaaaccacaataatatagcttattgtgcaaatcagagatcatgtcatattttgtctttttatttatttaattcatattattttattttatttttttgtaataagtactagttgggcttcatactattagagaagctgatgattctcccctcaaaaagttaagtataagaaaataatgtacgcatgcaaacagttgtcttgcaaataatgttcaataaatacatgaaaactctttttcatgaaatttatcatccatgaatctcttgtacaagatgactaaaatgaaattttgtttcattttatcactttttttgagcttaagttttctgattcagaatttcaccatccaagagatgaatctattgataaggaaggaacttaaaaaacaagatgaatggatgcgacaaaatgaccagaaaaaaggaacatttggcttacccatgcagcttcggtcaaattcaggctcagctcctcactgcacacgcattgaatagaaactcagtttcctaaggactcattattcaggggaaacatgtatttgttgaatgcatggggtatcataccaccacatataatttgttatacatgttttaccaaaatattaaaaacactaatggttttcttttatgacattattgaatatacaaatacatattctgtgcattatgggaaggatcgcatagagtacctgaaataagtaggaagccatgataagcacgtatagtgaccccaacttccacaaaaatgagcgtataccatagcccatactgctggagttcgaaaaaatgccttccatggtacaccctgctcaatacaagagagcaattaagaaatggcaacagatcataagatgaaacccgaagaaaacgaccactgaacaatttatggaattttataaaaattaagcttccaacctagatttataaacttataataaccttgtttgggtatctactagccaagaatatctgcagtgtccattgactaaatttgacatatattatgttatataaaacttcacaaccattaaatttctaaattgacccacacagcataccttcagtgaatcacccaactctcccaaagaatcattccaatttttgttcacggatttagtctgggaacctataaaataattgggagaaaaggaaagaataag

SEQ ID NO: 193589 - DNA, 1251 bp, Cannabis indica
attcttggattttacatgacatagagaaagtggtcaatcacatgtttatgagaagtacgtaatgtgatctttatagaattaattaacctatatttgcatacgtacgtaatatagagttactatatggtgagggttttatttggtagaaagtaataataataaaatgaggttgtatgtggtgcagagctatatgagcaggcaataaagtatgaaaaaggatcctttattacgtcgaatggtgccttggctactctctcgggagccaagaccggtcggtccccaagagataaacgcgttgttaaggatgacaccactgaggatgagctttggtggggaaagtaagttgtttctttcatttttctttattattctctttatttaataatattattatattttagtaatttaataattatggtttgatttactcgtttcaggggctcacctaacattgaaatggacgagcacacatttatggtgaatagggaaagagctgtggactacttgaattccttggacaaggtcatacatttttctattttttcttacaattaattaattcatggtatggtttttttttgtccaagtatctttatgaggccacacataacttaataagtacatggctctattgggactactattttaggtcacacaactatttgttgtggggttcacagaaaaaaagaaaaaaaactatttgtgggggtacatgtacatggagttaattggtgaaacccctttacatctttccattttatgatggtgatggggggcaattggtatctttttcgtcctcttctgtatatttattatgggccaagagttacactctgattctttgggagtagcaatcttgtcgtttatgaatgattccacttatctacgtttaagcggttctccttagttattcttgtccttgtgtcgttttccacattatacaagatgtcttgtctaccgtagggttatggggagggacatagcatatattgtactctagagaacaaaaacagatgtatgtaaataagattgtaggtttacttactttttactaaattgaaccaacaaataacaccttccctggtttctttctttcttcagttctaattttatggagtaaaatagaggattaagatgctaattcaaagctaagcaacccttcacgtttaacttaattaaagtcttaattctaatcatttcttttgttaattacttaataatttgatttggggggtgggggtgggtacacac

SEQ ID NO: 193590 - DNA, 3706 bp, Cannabis indica
ccgaaacaccctttttaagaaatgcacggtagacttttaccaaaaatatttatctatataaaaagtatatctattgaagatttattttataatcatttgaaactagttttggaatatagtaaatttagtaatcaaacatttttattatctgtttcactaaatgcaaatatagtgagaaagagtgtaatgtagttaatacttacccaaagaagaccaataacggtatcctcactaagatcatacttatccttcaaggtgagtaaggaagccacaaaatgctgtttggaagaatcatcacttgtttggccagctagagtgtgttcatccataatcattttagtgagtctatctcttctagcaccgtgtttggcaaatgcctcttcttctattgggaacatccaacgtacccaatcaatgtgttcagccatgtttagggatgcccctaacttaatcccatttcccactattgctttgaactcttttccttgctcgtctatctcgccttccgaattcataaaccgtttcccaaacactagcctcgttatgttgttgaaagccactgcccctagaaaatccctcactggtaaacttttttcatggttttctgtcaataagtaagcaagattattaataatgtgtacaattcaacgtgtttgttcgatcatataattacactctcaaacaaaataatactatttttagtagaaaaattatcaataaaatctctaaattattagctttgagtgtaatttagactaattacaagatattgtatgctcattcgatcaagtgaaaataataaaaaaaaatcttttaataaatatacatattttttgaatttttttaaaaatactatttatttttataataagccttcaaaaaatttatttttctatattattgatatgcttaaccctatgcatcggcgagttaggcctatgctaaggtctcacctagcccagaaatctaaaattttttcttcccttttttaaaatatatttattttttttattaattttgaaaaatataatttttttttctaaataaaagcttaaatatatttttgtttcttatgacccacttaatttaattttaaggctgaccttaattattgacatataatattattccaattacattagtgcctctagttattaaattgcttaaatttacgtacaacaacccaaaataatcatttaccaatagaaatacctaaatgaatttatattggggatatgcattacctatatcaaattatagcttacccccaaaaaaaaaatgaaaaaataaaaagagaaaaatacattttccaactaaatttggtagacatcaaccaaatcaattatgatttttccttgtcaattcaagtaaattagaaaccaagctaacaaattattgaaaagaaaaataaactaattaaattattcattttaaaactcaagctaaatatataaatataattaataattacaagtcaatgttgcccaccagcaagaggactatatattattgttaacaaacacccacatgggatcgtgcaaaaatactgagtccttaaccatgtgactatatttgtgtaattttactattttaatttttatgtgtaatcaaatataacaatgaaaattttaaataaaaaattatttgaattccaaattatcaaacaattcatagatgttataattttcctagtcaataatttgttctatgtttgtttttagtagattgattctttgtcacaaggtggttgtcgaaattgttgacttggacaaaaataatgattcttaaattggaaaaattgaactaactcttatttatatttaactccattcacacaatgtctcatctaatcatcaccaacctcattaaaatactttctgatctatactgagtaagtaatgcaatgacatttatttaattgatcataatttatcaaaataatttatttaatttcattattggcattatatattatattcatcataatttttgtagattttcggcatacatcaacattgtcacaagtcttaaattacaagaaaaaatgtgtgtaattgatttacatttgcaataatagatatgtagaccttatttaaaattaacctataactaaaataaagattacttaaaatttttgttatgaactttataatgttatttaaatttttaagactgttaaaaatctattatgaattattaagaatgttatatttgaaagtttttattcaattttaataataataaaaaaaaaagtgataaaagtttatggcgcatgataaatttgagagatatgatttggtaaatattaatatttggaaaacataatttaatatataaataattaccgatttagtaaaattaaataaaattggataaaaatctttaatttaataatctgaatagtttaaaaaaatattaatagtcaaaaaaatttagcaagatgatttaacaaattaaattttaaggagtaaaaatactagcctaaatgcacataacttgaatgtgtgtgttgcattattactttgagacaaataaattgtaaaaattttatattatatttttaagatgtgaatataccataactcatactatcctatattttttttaaaaaaaattaaattataaatccaatattataaattataataaactcaaattaacttgtaatggcatagtaatggataatataataatattttacaaataataataaaataaaaaagaagatataatttatgaagaaatgacttaccaggattgacagagtctttgaaaatagattcaaccatggccataacctcatcttccctaattggccttagagcttcaagcatcttaggtgtgaaaagctcaagtgtacaaacctttctcacctttacatagtgaggcccataatcggcccaaataagatccttcccgtctctactgaacctcgccgacgatctggtccggtgccggtcggcgagtttgtggtcatgttctttcagaacctctttagccagttccgagttggaaacgacgacgtttagagtggtcccaaaccaaactgatataatgggcccatatgattgggcccactccgcgaaacatcggaaccttaccggttttatatcgtagagatttccgactatgggcttgggtcttgggcctggtgggagcttgtatctgaggctgtagtagagattgtatgtgatgaggatcactataattgagatgggtatagctattagaagaatagccatattgttatgtgcttgttttttttcttttctctttctcaatccaatcttgtttaatatgtagatgtagttatatatatgcttgattttggagttggtaaggatgaggttggatatatttatctatggatgaatttgtaagagagaaaaatagtcaccactacccttagctaggcaagtcaaatgtatggtatagagatgattatagtgtgtggaaatggggcccatttggagttggtgtgaggttggtgagtagatgatttgatgttgctttggtagttggtgaaagctgagaattaatggaagtggggcctattggagttggtgaggggtagagatgtaattttagttcatggggaattgggttgtgtcttcaaggatatgtatgataagataagccccttgttttagtttggtggtaataatattttgagtaatgattatatcaaaacaaaaataataataat

SEQ ID NO: 193591 - DNA, 840 bp, Cannabis indica
aaagcccacaagtattattaatatccttgtccttatccccactaatatcaacctccttattgaccaaagggtaaaccaagtcaactgaggcaaccaagagacaagtcgtcttcaacatattagagggaaagatagcaggtagctttccatccattttgccgtttgattcaaaatcattaccagaatcggtaatgacccgcgtacgatctacaagctgggctttgggattccaagaaaccgtctgcatcttgttcttcccaacatgagcacgagaggtcaccatcttgcctcgaaatgatccacgagcatgtttgccagccaaccgaatagagctaatgccaaccacgacaccgatcgccggagaagcaccagttatcaaccgattgctaaccagtacgtcggacgaagacccaataccattacccattttgcaccagtaaaaacatcctgataattcgaaaccgtggatagccagggtccgtacaagggatgggacaccttctctgttctccaccctcaccggagaattcagagagcaaccactacgaagatggcccaagcagccacatataaagcagaaaagaccagttttctcaaactaaaattgaagccaacgattgacaccagttaccaaatcgaaataacaacccgagataagcggtttgtagtattaacatctacccgcaccttgagataattgttccacgaggcaggttttccttcataatataactatatatagatacagacttagtctggtagtggatactgatcaaacttgagaaagaagaagaaaagggaaactcatgggggtatattgctcctcggagagaggtgaac

SEQ ID NO: 193592 - DNA, 2759 bp, Cannabis indica
atagtattttttttttattttatcaacgccaagcaagggttgatgataatgaattatgatatatatcgtgcctattttttagtaaaagatattaagggtgcttagtactttcttacttcttacgtaataatattgttaaagaagttttaattacaacttttagtcaatctccacatcatgaattaatgtcgaaatatttttttttcaatttttctttttcataacagtatttgttatagttacagtatcatctctgtaaatttttaatttaaacatatattcgccattgtaaactatttgaaatttttaaaaagtctacaaagatgatgttataaacataacaaattccgctatgaaaaaaatatttctgtatgtcttttcgagcacaaaaattaactaagagattaatgaaaaaaccaacaataacactcttaatataattaagtattaagtcactagtaatttaatataataaattatttggaactagaacatgtttggttgattataatcaatattgttatagaatcaaagtcaccgttacaatatttgatttgtgtttctaacttttgtaatggaatttcattgtaatgggcattacaccaatcttatgaattcttattacactcttatacctcataaatgagaattataatgacaactaaataataaaaagacaattttactttttttttttcttttgaaattataaataaataaataaataaataaataaaacaaggatatttttattaattcaattctaagtacaatacttataacaaaataaatcaaacatgctaacaatatatctattactattaccattaccattacatttcagtaaactaaacaccacatatttaaacaaataacattgtgtttttacaaaggacaaacgtaagagtgagggattatgaaaaaatgtgtaaggctgaagggttatttaaggaatttgagtaaagtagagggcagctccgtaatttcagtgaggagatattttcagatctctaaaatatcttcgtctgtgaatgaaatatctatcggcgccacgtgatagtggaccctaccctaacctaaccaggccttgaatgccgcgtccctcaaccacagttcactactcgccaaccattataaaaggtatcgttgtagggagattctaaacatagtcttgttctattatctcctacttttctcctttttattatatttagggtttcctttttactcttccttctccaaatgggttccgccgacgtcgaatacagatgtttcgtcggagggctcgcatgggccaccgacagcaagtctctggaggatgctttctctacctttggcgaaatccttgaatcgaaggtcggtttgttgcagagatcggatctgacccgatttggatttgtcgatcccatctgatctgtcttctcttctgctctgtcctctcatctcatctgtgttttgttactctactactgctacttgatctattctgttactataatgatacatatttttctcaaactatatatcggtacgttcatcgtcatcttttacctaaagacgaagatccgatcggtttatttgttttattaatcttttgattttattttagattttgttctggtctagatctaactgtgttgttggttttgtttcagatcattaacgatcgtgagactggaagatcaaggggattcggattcgttactttctctaacgaaaaggcgatgagagatgccatcgagggcatgaacggccaagatcttgatggacgtaatatcaccgttaacgaggcccaatcgcgcggaagcggtggtggcggcggcggtggtggttacagccgcggaggtggaggtggaggctacgggggtggtggtggctacagccgcgggggcggtggtggtggatacggtggtggccgtcgtgagggaggtggatacggaggtgagagtggtggtggatacggaggccgacgtgaaggtggtggctatggagatggtggtggttcccgttactccaacagaggaagtggtggtggcgccgccgaaggcaactggagaagttagatcttaagggtttgataatactcgttgctttagggtttggttggttcgtaatgtgttttggttctgtttggttcagtttggttagctctatttttgatctatggggtctgtgatgctgctctggtgaaaatagatgttctatctcgttactttttcctgaaatattaacgacttttccttttacatatatgcataatcacaccttttctatttcttgttttttctaattcaatcttcccttttattttataaccaaaaaatatataataaacaattcgaatattattatcctatgcggtattctaatgctattaatcaattacatcagaaagagttttttcagaactaattgtggttcaaaattgcccttggtgacattgtggtacaaaatcgtccttgaataggaatttcacaagcagccactcctttcatctatagctgcattatatataatttgtagtaatagctgtctactggtggaatccaaaacttctttttttatttggcctaaccccttgctgaattggaagactttctagacaaatttacatattccgcaaacaatgccgttaaaatttcgaaacgagcttttacttgacttgaaaacaattgaacagaaatacctttatatcatcaacatttcaatatttatcacaaaattattttaaaggaaagtttttcttagttttttttttt

SEQ ID NO: 193593 - DNA, 1492 bp, Cannabis indica
cgtttttagaatcgtggaagtatcatagtcattacgagggggcgtggcatcaagatcactcgaaaaatgtccagaaagcccactgacatgtcccccatccgatgtgtccaggtttagataaaaagcacccaattcaataagccaaggtgattgcaagagttcaatatgttctgattgcatctttgatctgaaattcttgccattttcagagcaatgtatctgcagtaaaagagtaagaatcatcagaacaattaattacatgattacataaaaacaaaatgagggaagatctgtagactatgattggctaggccatactttatcatacttcttaaggatcttcctgatggcaattgcattcattgtagcatattcaatcagcatctttccttcttctaccatgttctgttgatcattcttgaaacatttacgcaattgcattaagtatctctgcattccagtggaaatgtgaagaggacggaggtctctgactctggaactaaaacatccaacaatctctaaggcttccttcatcaactctgagaaaaacgtctgatcacacactaagaaaatggagaaaaagcttcactcattagagaataaaatcacttatgatgcacaaatttcaaactgataaatcccatataattaggcattaactacttctagactacacattatggtttcagtcactataataataaacctctagggtctttagaccaaacatctaattgtcttccaaagtcaaagagcacacaattagtatgacagggaagaaaaagcttcactcattagagaataaaatcacttatgatgtacaaatttcaaactgataaaacccatataattaggccttaactacttctagactaaacattatggtttcagtcactataataataaacctttagggtctttagaccaaacatctaattgtcttccaaagtcaaacagcacataattagtatgacagggaagaaagagcaacatattccttacattctctgaaactacatggccagttgaaaatccttcccttaaagtacaataaacttcctcattgatgttgacagtagtagtgataaagataataaaacaaatacatgcaagcaatttcccattaacttcaacaaattatcaagcagaataaagaatacaattaataattgtcttattccggcataaggagattctgctgagcacccataactgagataccaaaatcttgaacttaatcctaattggttagtttctaatacaacgacaaagattttctaggtaggaaagatagatgctagtcaaaacttaattcaaacttagtaccatatatttaagagcattgtattgtacaaatccttgaaaaaatattgattaatcaatttctctcaatacgtgggcacaccattatactattagtacggcatattcttccacaggcattaaatatacaaaaccgaagatcctaaacaatatttataataataaatta

SEQ ID NO: 193594 - DNA, 1254 bp, Cannabis indica
tgttaagtgaacattttatatttttacctatatcagttagaattacaaatggatgtgattctgctcttcttatgacttggtttattgtgtctgtaatgcgtatgtgaattttttgttcatcaggtatttcatgccacccatgaattatgccttgagaaatgtttactataatgcctcctatagaaatagaatattgccactaattgctaccaggatgttttaaattacttatttttgtgttgtgtttttatttcttatttctgctttctctctccagcttatgcagagattgtgctgaatttgcctcgagctctgcagcaaatatttcagcagagggcttccactacttaagtactgcttctctctctctctctctctcttcttctataatggttgatttattggactccagagatcttaaagaaaattatcatgaaaatgagatatatagcattactcgtctattctaaattaaaaaaaaaagttattcttatcaccttttctgtatgtatatatattagaaacatatgactttagttttgttactgtcactgactatttgtatcacactgtttgaacatattgatatgacttcaatatcaataacccaatggtttacatttttacataaagaatgaaattattgtgtactattaagatgtccaaatcttttcaatcaattactaattagtatttattttctttagtttcttaattcattccattgaaatgaagcactaagaaaattcttatttttttcttattttttttctatacattattagcacaagtttctaactaatatatatatatatatatatttatatttatatatatatatataatgtttgttaaaacctttgaatcgttttaatgatacactatacctatacttatcgactgaaaatacctttgaactagtcattttttatttgtttatactgtaagaattaatatttatataatatactttatctctgtacttataaatatatatctgttcacatgtgtaaacatataattaggaaaatttacataaaaatataaaaatctaaaaatattacccctatacttttattattgttatattcttacctttgtttttgtttttacatgcacgatgtcattatataactttcacacattatttatttttcctccctttttatcatctctctctcttgttttttttttttccaatttcattttcatttttctttgtatttttctgtttgaaaacttctcccatgatca

SEQ ID NO: 193595 - DNA, 1506 bp, Cannabis indica
tttctttctgcctgaagtgaccggcacaatgattcaagcttctctttctgatttttagttttttctaaatgtttcttcaaccgctcacgctggtcagaaaaatgaaatttcagttggaattttagtcttggagaaaaagattaaccccacttggcaaaaacaaaaaaccagcagtaatatatactcaaagcaggctggagtaaaccaaaataggaatatagtgttaaactagtgagacaggaaagagatttgtgtggcgggtggatggggggcttgcggaggtcgagttatatgatgatgttcaaaattatctcctactttttaacaccagctgatgattttttcccttttaagaaacaaacttgtattaaatgtgaagataatgcaaggattaaatgtcaagatatacaaggaaaatgtggtatgaaaaaacccgacaaaccaactgataaataagtttaatgcaataaatatatatatatatatattacctcgtcaacaagctcaataagtgtaatgtctgatttctcagtcttgctcttcaagaatgaattttccttcttcagttccttaattgattttgccatctatgttttagatagacaagaagcagacagctacgtaaatataaacactgataacaaaacaatcaaaattgaatgtcttaatcagatgattcaagaatataccttctgaatctcctgtttaaaagtttcaaaaacctcattgctttttaacaatgcttcctgtaaaaagggattttttgaaaaaataaaaaattaataaacaaatgatcaaaaatatagccatacaattacaatatgagcactagtatgtggtgcaccattgagcccttccacacaggttgaaaaagattcactcgcataaggtatgctcataaaagcataagtagaaaatacaaggattggtgagttttttataaattgagaaatgctaaaaggcacccacgatgcctagcacctttatgagatgtaatatcatcattggtacaatttaatatcggattcacttattttaatttaataaagattataaagaaccgctaaccaattataaaatgtcatatcataaaggtgctgagcactttggtgccccataacaatgctcttattttatgcatatacactattattaataaaacaaaccattgcaagcaactttgccacctttaataaaatacaaggcaacaagcttgggatttcctttaaccaatgaaggaaacaatgaacttgtgtaaacaattttttagtttataactatatacatagtgagtgtgtactttgaaaatagggatgcacacacaacacacaccatggtgcagaaaatataggtcttttatatgacagaaaatataggtcttttatttgacgggtattatacattagagattcttgataagaagaattatacctagaaagctgttagacgactatgcatcgacttgtttaacaaagcattggaatcaaaatatatatattagtgagt

SEQ ID NO: 193596 - DNA, 847 bp, Cannabis indica
ttaatctaaaattactatgcacacatggaaaaagaaaactataaatacttaataaatattgaaattcaaattcaaaccttctctacataggattagtctctctctctacgttggatcatatagagcacaaaccacaaaggtgtggctatgccttgaagcttcaaccaataacccacacacaccttcaaaaccatacatttcttcatataaatatgaaatgcttcaatttcacagcctccagggactggttataccgccactccttcaccaccgccggaatgcgctccctcaccaccgatctcggcaacggcaccgtcatgcattgctgggccccaaaacaaccaacaacacgcaatcccaccgccctttcttcccgcccagctctcgtcctcctccacggcttcggcgccaacgccatgtggcaatacggcgatcacctccgtcatctcacggcccgattcgacgtttacgtgccggacctcctcttcttcggcggatctcatacggaggctgcggataggagcgaggctttccaggctcggtgcgtgaagagattgttggaagaggggcacggggtgaggaggatgaggttggttgggatcagctacggtggattcgtggcgtacagtatggcggcgcagttccctgagatggttgagggattggtgttgtgctgcactggggtttgccttgaggaatcggacatggcggatgggatgtttagggttccggatttggaagaggcggcgtcgattttgttgccccaaacgcccaataagcttagggagttgatgcggttgtcctttgttaagcctgctagggttgttccctcttgttttctctccga

SEQ ID NO: 193597 - DNA, 1374 bp, Cannabis indica
acttttaaactaatttttcacactatattcatatgtttataaccaaataaaatgtaattcaattaattagaatgaactaaatattatcatatacaactaaacacatttacaagcttttaaatactctgattttttttcattttaatactcagttaattaaattattttgaactcctcgtactaaatattaccataatattttctctttctttgttttttttacccatcctgcaaaagatatttccttatctagtcattttagacagctaagagtagaaaattatataaattattttcaaaaaggaaaaaaaatgtatataatatagtgatgttgagaaatgagaatggagaaagaaaataaatggtaactttgaggtattgggagtagaatcttaggttaacttgatagaatctaaaggtggggtagggagaatgtttgaatgaataaaagcatctttaaataaaataataaataaataaatgtaaataaaaaaattatgcataacagctctttgaagcaatgttaattccttggacaaaacatgcatgattaagcttaatttgactaatagaatgattgatttaacctcacataagatcctttcacttgaagttgaaaccattccaaattaatccaatagggtgtaaaaaatatgactaaaaccaattcttttttgttttttgtttttttttaccaaaaggtaaaaaaggtgacactatttttggactagcaatattggacaagttgaattcttgatttggaaaagagaacagaagagggaagatagatagatccaaaggaataataatgtagaaagaaaataacaagatccgaaattttattaggagagaaagaagataaggcctttttttctttctcttttcttttatgttgtttattttgtgtaccatatatgtacctcattccttcattacattccttcaaaagtttggttattaagtctcaactttatgaccaaattaggaaatttgcctataattcaatcaagacaaaagtgtatcattatgctgcatgaagacctatttgttgtcttcattgaacatatatatataaattttttctacctcaaatttctctttaattaatatataaaaaagctcatcttttttcttcttttcttctaaggtggcttggaaagttcataaagatttgtactttataataagaaaattagtaatatatgatgataataatgatgttttgggttatgcttgttcatgtatctggaaactctagcttgtgaatatagaacaaacttagattaaatatgattagtgaaaaaacatataaaaaagtgcatatattgtaccctttaggtcaatgagaataatatgtataattttttctttttt

SEQ ID NO: 193598 - DNA, 2636 bp, Cannabis indica
gttaacaaacaccaccttaataaaatgtaaatgatggttataaaacctgtttgacgtctgtttcagtaatttttccatccatgtttttgtcacacctgccaagcaaaccaaaaggaaataaacattagaaatgaaacaaattatattatatggtataagactataattattttcttaagtgaggtattggaaattattacaagtcaaagaagatctttatccttgaatcaatacaaggatcagtcaaacgacaccagtaactataaagttcttgttttgttatacaagttttgaaatcctttcttccccttacagccctcaatatctcattagcaaattctggtgattgttgcatccctataaccaacaacaaaaaaatgaaaagaaataaaatccaccttagaaagaaaccaacaaatttaagttaaggttcgtaaaagtaacattataatacaaaagtcctagaatttgacatcatgtacttgtgtcaacttggacaaaaacatgttatgataacattgtcctatgtaggatttaacaatctatatattatgattatgttttctcacctatgcagaaaccaaagtctgagcatttgagaaccggttcagacccatttgcagctatggaaatctggtcgaaccggttctcaatctgcttccactcaatcccagaacccttttccattatgccaaaaaaactgagccattcattgaatgagtcaagctttgatgaatcactatttcctggtatgtagtggggattctctgctccatttagttcagtttgagctggggataaagtaataacaggaactacactgaaagaagaagaaccagcagaggaagaataagaagaagaaaatgaagaggaagaggaagatggtgatagactatttttggtaaagggtagttcttggaggatatgagactctacattatggacctccattgatgttatttccataaccgtactttttatttcatcataaagttttcatgttgaatgtttggttttctctctctttctctctctttttcttctctgttagattagaaagaaaatgggatttagtttttcttgaaggaaaagaagatgaatgaatgtttagaagaattagcttgctgaggaatattatgcatggtactagcatgaaatggtgatgctattaagttatcattctagaaaggtcattttcttcttcttcttccattatttattttattttgtttatattatgtttagtacttttcagtttttcctttgatatgggtggttgaatgatgattataataggaagagcatgtaagaaaatgaatatgtatacatgtttggttgtataatatgcatgtttggttggtgtggttggaaatgaaaaaaataaagtaaaagagattgcaagagaagctttttctcattttgtctgtttgtttgtttgttttgggtgaaaagagtaagaaaaagaaaggaaatgagggcaggtagagtgattggagtagtagggaaaattgcatggaatgaaaaggttgtggagagagaaacagaaaagtcttactcttttattagtaaaaccaagaagtaagaaccacaagaaagcagttggaaaaagaaatatgtttatttattgtaaaacaaaatcaacaattatacatgtatatacactgctatcatttttgtatattagggacatggatttgggcaaagtactaataggtatgtattattatgagaagaagcatatatagttgttgaattatgtgtaacctatatctatataatattctctcttgtacaagttagtatatggaagctgaaacaggtacacgtataagcaactgttggccaatcatgcaattcaaacacctctacttaaattcatgtcatcagagtcaatgacacaattaaatgcttagccagctagtttaataggtaaaaactctttgtcatgtgaacaatctttggctaaaattagctagtaagtttattatcattatcttaattatattgttttgattaatgggttctgcaattttagggataacaccctaatttctattcacaaaatcctctcttgtaatctagtgagaaaggggagattaatcgatctaaggttgaattgccaactcaactaattaacaatgaaaatcttagaagaattgtgtattgattattcttacttgatgtatcttgtagaagaattaatttcacattagggtaaacttaaatttaaaagtaccaaataatatagaattggtatatctatttcctttgttgtggttttggtggatgtatgttttgtacctgaaatgtatatttctttcttgagatggaaacaagcaatttcttcttagctttcttttagtgtcattagaaacaagtattggtgtttattacaagagattgtttgcaataaaattcactattttatgtctttttgtattggaatgtgcattagtatatttgagatttgatctttctacaattaatatcaattgacaatgactaacccaaccacttgcattgtttatatatatagagggactattacagtagaaattaaataaaatacttattaatagagatagtaatttataacttttgatttaatctaatgacttaaattaatgtttaaaaac

SEQ ID NO: 193599 - DNA, 2448 bp, Cannabis indica
gattgatcagattctcaaacccttttcttggcaacctcttaagcccataacatgaagagagtttcaaagtttgcaagtttagaagcttggtgattgaatgaggcagttgggttatattctcattttgagaaagatcaaaatacttcaaaagcttcaactctttaatagaagatggtactctgcttatccccaaaccatgcatatctagtgtccgtataaattcaaatctagacactacagcatgaacaagttgattacctcgtgtcatatcatgttcatatggcacaacaatcgatcgcacattacattcacgaaatcctagaaatttgggctcaccccataattggtaagttggaagatccgttgctagagtgatgaagtcattatcaatcgagaaatgataacatggactccgccttgatacagcccttgcaagattatgcatggaatgatgtatgtgaaatttgatgaccctttctcttattgcgtcgagttgagatgcttggaagaaacctcttgcgagtaattccataacataatcataaccagcatcctctagagattgagattgagattgagattgatcaataaagccttgtgacatccacaactttacaactgtttctacatcatactcgtgataacggaatgggaataaggtacagtaagcgaaacaatgttttaaaggtgaaggaagatgcttgtaacacagtttcgaaagttcataatcgaaaaacattaagtttatggtctttaactcattttcatagaatgatagccactcttcttctgaactacttgattttgttcttaaaaggcttcctaacatctttataacaacagggtttccttggcacaattttacaatcttctttcccacttgtatttggtaagagctttcttctttttcttcttctttaaaagccaatgttctaaataaatcccaagacatcttctccgaaagcatgcctatcatatacggtggcaaggtgcctgcaactctaccaacagtctcaacaaattgggtggttacaattactttgcttccttttgcaccaacttcgaaaatctttcttagcatatcccattcttgagagtctgcaaacccaaggccatccaatacaataaggtacaactttcctttcaaatttgtaataccattatggatgttttcaccataacttaaccaaattcttaagttgaaatgaactctcaccatctcatcatcgaacaactctttcgcaagcttggtgttttcactttctgctttgccaactatgggaagagtttcaacattgatcagctgatgatttcgattcgggttcaacaaaatctctctgagtcttgctttgtcgcctctaaaaaggtcttcttctttgagtagtgcagcatgtttgtctggtttcatggtaccaacttgtgtctcactaagcttctcaagattgaaatctcttccctcaacagcaagtttctctagtctccttctaactctattgatctcctcattaaacatcttgttgggaatatgtgtatgtgatgagatgaaacaattactaataaactgatgattcgaccactcaatcacatctaccaagttctctgcatcacacagtgcatcttcaagctcattcatccaatgacagaatcgaatgtcgtagtccttctgcaaacacttgttctctgcatgaagaagcacaagagcatgctcttcaatgatctcctttagtcccatcaacatttcattctctacaatatgctcttcttcagaacccagcaatttcaggatccgacttgcaataagggtgagattaaattttgctgcagccattgatattagttttggagaaaatagtacttgagttgagattatgtgatcccttggattggatttacttcaaccatattaattagtaaagtaatttgcgcctaaactagctttaatttttatatacttaacttaactctcttgtttttatttttttgtggcaaaactcttttatgttttgtttttttgttttacaaatttgagacgttaattagatataatcgttaaatactaactgaattactactgtattagtttcgagattttactatcacatatacataggtatatacagtagttatttagttgatatttaatgatgaaatttaattagtggctcaaatttgcaaataaaataaaataaaataaattttagaggattttgccactaaaaataaaaataaaagaattaagtgtgtataaaaattaaaacgagatttcgctgtaaattactctaattagtatgaaatcttttattccaaattaaatggcttttaacatttcactttttcttttgaactaataagtcaaaagatgacaaaaggcaagtatgcatgctaagaaacatagaattagattcccatagacaatggcggagccagcgtaacattttagtgggggca

SEQ ID NO: 193600 - DNA, 3565 bp, Cannabis indica
aaaaaaaaaaactaaaatagaattcacaaacgtagggtatttacaagtttgccattggcaaggcaaccctggtaacgacgtcgtttcttttatgatattttaatattttttaatgttattccagttctacccttcatagcgaaccctcacccagttaggtgctgtgtcatgactgcgatcacctgtttcaaagcccaccatgcatctcacttctaacttggactttggcacaaaattcaaaaatgattattcagtcatgttaaagtcagacatttaactcgttagaatagctcaagtacataaaaacaaaagtaaccgagaaacacttgattcctgaatttgcaaaggatagagtaaggtgtttgtcctgtagtgcaatcaccactcacttacgatggggcttctctccatacagaagacgaatccttctccaccaaccacaccagaccaaccatttttcactttttattttttatttttttttattatttttttttctactgcagtacacatattcggatacattatctctcttcagtgccttgcagaggcatatacacacacacaatatataaaagccaatctctttcttggtgggatatggtcttttgggctctcagatttgcatttttctgaaaagccaaggatacagtactgcacaatccttaacagtcggtaagtgagttagttatctctttctcttctttagttttgaggcacattttctggtatttttatccaatgttgtctattttctccagttttattcaatgaaaaagtttttgccttttgggtttggggtttggggatctgcgtcattctgtgtattaatctttgaatttttatggaaactatgaggtgggatctagatgaattgttaatttcacattagcttgaagtttctttactgatttttcttacaaatgtcatatagtgaccgtgcactatttatatttgttacatttctagcaaacgctagttgagatgtgcaattttctttttcctcttctgaatataagttttaagcttgtgtttttctgatttgggcaatgtcacaatacattggctcgattaactaccctttttttagagttttaagcataattgatacgaatcttttgatggcttattgttttaaacatactctctttcaaaataaccattgataattgacaattcaacactgttaaatattatttactgtgaaaatggtgtttattctctgtatattaatctggcagttattttggtgtgccaataagattcagtatttactcctttatttttggttggtgactagaagatatccccattatcacatactttatgtgaagatgtagtgttatactattgggaatctgtcttaaattttcttttaattgtacctgaagccttctataattttttcttttgtcagatactttttgtattgaaaatgagagggggtttatggcaacttggccaatcaatcacccgccgccttgcacaggctgataagaaggcggtagctcgtagatattattctgcggaatctgagctcaaaaagactgttctttatgatttccatgttgctaatggtggaaagatggtgccatttgctgggtggagcatgcctattcagtacaaagactcaatcatggactctactgtcaattgtagggagaacgggagtctttttgatgtctcacacatgtgtggactgagcctcaagggaaaagacagcatttctttccttgagaaacttgttattgctgatgttgcctcgcttgccaatggaactggaactcttactgtatttacaaatgagaagggtggtgctattgatgactctgtgatcaccaaggttactgatgatcatatatacttggtggtcaatgctggatgcagggataaggatttggctcacattgaggagcacatgaaagtgttcaaatctaaaggtggagatgtctcatggcacattcatgatgagagatctcttttagctcttcaggtctgttttaaatttcatataattttgctaacctattctcagcttttgatgtctgctttgttttccatgtcataaacctgtaatgacagtattttgagggtgtttagttgcctattggttaaggttttttcgctaaagaaccatgttctggaaacaatactgaatacagattgagagcttaaatttatcaatttaagtctgtgattagcttatttgacaatagctactaaccctgttacttttatcgtcattgctcttattttttcattagattcccgtatggttaatggttacacgcatgaagagtttcttgtcttcttgttcacagggccctcttgctgctccaactcttcaacacttaatgaaagatgatttgagcaagatatattttggagacttccgagtgttggaaatcaatggctcaaaatgcttcctcaccagaaccgggtatgcttccttcgggtctaaacttaacattgaatttgtaacagcaaggttgatttctagtgctcctaatgaatgttcagttgatgaacataatttatatctgtactgtcttagcagatgctttgagttttctatttctgctcatattatttcccatgttctgagcagatcattgtccttttagtaccatgtattgctatcctaacattgacaagttaatggagtatatttgataatttcaatatctttttcaatttgctttcttaggtacacaggtgaagatggatttgaaatttctgttccttctgagaatgcagtggatcttgccaaagcaatcttggaaaagtcagaaggaaaggtgagactgacgggtttgggtgctcgggatagtcttagactggaagcaggactgtgtttgtatggcaatgatatggaacaacacatcacacctgttgaggctggactaacatgggccatagggaagagaagaagggcagaaggtggctttctgggtgctgaggtgatcctcaaacaactggaaacaggtccatcgatcaggcgtgttggtttgatctcttcaggtcccccagcaagaggccacagtgagattaagaatgagaagggtgaaaacattggggaagtcaccagtggaggatttagtccttgcctgaagaagaacatagctatgggatatgtgaaatctggatcacacaagtcagggaccaaagttaagattgcagttcgaggaaagaactatgatggggctatcacaaaaatgccatttgtacctacaaaatactacaagccaacctgatttaggtgtggcttatcagttccagaaatattctaattcgtttctcatggacagcattttcataaaacttgactgtttcagtcaaatgctaatttcaattgtctatttaccacacattctgaatggaatgaaatgtttctttcttcaaactttctctattatgttttgtggaatgcttgaaattgtggattagtaattcccataaagggatgaagaagataagaaaatgaataagatagatatggataatcaagtcttaagctagcctcaactggtttttaaaggttaatatcattgaaaaaacacagaat

SEQ ID NO: 193601 - DNA, 981 bp, Cannabis indica
tgaatgaaaggtagaacttgatcacactccaaaaaccaatgatttttatagagcaaaaagcaagaaatatgatgatatagcatcccttaccacaaaaccagtgttctccactttctaagcaagattcatcttttcccacacagtgtggatgatagactttcagacagttcctaaaatgtagaataaaaatgaacaaagtaatgcatttattagaaaaaaaaattaaacaaacttccataataagatttttttttctacaaatagaaataatgtccattattgttccttggggaataaatttctctttaaaagcacataaataaacacgactgaaaaaacttcagagagatcagtggaaaacaaccccacaccaccaaacaaaaaaaaaaaatggtaatgacaatattagtggtgacttcttcccctatttgaagaaacacccaaaaacaaaacacaaaaacaaaaaggaatgatctttcttgttttccaagtaataaagaaggcattttggagatttgccattcaatgacgacacaactgtgaaaatcaaataatgcatgtgaagagtatagagataagagagtgacccgtaatcgcaaatgagtaattcgcctccatctttacaataaaaacaccaatcttctgcttcaacctctttattaagcttggattttctttttctaaaatacttcttcatctccttcactgctcagaaacccactttttctctgtttcttcttcgttaaaggctaaaacctgacaaacaaggaaaacaaaagtgaaaaggaactatttttatacggtaagagcactaaaaatcttgcctaacccatacattcggtgaaagcactcaaaatcttccctacccatcttatggttcgaaaaccacatataacagagcatgaaatttatcgcaaatgagaactcatagaaacccatataacatcatcatcaaacactattaagagagagagagagaga

SEQ ID NO: 193602 - DNA, 1894 bp, Cannabis indica
  modified_base (43)..(43): a, c, t, g, unknown or other
tttataacgaacatccctatgaaaaaaatttgaaaaaaaaatnttccgacatgtatttttgaacgtaaaaattaactaagaggttgtaacaggaggttgagggtagcgttgtaaaaaacactcaaaatggtttataggattaaaactatctgaaatatagtggcatatctctgtcatcaacctcgtttgtcaaatgacaccgcctgatgggccccacagttaattgggtactattatttgcaaatctgtgggcttctattgtgtatggcaacaaagaaggatttatataataggaagattgttaaaaagtaatattggtgattagcatctctaaggtataatataattaattttatagaggtatttgtaagatattatttttaaataagactaaacactattaatatttatttataatagagtatttatttttatattatgtacaacaaaatttattatattacaatatatattgatttatgaaagttgagatacaattataaataagatttgaattgattttttttgttaaaataaaaattaataataatctgatttagagatgttatagtaaaattaattatatttttttatttattcatgttaaaaattatttttaaattaattatattaaaaataaaaatattaaaaattaaatttaaaattttatttttatcatttttaaaaatataaaatttaattaataacttttacaaaagataaggtccaaatttttatactaattttttaaataatttatagtgtgaaaaataaattttaaaacattattttacatatatatataaaataacaataataataaaaagcatgtatgtaacaaactactcaaattttgttaaaattaaccccagtattattataataaacaacatggctcgatataattttggagaggatattatagcggtacaacataaaagtgttgtgttctaagcaccatttctttattgatatccttcactcttataattactaaaaagttgaaaaaaaaatagcaattttgaggtgagtgacagaaaatattgttcataatttattcagtaaagtctaagtgatagacctaacccataatgaaggataagatcaaagaaactttagaaaattaatccaaaaaaaagaatatacagagggacccaccaccaccattacaatattacatataggatagcttctcatgatatctaattagtattattgtgtttggattttcttaaaccaacttccggaatttaatcaaattaatgggttctctaatgtctggatgggattcgcctattttcgcatcaaaatcaggtaatagctactcgttttacagacttaattaaattgttttttctttacttaaaaaaaagaacacaagtacttaatttgtctttttggaaaaaataaataattaaaggaacaacgtatatgtgtgtgtttaatcattaattatcaggtaataacaattataagcgaaataagtcacttacgaaagaggagattgaagcttattggagatcaaagcagaaaacagttgaagaacaccttcaacacattactagcctctcagacaccaaacaagatcaggtatatactaatatatattattattacctactttttcttaattacaattaaggtgatctaactatcaaatacatgtatatatatgtctcaggaaattagtagagttgatgatgaggagatgaactactgtggtgaaagatatgagagatcaagatctttggctcttgaagatagaaaagagagtgctgatgagacaagcattgaaaatcttatcaagaaaaatggctggtaaaattaattataatttaatttagtattaattagctactttattttcataataatatatttatactaattatat

SEQ ID NO: 193603 - DNA, 1509 bp, Cannabis indica
ttggagagagaagggtttgggtttgggttgtttgtgtaaaatgaggattttgatgggcttttataaaagatgctttgggtgtgcgaaatggataaggctgcttctctctctctttctatctttctctgagtttcatttaggggtgaaattacagaataacccttttgttaatttcattcacatgacacgtcagatttttgagttatccatttttcaagtttctataacaagaaattaaataaaatgatggcaatctttataatataatttataataataaaggtgttacaacattttttattagagtaaaagtgtgaatttggttggtttatgttatattttactcaattcagtataatgatcgagttataaaaatttgagtgcaattcattcaattaagagaaaaaaaatagtaacccgctgaaattagtggatttagtaagattaatccatccaaacggaccactaatattttttttttaatttttttaatttttatataggttgaattcaaagtttaaatcaactactatacaatttatatattgaaatttatgattaatgatattaataaaaaaaattataattaagaagttagatttattgtgcgtaaattttaatgtaataattatttttgtgttaaatttaatataatttttaatattgattaaattagacaaaaaaagtgttaaattttttaatattatattactatttaagcataatgttagatttgtaagatacatcgatttcatctaaatttaattggtaatgtaaaaagtaatttatacatataatatataatatttaattttcacacaatataaatatgagtctctctaatatcttcttttaaaatggcacatttcgctcattatattacaaacaacatttggctcacaattgctcctctttttgaaccaataattaaatatagatcaaattctcattaaaattttattaaagaggtacaattaattagtaacatgttattaccaataaaataatatttaacataattacaaaatattagataaaataaaatattaaattttaatttaataattattataaattatcactaattatttacaaaaacattatcattactatctaaaaatactttatttttattgaaaaaagtattaaaaaatgaatatatcgggagccgcatttctatgcttcttcgcggaaattctcgcgatgcatagacacaccgtgtcctcaaaagctataactaaacaaaacattaaataattcaccaaaaattaaatattaaaaaattgttgtccatttcaacaaaaaaaaaaattaaaattgttgacacgtggcagttaaatagaggtgaaaaaaaaatgaatcataagcaaacacaatttttttttttttattgtaaaaaaatagattttatagtaactacaattagggttctactaggtgggattttttcacaaaatttataccaatctaaaaagcatgaatatgattaaagaaaaaaaaattaacagt

SEQ ID NO: 193604 - DNA, 1077 bp, Cannabis indica
ccagttctatgctatgcttcaccttttcactaatggcatcttggaccataacagcatcagtgtttatggcgaaaacaacgtctgatgttcgaacttcagtatcgaagtattgaatatcttggttcaaagcagcttcaaggtacttaattctcatcctggttgattgtctttctccagtccacatccaacaagatatctctgcaaccaaaataataacaccatttttaaactccacaagaaaatttaagccaaaatccaaaagacccataatccagtttgaactcaccagcccacgaagatgcccatattgcagctccaacgactagaaaatataatgcatactgtgaaaacacaagaaaagaaaacatagaacgatcaagataagagcttttttcttaagaaagaaagaaatggatagtgatgaaggattatgtgtagtacctttagaacctcttgcatcatcttatccgtgtcattggcattggagccaaaggaattaacaagatcggcaaagaatcgaagaaagagaggcaaagagcagccatggacgatagctccaagggacccaattgtcatcagaacataatccaaactatcagcgaatcgaaaaagctcaccgaacccagctgccggataaggctcaggcttctccccactactgccaccactaccactactactactaccgccaccgccattagagtctttcttaggctgttcatcgttattgttgttgctattctccattgcttcttcttctgttttggaagctgtgtcgagacccagttggggttctcgttttccttcttcctcatcatcaagtctgactggctctttagttgttgtgggttgagaagaagccatagccaaagccattgccgtttgcgttgatgggttgcctttaaatggctcaaaagtaggactaggagaagcagacacgagctccaaaccttgcatttcggaccatctccactgctcaatcgtctttatctcctgagaatcttgtgacatttgcaaaaattcctctctttatgaacaaaacctctctctctttctctctcttctcctctctctctc

SEQ ID NO: 193605 - DNA, 1831 bp, Cannabis indica
gaaaagtattattagtttaaagctaaaaatacaagcaagctcaatacactgacaaacctttacactattggcactatcacttaatgctccaatcttaatttcaaacaaaatttcttagcatataatgacaaaaagtaatgtccagggggtaattaatttggagttaaatggtcacttccatcattaaaacaagatctcatctcattctaggtcaggaaaaaaaataagagcaaagaaaaaatgtaaaggagaaagagttaatttcagaaagaatgttaaaaaaaaagcattgtgtagcctttggtatgtatatgttaaattgttacaaagaatccaacacactcaattactcagaaacttacccagatatcagaatatccattaaatctatgttcgcttccaaatagtcagaggcaatcaattttgattgaacttgctgcctttgcaaatttgcaactacttgtgtggcatcctttcgggcctgtaacagggcaatggtgtcaacatagctatgatgaccaaaacttgcaataagctttgtaaccatcaagttgaatttctcttttgaatccgatacatttgaattgctatagtttacatacagtcttccacaggaatagtaacatttagaaatgacgtagtaaagacaatccaaatttatccaaaaacagctatacaagcttacctccaagttcaattttggaagacacctaataagaagtctcagagtattatctctgaaaaactcctgagtcaattgtgcacaagattcggagactggttcagattcactattgccgtaaagtattgacttcatctcccttatatttttaaacaagtctgccatctgctccaaatgcaacatcaaaaatcaattgaagagatttaaaatcagcaaataaagaaactgagattgattcattatgaactttgatgtaacaaatcaaattctaagattcacaaaatcgaatggagtggaacaattaaagcaaatcaacaatatcactgaacaatacgattatacatatacatcaaaattggaccacgaaccctctagctctacaatattgaagaaccccaaaataaatccacctcatagctagtctactaaaatcaacataactaaagcctgtgcccattactagtagattaaaattttgagaaaaatccacactaattgctagactaccgttccaaatcatttttagaaaagttctgtattgcgattaaacaagaaactgtacgagaaagtttagagagtagaatcatcggtgaccttttcttcccgcttgctctcgcgggtatccgggctgcgttcgcagtacataagaagatcgcgggtctggcgaacgatgtcgacgggcgtacgaggcttcgacttgaataaacccttcatcttcttctttgaatattcacttcaaaaaaaaaaaaaacgctctgtttcgaactccttcgtcgccggaaaggcccttagattagagccacagattgcaattgattgttacccctttctctcttggctagggtttcagcgcttctttggttctgttctctcgtcttctatcaaacccaatttagagtcggagttacagagaagatgataaagattcagatacaggaggattttgttttccttttcccctaaaaataaataaaaaattaatattgctaattttttattgagatcgtattttggcgtgatcggacggctctgcttggagcttttcaccaacggccaacggttagtcgttaaatttgacagcctagattaatccacggattggcataggatgcaaatagttattgacattattattatttaagaaaaaaa

SEQ ID NO: 193606 - DNA, 1868 bp, Cannabis indica
aaaaaaaaagagtaatagtatatataggaaattaattaaatgcagttgtatatcaaagtcaaaaccatgccaccattggagaaattaattattgtctggtacttatttctagttttgtgtaaatatctacctaaagttattgacatctaaatatgcatactattctttttcctgacaacgttaattaataaacaagagatttaatggaaataggaaattatagccatatgattcccacaccacaatcacttttatatataaagttaactatcttatgaatgttgaattgcatatatagccattaatattagtagtgacatctcacatgaataataaggtcttgcttaatttgagactcgaattggtaacttgtacaccaatatcaatttagtatatataaattaaagctgaaaaatactagtggtatctactatcttttaggtagtataatattgttagtataattaagtattaagtctcatacaaatcaattaaataatttttagggaatatcgttaactaattataaagtgttacttataagtggtgctagacaccactggagtccaatatttatgctctttaatataacatttagggcttgtttagtacgtcgtgttgtattgtattgtgttgtatactattatattgaattgtattatttaatacaatactcacttgtattaatagtttgtgtgaaattatattatttttaccataaactcaacaccaactctgatccctgtctgggtcagggttcgattttgggattctagatcaaggtccgagttcggtttggggtcggggcccgagttgtcacaaggctaatttcttcctcacaaattttccctgcaatggcctagattcaccccaatctagtcagccaatccaacacttgtttgcatgcacacacactcacggtttagtttgcccaacgtcactcaacaacccacactcgttatcaaactaaaccgagactggggtctaggtccaagattttggtacggggtccggagttagggacaggagactggggttaaggattaggacgaggatttgagaccgaagcagaattctccaatcctgaacattttgtaaatattataatacaaactaatatagataatctatataatatattaaataatatgatttatattaaaatttatgatctaaataattaacacaatacaattatttaatacccgtttagagagcctaccaaatgagtggttaatgattaaacatgtgcagctgttaccgttaacaataatcattatgatatcattagttctgaaactagactttttgatccataatttccatcaatagaaaattattatagggtcgcaacgatatatagcagttgagctttattttccaattaatgactcaaaagttgacatttaacgctcatctcaaatcatataaatcaaattttgaccataaaaatatcatatgattaattaaaaaatgaaagacgagaaaaaaattataatataaattgtaatgtgccacagcagaattcagaaaactaaactgtgatgtaattaaggtcaaagattaaacattataagatgttaagggtataaaaactgttgaaacagttggtgatgttggttaggactgtttgttaggtaattagtctttctaactactttctgttattctgttattctgttaatgagttgtttcagctcactctttcattgttgtctgtgtatatatacagcatgtattctctctctctcagtaatggaatcattcattctttcctcactcttttctctctgtttcctctatctttgattctctttgttcgtttcttgttttcaatgtctaagaaacttcacatggtatcagagctt

SEQ ID NO: 193607 - DNA, 2119 bp, Cannabis indica
aatgaagcagcacttccaaatcgagttttgggattgttatgccttgaagttgaaccccattcaatggcttcttgtacagctctttgtctttcttgtactaatctctcttcttctttctcttgataacctctattactattactattattactactactactatttctgttgttattgttggtattattattatcattattatgagttgggtcattttggttttggtgatttgtacttgtggcggtgttatgatcaggactggttcccaaaaaactaagagcggtgacaacatcgctgatgaggggccgtactgagggctcctcattcaaacacatggcagccactgcgaccgcttgttgtaatcctctcactggataatctcctcctaaaaccggatctgcaagttctccaaacctttgtggatttttgaataaaggatgtgcctgttcattcataaaattatatattaatacaaagtcaataaagggcacttaatatatgtcctaacacattttatatattttaatttaataagtaacgtaaaatactgcatattatttgtaaagtattgaatattttaaaatacttaataacaatacttataatatataataagttaataagaaagttagaagaaaagtattggtacctctagagtcatttttgatcttttggattgctataatctaaaatgttttgtataaatgtatacattgtgtagttatcaatttttgatattttctaaataatcttaggtgactaaagcatagtttaaacattctattttatgaaagactataaactatttgaacactaattttcgacactaaaacttattcaaaatgtgtagaaattaatgaaatatgtattacaaccacaatatacagtataacaaaaaagtataaaatatttagtggataattattaaaaatacataatatacttacaatttgcataaacaaatgagaaagtagttcttaatgagataaaaaaagaaggttgatgttaataagtttcttttacttagtgattagagtttgtaattgattagtgtgatgaataattgtaattaacccaaggcttataataatagtatgatgcatgattaatgattatgttaaaagtaaaaaagaaaattacccaattaacaagagtttgctcagtgttgggttttgtagtatcaatggctcttcttccagttataagttccaataaaacaacaccaaaactgtaaacatctgatttaacagtgagttggccagttctctggtactcaggtgcacaataaccatatgttcccattactcttgaggagacatgactcttgtctcccacaggtccaagcttggcaagcccaaaatcagagagtttggcattgaaattcttgtctaacaaaatgtttgatgacttcaaatctctatagattacaggtggattggccttgtaatgcaaatactccaacccttttgctgcccctaatgctattttcatccttttgtaccaatctaatggctttcgcccatgttgcaactctgaaaacacacacaaatattcaatgacattcttcaaattggaaaaaaaaaaaatacaatggtaccaatccgaaatttatcgagacaaatacatgtaaaaatatatatattttaattttttacatataattttaaaaatttaaataaatctgaggccaggacactcttcgaatctcttaactctatcaataaaagcatatgagactcgttattaatttttgtaccaatatcaatatgactaggactgacttgaggctagagttgcaccataggccacctagcttagggcataattttttttttttcttaaatattatgttttttaaataagggtttaataagcccgcttatgacatgtcttaggatgtcggacattagttaagaaataccctaaattgtcaagtatagtaagaaaagaagtatcatattcattattgatgtaatttaatatcagatttacttattttaattaagcaaataataagaaaaacttgtaaatacttacaatgcatcacatgctcaatatagtattaaaaccattaaagtgtaatagccatagcaattcttagttaacaaatgtagagaga

SEQ ID NO: 193608 - DNA, 1129 bp, Cannabis indica
agtgatgatctcaccaatagactaacaatatttttattttgttgtaaaatttacgaagtgggatattctttccaatggtggagttgttcaagaaatggcacacatagcaaatggtcgtgaaactggaaactgcgtgtctctacttcgagtaaatgtttgtatttataatttggttactaattttctctcttgttgtgttatataagtttattttttttttttggagatctgaaattcattatttaattttattcttttgtattagagtgccaactcgagccaaagcaacatgctgatattgcaagagagctgcactgatcaaacggcgtcgtttgtgatttatgctccggtggatattgttgcgatgaacgtggtgcttaacggcggtgatcctgactatgtggctctacttccgtctggatttgccattcttccagatgggtccggtggtggtggtgatgggattgtggaaccttgctcttccggcggctctctgctcactgttgcgtttcagattttggttgactcggtccctacagctaagctttctcttggatcagtcgcaactgttaacaatcttattgcttgcaccgtcgagaggattaaggcttctttgtcatgcgacactgcataatatcacagtcctacctagctaccttcataataatgtaagttctcatgtctcaagtacaagtattcttaatagagattttctataattcttacaaactcaatatattgccaaaaacaatggcacgtgattatttcattcatgagttttggagcacaaaatatatagtgcaagtgtaatgtagtactataattagttataacaatgcaataatccgattgccttctcagttgtgattaattcgggttttgattagtgttttttgcagtaatatttgatagaagaagatggtcgaaattagtgaaaagcagcaggggaaagaaaaagaagtaagataaagaaatctaaggtgttgaggaaatgcaaatattttggagaagtcaagaacgcaccttacatgatcctttcttagcatttcaaatttcgagttttgcaaggattataggggttcgggtattgacttcatcgaacacattatgtagaaaagaagaaggcctt

SEQ ID NO: 193609 - DNA, 1835 bp, Cannabis indica
attgtgaacaaaaacacattttagtacaactaaaaaaatataatttttctgaactatacgtttagccatggaccttgaatcacaacataagaatgaaaatttataattagttgtgaactaaaagtaaaaaatttgtagtgattcatctccacttttttcctgtcccatcccacgttcccatgactagaaaacccaaaaaaatataaacaaagacaaaaaaaacaaaaaacaaaaaaaaatccaaaaaactctaaatagctacacatgcattgctgtgactatctccctgaatctattgcactagtccccatcttcggtgggtggtgcgttttagtggtcgtttcttttatcttagcttctatggttcaaactatatttagattttttttagagagacccctcttgctaatagaaattgaagagttttagaacacaccaaagctagagatgaagtgctagtagtgaactaaaagaaagaaaaaaaagataaagagaaaggttaattaattaatatttaaaataatttatttatttttttgttacacgtaaaattttttgaaacaacaaatggtgcagttaaattaagtacatacggaactaacgagaatcttgagtttgggattgttgtcaaaaaagttcgagattgagacttatctgcatcaaaatgaactcttattagggacttatagcacaatttaatctcaacacttgacattttaacagatccgttaaaaagaggaccaacagacttataagagtctcgagcttggagactattgacactatttttctaggatggaaacttatctacatcaaagtaaatttttgaacgactttgacaataattttctctaaaccaatttaattacatatctaaccttcttatacacgttacatatctaaccttcttatacaagaggcagttgaatgacttgaacaaaatttataaatagtgtacaaaaatggttaagagtactaattttcagtatatataattatactacgtgatgtaagttaaaatgcaactatttctttctagtttaaatgtattatttccttatatagaaaattagtaaagaaaaatagaatagctttaaggttttaatttcaaactatcaactatcaagtacatgcaagtgacgatcaccaaaaaaaagtacatgcgactgacagaatgagagattgtgtgaaaaagttaatatgtagattttttttaagaaccccttagtttctattttataagttgctcccttactgtgtgttgcctactttttatcctttcttttttcttaattttgatcacaatgtttagtgtgtatatagactatatatagtctgagtaaatgagtattgacatctcttttgttgataacatagcattattaatgttgcaggaacatcaaggcctgaggcatatggggtaatttataaagattcaaatggaattttacacagggcctacttaatcaataactccaaaaatgaaattatagtgtcagctggagctctaggaagcccccagctattaatgttgagtggaattgggccagcccaccatctaaaagcccgcggtatcaatgtcgtaatggatcaacccatggttgggcaagggatggctgataattcaatgaatattctctttataccttcgcctatgccggttgaggtctcactgatcgaagctgtgggtatcacaaggtttcatagcttcatagaagcagccagtggattgagcatttctcttcctttagttcaagaacttcataagtattttgagcctattctatatcaggttcttttttctctaaattctccctaatatatatatatatata

SEQ ID NO: 193610 - DNA, 3904 bp, Cannabis indica
tggacgtatgatcgcaaacaacttcttattgaaaggctcaaaccgggacagaatccaagggtggttgctataaacacattggacatgtgggtacaagttcatgagttacggtcaggttttaaaacagattgggctattcgagaagtggctcgatatattggacagtacgtcgatactgatccgaataatattcaaggcgtatggcgggattatctcagagttcgggtaaggattaatgttgatgaaccacttaagagaagaatgaagttccgaagccggggtggtgagtcgttttatgcgtattttaagtatgaaagagtcccaaccttctgttttatctgtggtataatgggacatgctgagaagttttgtgacagaatatatgatatgcccatagagaagattgtcaagccatatagtattgagatgaaagctcctaccagacgacagaagtttatgcaaccttcaccatggctgcgttctgggccggaggttccaagctcgacgaggacaatgccatcaggatcttctgaagttaatgcagcaactaaaaatcaaggcatgacatccgacaattatgaccctaatatcagccattctaattcaaaagtcattgaccaagcccgatcctttgggaagaataatattgctttaaaagagcatattatctcagtcaatgagaatccagctgggtttatatctgaggatatcattgaaatttctgatttgaagaggaaaaggcttgaggcaattaaaaatagtgggcctccagttttgaaaaatgacacaatggaaatagaagagggtattaagacaaatggtcccaatgctgaagcaatttcaaaaaacgtagagaaggtgggtcttggtttccaagcccaccaatcattatgagtaccataagttggaattgccgtgggcttgggaacccacgggcccaacaattcttaaatgacatttgtgtccgaaagaaacccaaatttttattcctttgtgaaactttgtgtagaaaggaagttgttgatagagtcaagtttcggttggggtttgaaggttgtcattctgttgatgcggttggtagaaaagggggtcttgctttgttatggaaagtttcggctgaggctcatttgtttaattactctcacaaccacatcagtatcgaagttagaatcccaggtacgattacatggcggctgactggtttctacggtgagccaaatcgaaatcttcgccatcaaacttgggctctccttcgaactctagcctctgaatcaagtctctcatggtgcatcattggagattttaataacatcatgagcaatgaggatcaaaaaggaggccggccataccctcaatccttaattactggttttcaagctactatctcggcttgtcatctcatcgatttagatatgcgaggtcatccttacacctgggaacgaagccgtgggactaccagaagtgtcgagactcgcctggacagggccatggtcactcagaattggcttgacatttttcatgaggtatcttttacaaacttagctttttcctcttccgatcattctcctattatgcttgaacctgaaactatgttgggaggggctgctagggggttatttcggtatgaaaatgcttggcatatagagcctttatgtcaccaaattgtgattgatgtctggaactcaaaccagcagcaggatattatggaaaagattgctatctgtggcaaataattttctagttggggttgaaatctaacagggaattttaaagctagactttctaaaagtataaatctgcttgcaagacttcaagcttcaaatgatgctactgatattgagaattttgtgcaagagaagattaactattttgagattctagctcaacaagaactgtattggaagcaaagatcaaagcagtattggcttcacgcaggtgacaagaataacaaatatttccatgctaccgcaagtgcccgcaaaagatcaaaccaaattcatcaactccaggatgctaatggcggttggatgaaatggggtaatggtcttgaatctaccataataattattttcaacagcttttccaaacttcaagcacatcctcacggcttattgtggataacattaaagcttctgtcagtgccaatcataatgaagaaatgttgaaaccgacccttgatgaagaagtcaaatctgctgctttctctatgcatcctgataaggctcccgggcctgacagtatgggtccagggttctttcaacatcactggaatgttgtcaaaacagatgttattcaccttgttaagtcattctttgactctgccactttgcccgatggcataaatgatacccacttggtattaattcccaaaaagcaaaattttgtggctatgactgatctcagaccgatctctctttgtaatgtcctttataagatcatatcaaaggtgcttgcgaaccgtatgagggatcttattgatgatattatttctgatactcaaggtgctttcattccggggcgtctgatttcagataatgtgatggtagcttttgaggtcatgcattacttgaaacgtaagagaaaaaggaaaaagggattcatggctttgaagcttgatatgagcaaagcgtatgattgggtggaatgggattttctaagagcggtaatgcttcgtatgggatttgcttgtaaatgggtggacctagttatgacttgtgtttcaacagttcgttacaaggttgttcatgggggtcacatgttggatcccatatgcccatctcgtggtatccgccaaggtgaccctctttcaatgtacctattcattatttgtgctgaaggtttatctgctctaattcaaaagttcgaagaagataggcttctgcaaggttgtcgtgttgctcatcgtgctccctctctcacgcatatattttttgccgatgatagcttcttattctgtcaagaaacaataagtgcggctactagcatctccaacttgctccggttgttcgaagaagcttctgggcaaaaagtgaatgcttccaaatcatccatttttttcagccccaacactgatggctctacccgcactcaaatctgttctaccattaatatgaatgaagctcttgaaggtagtctctatcttggcctccctaacatcattggtcgaaataaaaaagccatgcttggctttatcaagaataaagtgattgctcgtattaatagttgggatggaaaatttttgtctcgtgctgggaaggaaattctacttaagaccgttattcaatcactaccgacctatgcaatgagcgtgtttctcctaccacttggtacttgtaaagagatagaaaagcttatggctagcttttggtggaaaacaaattctaacaaaggtcgcggtaatatttggatgtcttgggatcgtcttgcaattcctaaggatgaaggtggaatggaatttagacatttacatgatttcaaccttgctatgcttgcaaaacaaggttgcgccttttgtgtaatcccaactctcttgttgccaaagtgtataaagctaagtactttccacatactgacttcctctcagccaagcttggcaataatccaagctttgtttggcgtagcatttagggggcgcaagatgttgttcgtttaggtgctactcgggtcattggagatggcacaactacaaatattttgggtactccttggctgccgaatgtccacaacagatgagtgtcttcaacacatcctggactgcaaaataacacagtcagctcacttatgcagatggacaaccgagattgggattctgaggtgattttggatttgtttccaactcatgaagttgatgttatactcggcatccatttgaccaacactactagacctgatttctggtcttgga

SEQ ID NO: 193611 - DNA, 1250 bp, Cannabis indica
atatatcattattatttttattttaggccttttcgtggcgactagattggataaagattaatgcccctttcatctctaacttgttacatcatcttattacttaaccttattaagtttgtcgtctttgcgggtcatccttttccatctcataaatttttcgatatttgttttattatattaattttcctaaaacaacaaagagaatccaacaaaaattggttactgtcccatttaaaatacggcaattataggaactatttatcacgatccaaaaggtatatatgtgttgtggatgtataaatatatatgtgtaatacatataaatatatagctcgagccatgacagtacgtaaaactactattcatatagagattccaaaacaatgaaactttacattattccatgtatacatatcatcatcatcatcatcctcatcaattcaccatcgcccagtataatttctttttctttttcttttctgttttataaatataattatatacatataaataggtagtacaacaaaaaattattttacaaagagtggcacatattggcactacttggtccttgtatttactaggttcattcatagggttgtatatagtagctagctagaaatgaaggctgcaatgtatataattgcacgttggtttgcttttaataaagagaagtgggcttttgatcttttggatttgatgctttgacttttggactttcactagcaaacttctctttttggatttaaagataagtctcccccactcacatggtttgtttcctgagccatcactattcaacttttgctattggccaaaggcaaattctaaggactatggatcaaaaagatgccccaaattaggagggacccaacattgatctaaattcatgattagggttcgttggcccaacttttttcacattttcctctcatcccccctctttacatttaatagaaaagattttaagaaagaaaaaaagttggctttttgatcagtatggacttactttatgcttataataataacttaattacatacagcattcctttctcatgtcggtcttgctttaattatttgaaaatgtgtagtttttaagatgaaagtatttcctatattgttatgcaaaacttctaattttatagtttgaatatgtgtgtggggctagggttttataagtagttatacatataagggtagagtaagacaattggtaaaacttttttttttttttgatgaataatataagt

SEQ ID NO: 193612 - DNA, 5624 bp, Cannabis indica
atacatatattttgtttatatatatttttcaatctttgtcaaatatttaaaaatgaaaaaaaaaaaaatcttttaagttttttaacaaaaaaaaaaattcagattttttttatttaaattattaattttagttgaatatataatttatctatttatataaatctataaaggagaattataaagaggtcatatggtatcctctccttctaataatctatgttttctaatttgtagatttttctaattttttcatatcattttttcctttttaataatttttatacttttaggtcttttgaaaaagtcctacatagtttagaaaccataatgagttcttatacttctaggttatatattgatttctattctttcactttagtttattttaaaattagtattatttattttttatgtaggtgcgtggattaaagtggatgttcagataaggaattactttgacccatcaattccgaggatgaacgtccctgttaacagtcgtagctccggtgaaagagctttggtggtcataggcaacaagggcaaaacgataattgtggaaggtgatagtgataacacacagcacgagggacaaggtgcagctgtgcagaggaacattggactggggaaatcccccaaggggataggaattcaggggcaaatgaaggtgtgccttgtctctcagggtgctcctacctattcgggtaatatgcctcaacattgtaccagacctacatctatgccacgaagtcatcctatgactcgtattgataatcgtgtgagagatgaagggatcattgtgagccttatggctgatattgggcctacacgtgaacagctagtggataggccacatgaggagatttgtaaatcaagggttccccaccaacatcctgaacccacctttgtaacatggcccacagaaaagcctggaggaggtagtggaacaattggtggacccgacccaaagtgacaaatgcctagcccatattgtagttactcacgacaacattgagttctccaaatctggctcaacactttctggggccaagaacaggaaggctagcatgaccatcatccctgtcattgctctaagggacgatatcataaacctgggggataaaacgtcctctacgcctgctacgcttcttcctcccctgaaaatcaacactttcactccgggcagtagtggtagtttcaagggttctacttctaagagaaagaattacaaaagaaaacgtggtgggggctcgagaggtacatgaagctccacaaaataggagtccagtaatcgaataattcgtaggagcttggatacgcttgaagttcagggggcaggtatgagtaacagtgaattggaaaataacttggttgatattactcttcatgaggtgcaaaaatttcaatcgggtgaggaggtggcccttatcaagccccctccttcgccatgaggctcttatcgtggaattgccggggtgtgctgagatccccgacaccccaagaccttcatgcttgggtaagaagatgcaagtcggagtgtatcttcttgatggggactaagaccaataaggaggggacaaaagtgattgaaagagctttggaatatcaatattcttgtacgattcctgttgttggaatggcgggaggctttgtattaatttggaataatgacattaatctcgaagtggcagaagctagtgatggtatctttgaagtcgttatcaaagattcattaattagtttgaagtggagattatttgcgatttatggtagaccgtacgatcgtgagaaaaaatcattctgggatagcttggcagtgaggattaacaggtgctccatgccatggatgattataggtgatcttaatcttattgctcacccttgggagaagagaggggggaaaagagtatcaccccgtgatacgagtactctcttggatttcatgcaccatactggggggattgatttgggattccataggtgcaatttcacatggcaaaacaatcatttttctggtagcttaatgagagagattggatcgcgccatggtttcaagtgactgggtgacctattttccaaatgctaaggttactaatgggccaattttgatttcggaccatgggtatatccttgtggatactagtgtgacagacagaagggatttaagccatttcgtttttttgaagcgtgggccaaggagccgtcgtgtgtagattctatcaagcaggtttgggatttggagggaagaagaagcgatagaattgcagtgagaataagtgacactagaagagctcttcaaatttggaaaaaggagtattttggtgactgtgataagttgataaaaaaagcagagaacagacttggttggatacaaagtcaacctattttggatcatcttcagctagaggaagctgctattcaacataaaattttggagctttggattcgcaaagaaagcctttgtagacaaaaattgagagaggtctggctgaattaggggacataaatttcaagttctttcatgtctcaacaatcagtagaagaagaagaaacgagattttagccataaagggataataatacaaagggaaaaaagattggagatgttttcaacgagtttttcataaagctctatagctcagactctacgatcatcgatgagacctttcatgaattgtttaaccccctggttttagattctgagaatgagatgattaaaagggtacctatgcaagaggaaattttaaatacggtggcagctatgcatctgttgaaagccccagggctgaacatattgctggggtgtttctacaggcactattgggagattgttgggatggaggtgactcaaatggtgcaaacattcgttttcttcgggggttctggagcgctagcttaattacacatttatttgtttgatccccagagaagagagtgcttgcactgttgacaaatttagactgattagtttgtgtaactttgctttcaagatcatttcaaagatcattgctactagactaaggacgattactgataagttgatatcccctttccaatcggccttcgtcccaggatgatggatggtagaatcatttattttaactcaagaactgatctatacaataaagaagaagaaaggacagggaaggcttatggtgattaaacttgatatgctcaaggcctatgataaaattgaatggaatttcctcgaagaagtcctcagaggtaatgggttcgatagtcaagtctgcagtttgattatggagtgtgctcgcacagtctcgtattcagtattaataaacggagttcctcagaaaaaattctttcccaagcggggtctctgactagaagatcccctttctttgttcttgtttctccttaggcagcagaatagaggcattatacatgacatatctatttctagatcggccccggctattagtcatcttatgtttgctgataacacgatcatgttcgcgcgtgctaacacgaagatggctgaagctctgttgggcagcattaagatttatgaatcttggtctggccaaaaatgtagcatggctaagttgagtgtcctttttctgggaatttggccagacattagaaagataatattctctggattctcaatgtgcaagaatgtgcgggtcatgaaaaacatctcgagaatccattcgtttctaaaagaaggaagatagaagagtaccaattcttgaaagacaaggttttgaagagaattgaagggtgggaaacaaaactcctatccttcgcaaggcgttctacactggttaaaacagtggctttaagtgtacaaacttactccatgtctacatgcaagatcccagtctctacttgttgagaaattgacagagcgattcggaaattttggtgaccgggggtactgagaaggaaagattcctagccttggcgggatgggatcggttatgtctccccacagctttggggggtctgggtttcagaaagcttaaagatattaacaaggctttattggccaaacttgcttggcagattgcctctaattacgataagccatgggtcaaatgcctcaccgcaaaatactataaaagaaatttcttctggagtacagagaggaaacgattcatccttatggaaggtaatttgaactcaagtggtattattcgcaagagaagtttgactatatatactgggaagagatgattcagtggacatatggaaacaatcgtggattccttggctcaattatagtgacttcattgatcttatggactatgttcggacacagtatcctcagctaaagacagttacgaacctttctactattgatggctgatgggatcgtgaggtagttcttgagatttttggtagtataattggagcatagatttgtaatattgctcgattacccgataacaatagggatctgttagtttggagagaggcgactgatggggagttcactgttaaacgtggttttgagaccaccctgttggttcgtcccaggccagacagtagcttttggaagctggtttggagacaaaaaattaactacagatacttcttcatgatttggagagtggttgtaggatgcttacctacaagagatagattaagttttgctggggagaagtcatgcatgctttgtgatatgaagctcgagactgctttgcatatcttttgggattgtccacgtgctcgagccatatggtttagcagctccttcccagttatcggtggtgtggggatgggtaattcaatgaaggaaattattgattgggtaattttgatcttacctggggagcttactttccaatttcttgctttcctgggttgtttgtttgaaggcatttggaaagctaggaatgatctcctcttcaagggatgttctgctgacatttcatcagtgaggaaatacatcatgggcaggttttcggagtctacatcgctactggatacaaagttgggtgataagcggagtgctatgaggggcattccgtctgtttacagaatcccaaattctactaatttgatctgccttccgaacgcctcatggaaaaagggtgatgcggggattggctgtggaaatgctcgacaaagagaaaaatcactcgttatggtttgctaaaaattgcaaggcctcctcgacagctgaagcgaagctcatggcaatcttctaagcactgcaactggatagggaggcagattacaggtcaattgcaattgcttctgaagcgctagtggtggtcaaggctttggacaagagcaggtgcccaccgatttgggatgttaggcctttggcaatgaaggttataaaattttgtaagaagtttgatatttgtaattttagtcatatttctcgtgtagacaattttgttactgattccttagccaagagggctagagtggagggtcactgtaatggaatcattgatagggaggggacccctgttatgatacccgattatctggtgcaatgaacttcctttgttctttaaaaaaaaaaaagacaaaacaacagatgaacttttttttttttaacagaactaacatatgaacttgaaagcatatttggagtttgtggccgtataaattaaagagaattatttgtagaatgacgaatataccag

SEQ ID NO: 193613 - DNA, 652 bp, Cannabis indica
aaaacaatcaaaaaattaagttggttttttttttacctaacttgtttgcattagctatgagttgatacttggctgcaaatagatcaacataagttaatgcagcatcagaaagtgtttgccttaactcaatgactttgtgcttgagttttgtgttgaactcttttgacatgtcattttgagccttgtcacaaccaatggggtcataagtatttgggtctggactaggactgtaattaaggctcactgccaaacaaccaagaggacctgtgttgtgtatccagaatgatctggccccttgttcgtatagattctgccaagttaatttatcaacatacaataataaaatatgatttttacaccctgaactataagacctatagaattttgttcattgaattatctttttttttgtaaaaatttccctggaactatggacataattgtacatttttcccggttgaattttactcatattttgagataattattaatgtagttatagtagatacacagttttagtagattacaattactatctatgtaattatttttcatctcaactctcgataaattaactcttgattagttttacatctggaaaatatttataaaaatgaatgagcaatagaaggcagaacccaataaatgtcat

SEQ ID NO: 193614 - DNA, 2531 bp, Cannabis indica
tggggtcccatggcatcgtagtcccttgacctcgaaaacgacctcccaagcttggtaattttcccggaagccttatcaatggcgatgatatctccactctgcaccttttccttacccaatgcctcaatcatcttcgctcccaaatcgtacaccgtctccatctccgtcgtcttcaatgtcaatttcccagtctttgaggccgctccggtcaccgccggccgatcaatttgaacctcaacgacctcgccctcaatgacctccgtatcctccttgattctcaccccaatggccttacgaaaggcctgcattaaagcttccgtcttggacatctcgagagagaaaagctcgctcccagcaatcatagcgaaaggggtttccaaacccagagacttcgccatacccatggcgatagccgtctttccggttccgggttgacccgccaacagaacggcacgacccgctattttcccttccttaatcatctggagaatgaccccggcggccttacgggccgccgtttggccaaccattccctcagagacaagacggggttctaatgttgagtccaggccaagaccccgaatgtgggagtgtgcacctattcgctctattcgggtcaggtccttgctctcggagagctttagttcagccatggctagtaagggtcgtggaggcaaacgaatactctcagaattagggtttaggttttgagggtttttcaggtcagataaagaagaaagactcaaacgaaatgagaaaatgcattagtaacacataccacataaattaattttagtggtaaaattttctaaattttatttatgttagctatttagattttagagcacttacaagagtctttttttttatatggaatctctaatttttttttttttttggctaaatgtgataagaaaaagtttttatcaatttctttaaattatatttatataaacatgcattcaaaccaatgcaatttactttatatgtagagaataaatagtgtattagctaaatttattttaataatatataaataatattttatttatgtatgttgtatataagttcaaaaattattattttaatagtgtagaaaataagaataatattaatttaatgatgtagaaaaaaaatataaagaaattgatgtttggtgtaatataaaagtgtgatataaaatagagaaaataccgttttactaatatattttaaaggatagagtagagaagcagttgagactactcttaccccttttgttcaaaaggtcctattaagtactatagtgggtatgtcacagtgtacacgtgacaaatttttagtggaggatattagcggcaaaattacgtgaactctatgattagtgacacttaactgcataaactggttttttggtggtaaaaccctctaaaccttacttctgttagctatttttagtgacatggtagacatgccataggatacacaagtatacacatggtaaatttttagtggttcatataattttaattcattaaatatttttaagaattataaaaataattaaaaaaatatactttttgatttttcattttttttgtctttcttttatatttttctccctataaccttaatttccacctgcactccctctctctctttcgttcttcttcttgcacaactctggcaagtcacctccggctaccttaaacccgaacgaacaccaaaactgacttcccaaccttacaaacccaacccttcagcctttctctaagcccagaaacccaacccttctttgaagtttctctattttgcctcaacgtcgccggatatgattctccctctcccgcaactctttgccgataccaccgtagttggaggggttcgctgggttcaccgtttcgtccctgggtttgtcgtggtcttgtgggttcgtcacagaagaagaagaaagaacgagggaaggggagatctgataatttcagtcgtagagcactcaatagagcctttcgaaaggaaatggaaaatagctaaccgaagtgaggtttggagagttttaccaccaaaaatcgatttatatggttaagtgtcactatcatagagtttaagtagttttgccgctaatatcctccactaaaagttgtcacgtgtacactatggcatatccactgtagcacttaacaagaccttttgaatgtaaggactaaataactaacaaaagtgaggtttgaagggtttactactaaaaatcgatttatgtggttaagtgtcactaattataaaatttaggtacctttttgctaatatcctttattttattattttaaactttaacataattatttcttattaagaataaaaaatttaaattatattatatttatattttttttccagtacagtcaatattcattggaaataattaaagttttatacattatagtagaaaatattataaaaaatctaatccaaattaattcgtcatctatcttgagtgcacgaactgctaataaagcaaacataaattagaaatgctttaagaaaattagaca

SEQ ID NO: 193615 - DNA, 1866 bp, Cannabis indica
cgctgctgtttgtgggacttctgcccatcccttggttatataaacaatacacatcattgcaaccacaacagctaccgtagaaggtgaccgaaggtttctctctacattattatcaattagccaatttgaaaggatttgacttccaattagcgaggcagactcaaagaaactcatcagccaaaatgtttcattcaaagcatcacgtctgtgcccttgctgcaacgatagaacatatgcataattataaatgaaagagtaactatatctgccgtaggaatataaaagcacaaaaactgacaaattttcaacattgtattggagaaatgaaacaggataaaccaacaaatcaaaactaaagaatggaaaaacaaaccttttcatgatgaactaccatccaggtctcaaaactgaacgaaaatatggaagcagaaactgacaaacaaatactagccaccaaaatacttggatgtgcaacagttctcttcaacaaggcaataaaaaggtgtaagatgcaaaagagcaaacaaattttcttttgtcctctgcataaaacacaagataagataaatattaaagtttaccaatgtctgaaaatggaaaataaaattaacgagattcattgccaagaacagcagttgctgaaaagcattagccctaagctattaaataagcagattacattctggctataatgtaatgagtatcctcaccttaaatagattatgcaaactaagttctaaatttctggaagtgaggaaattctaatatgttgatgttctgctagaataactaatgaattaagatttagaagtagagaaaagcactgatcaagaaaatagatgaataaacttacattaaatccgatactactcctaagatagtaccaaagaatagagaggctccagttcctacacagagagacaatactatgtgttctctactcacaccgtaatatgcaagctccatttcaccaaaaactgaccataatccttcaacaactggcagcagtgggttataaataaaacatcattaatagaagaaaactaattgaaatacactctgctcttctgtttggttgccgagaaaatttaagaaagaacaaagaaatttcaaaaacctcaaatcatccagccttactgcttgcgatgctcaaattctcatttcattatcatgtcaaatcaattcaactttcaaagattaaacaaactttctacattgcctacatgttgtacgacacccaactttttgaaagatggatcaatacgagaagttaaggaagtgtgcacagacctgaagcaagagagtaaaggagaataaagttcctctggaaacgaagaaatgaagaggaagacgagactccatggtcgaaaacaacaggagttctgctactgctgctgaaattcttggaggcgtaagggaatagagcgatcgagaagacacaggccaagaataagagagtatacagcgatggatttggctcccaaacggagctctcaataaccactgccattgattctctcccctgaaataaaggttggtttggatctcagagaaagcgagccatttttggacctcgaagttggggaagagtgtaactgtaaatgggctccgcttttcagtaatccgaacccgacccgacccgaataacactgttaagctggctttaaaagcaacgacgcagttttggagcttccaatgacttgtacggatcatactagaaaatcactacaatttaaatctttcaactttgatgtgtaaaatatagaatccttctacaaaagttaaaagtccaaatttgtcattgacatttttatttccacccaacaaatttataaaaacattctatttaattatttttattttata

SEQ ID NO: 193616 - DNA, 1507 bp, Cannabis indica
cttcttctcactttatataatatataaattcaacttgcattcttgttttaaaaacaaatgtcttttttttggccttcaaatttaaatgagtttagaaaatcttctatttgcgtaaagagatgagagtttggatttgtaattattagtaaacgtgattttttttccttcatagttatgattcatttcttactacttttaattgtgatttttttttaaaaaaagacatggggaagagtaactaaggttagtgtatggagtaaaatacatatttattttcttgtactcaatagttggaatatacacgagtgatttattatctcccacacttttacagctaaacggaaataaaaatgtgttttttcttttttaaaaaaataatttaatattccatttcttatagaaattttgtttaaaaatattaggataattgtttaattttctaagcccgtactacaatcaatttccataagattatgtcatatctcaccatttaaatcttgattttgacatgcatgttggaaaagcataatgcagtttattaattttattttttgttggaatagtgctggttattaattgaaaattcatattttttttcttaatggaataaatgttttgaggggtcaattagttatgacaagtaatgaaaatcatatctagccaaaaaatcatagaaataaaataatagtaaaagaagtagtagatgtatcatgatagtttgtgattgtggttcctttttctgtaccatcttttcctttttcccttacattaacatgtgaaaatgagagttttctccatagaatcataccaataaatgattaaaaattaaattatgtttggccaatggtagttggtagtacataattttatttttccagctgacaaaattccaagctagcttactttggactttttaacatgagaaagagtgtaaattaagttggatagattttaatttctcattggtttattagtgatgatacattataattgatgcacctaatctcatatattaccaaaaaccgtatacatgtgttcaatttgactttctttctaacaaaagataaaaaacccacttcaatttggtaaccaaactctcatacttacaatttgaaaattgcctaggcttagaggtattttcttcctagtgtattatttaataatgggcattgttgaaagttgtcgtttgaagatatttgcatagataactccaaacataaaattaaagtaaaggtctacactaaaaaaaaaataaataaataaagtaaaggtctaaattaataagtctttgaagaaaatgctaaaatacttttaattatatattgggattgactctcttgtgctctttcattttgtcttttttttttcttaaattctataatggggctcagtatgcatggaaattatactttatccactttacacatgtgaaattatttactatgctaaaattgggaaaggaaaatgcaacttgcaaatttctgatctatttattattttattttat

SEQ ID NO: 193617 - DNA, 1440 bp, Cannabis indica
ttggtttagacaaacaagcatattctctcgctttttactctcattttctcggcttgcctttatattttcctggaaaagttacggtaaacagagaaatctaatggctcctcatggcgacaaatctcatgctgcggaggaagccgcagtttctcaggctgaaaacagccccatttccacaatcctcatcgtcatcggtattccttctctcaatattgatatttgtgttgttctgattttcttgggctcttgtggttattgatttgggattaaattcacagctatgcaaactgaagcgcttcctgtggtgaacaagttccagcttacagaagatccccactcggcgtgagtttctactttctttctcaatgttctgagtttttcttgggtttcttggattgtcattgaccaggtctcttggatcacccaatttaagtttgagtattttgtgtgcgtacttggtctaaatttaattccgtcattaattttgactatgaaatacccatggtagtagtgaacggtcttttatgaataccaaccgattcttttcattttttgaagtactgtttcttttctttactgggtttgtactgaattactagtgatgcattttgattttgactagtttggtatataatgtatcgaaattcatatgcatcttgctgtaacaaattccactgatattcttgagtttgacatgttaccttgaaattggttcagcttcccttcaggggtaccttgggtccgatatcatggtatttacaaggatcttcatattaatgtagtttggccaggaaaagatttatctctgggtaagtttctcaactaaactgagtttcgcttttgtttgtcaaaattctttaaatgaaatgttatcacctgtgccttctagcttcagagggtccacattaataccatttatatgataatgtgctactctactcatcacttccttttttttttccggagatatggaatggaaccccatacacttaccactcaaaaaaaaaaaaaaaaaaaaaaaagaaaaaaggaaaaagagcacattacatgaaaaaaggccaatatctgcataagtatgagaatatgacatctttaaattctttgctatccaaagcaataaaaccactctgtatttaactttttcactttgatattgtgtgaccttgataccaataggttggcgagtggaatttacttatgtattttaatcaaaacaaagctacaagtattgaagaagggtgcaggaaacttgcacctcaaaaattaaaatacacatgaaaaagaaataccattttcctgctaacaaaactgatagaaaggcaaaacgtttagtagaaagttcagaaaagcaaaagttacaaaatactctgctaattccgagcaagatcagcaaagaaaatgtctttgaactctttaactttgaacagccatgataagact

SEQ ID NO: 193618 - DNA, 1302 bp, Cannabis indica
ctaattagctactgcttcatagcagtagcagttagcagttagcagtgttcactatgccattacatcaatccaattttgtaagattgaggcatgcaatcaagatttgtaagtacttagcaaactaaccagaacagctcaaaacttcaaaaacacatgtctaacactataacctcgatcttacatagtaatttttttttctacagttgagcttattaacatgctttctgagtagcttctcaatcttcctaggcattgtttcctctttatgtttcttcttcatgttacaataaatgtttatatattatcattcaatgaaggtgatcatatctgagcataaatgctatcttctctgttgtatttccaaatggaaggctcagattagagggtggtacattagctccattgtttcccacatcccttcctagctgtaaaaaagtttgacccaagttcttcattaataccattaactaactcattaaattctttcgtactggtctgtgtatcagccaatagggaagctttctctttaaccctctttatgctaaaaataataaacaaaaaaaggcttcctgcctcgggatttccatttcctcacaagggaatttaagtatcagaagataacttgtatatttatatattaaaacaaaaaaaggctctgcagtctaggcagtaggcaccaaagatttattctgattcagagactcatagggtgtagcaggtttctcccagaccccccaaaaaggtgcttctgttcttggaccaaaacaatcaccctcacatactagtatactagtattctcttcttcattttcattcaagacagagtgaagataggctatgtggaagggcgagaatccaaatggtagagaggatcacagtaaacagattggtcacaagagtcttgtcaaatgaaacgaggaagctttattttgatagggaagaagaatcaattgcttgacaagtaaactctaaagtctctctactcagttcaagttagctcaaggtaaactaaatagatatattccccctagcttattcttgggaaaaggaatatttttctttttgttttcttgttcagcttactcacccttataaatccatgctatcatgcatgtaatcctgaataagtatgattttctctctttgttgctccttaattatttgacattggaaaatcatatcatactcagcatcatcattcaaccatacaaatgaagggaaggtttggttttctcataatagctctgcaaatggtgtacttggttgctgcaactagcaggacttttccaccaactgatagta

SEQ ID NO: 193619 - DNA, 1924 bp, Cannabis indica
ttttttttttttttctcttctcgtagtttagtatgttttgctttttggatttttgttactttcttgtgctttgtgatgtttattatgttatcagtttaagtaaaggaaatgcttgcttctgacttagtttattttttttaaaaaaatattgggttttctgtcatttcttttttcagtttctgaacaattatgggaaataaagtactgagaaatttgattgttgttgtatgtaaaactgcaatctttgagatatgcttaatcatatattttttttgttatttttgttattgaagttatcaattagagctttgcaagaaagcaatggaggagaacataattgtgtatttagggactggttgcgggaagacccacatagctgtgctgcttatgtacgagttacgaaatcagataaagaaaccccagaatgacatttgtgtttttcttgcacccaccgtggctttggttcaacaggttaaatgttgctccctttcatataaaatatctgacttttgctctaagttggattacttttggagttatctattctaataatttttttgcttggaacattcagttgtttcttaatatttgtgttgagagattagcaaaggtcacttcctttttatccttacagtgttgctgttgataacattatatgggccattgattattttaaatgttttcttggctggagatttgtattcatgtgttgttgcaaaagagatggcattgtgtgatgatttatctgtcctaatgtgttctttgtaagaatggcagcaaatggtcttagcttctcccctgtgcgggatgtcattgaaattgtgggataagatgggaaggatcttcatattcaccaaaggcaaagagtagtgaatgtttttcattggattttgtgatagtttgcatttgaagtaactaaataaaagacctgtttttagtttatataattaaaaagaacttttgagagtgtttgggtaaaaaatagaaagaccttatttagtttttaaggcctttttatagaagtctggattcctggataataagaaaagaccttattaacgtataagcacaagtgaaagttttgctaaatgtagtctacgtaactttatcattgtaagagaaagtttaaaatctttgggtgaacgaggatgaatggatgtcctttgttaggtggttaaactttgagtttggtggattgctagctctaagtagtttaaatgctgtgatcttctctttcattttattatatttcgtgcttaatttgctcatttttttttgttttcttggttgtcaacttcttttcctcttcctttatatacattggtaatcagcaacattttatgcttttgtgctaaactaacaacactctttcttataatataagaatagtaaatgataagaaaaatgatgaaaagggactattacgatatttattgctactttttgtgacctggtgtaggctaatatgctatttcgaaacctacctcttttagtttcactattacatggttttaacttgaacccactataatttgcagcaagcaaaggttatagaagagtctgttgatttcaaggttggaatctgctgtgggagcactaagcaagcatattggaaaaaaaatattaagcaatatgaggtactgatgcaattgttataatttctttagggtatgagacgaaaatttttttgtccaagaaggattacttcagggttacattttctttcaaatttaaagtttgtccctcttcttaactgtcattaattgttgttatctagcctaacatctatgcaagaagagagccttttaattgttgttatctatttttggacattaagcttttaaataaacataaagaaatggaactagataccatccttaattttctgtggtccagctgatgcttttttttttcttgaaaaaaa

SEQ ID NO: 193620 - DNA, 2098 bp, Cannabis indica
tatataatattatatatatagctagagagagaaaacataattatagatagtaagtaatcacacgaagtgaaaagtccgaattaaattgctacctaacaaaacattacatgagctctctcttctatttttcaaaatatctcctcaaaaatttactttctctatatatagcttgttttctccatagcgtatcagcaaatatagctaagttataaagcacttgatacttgatggatggatgagttaacatacctaagttatataaacacacagaagtactcacaacaacaatttataatagctaaaatgtaaaataaaatagttaagagattaaaattgagttccattaaatgctttaaagtttagctatacctcattccaaattctaagaaacttttctctacatatagctcaatgaataaaaaagtgataaaatattttacattttttctttttcttttttctttctttgattaatttttttttttctttttactcatttgtgtgcttttctttgtttttatagaaaaatataaaaaagttgatatatagtgtaatttaaatttgtaaaataaaataaaaataatttagtaaaatattttaaaagatagagtagaaaagttgtttagaagtactcccatgagagctctcaatattgctatatgtatttatttacttaaaacatatgatcatttctctctctctttgttctttatataatacttttgtttgtacatatacatttgtaggggctactatagatgcagcagttcaaagggttgttcggcaaggaaacaagtagagaggagtagaactgatccaaacatgttagtgataacctacacttccgaacacaaccatccatggccaactcaaagaaatgctctagcagggtcaacacgttctcaaccatcaaagaacaccccaaattctattaagactacttctagctcgaacccattattaatgagctcatctcatcatcagcttcaaaagagtggtaccactagtccaaaggaagattctactatgatgatgattcatagccaaaacgacaacagcatcagttgtggtgcaggtggtggaagtactagttcgacgacaagtgcttcagtgaaagtagaagagaatgttgatcatgatgagaatattgatgagaagaataatgatcatgatcaagtggatgatagttcatgtgatcatgatcatgataacggtgtagaagctgtgggagggctatttccttataggccaaccatgcctggaccaaaccttacatcgtcggctgttgatcaggatttctttgctgatttaggagagattgaagctgaccctttaaaccttttgtttagtcaaagctttaactcggctgatcatcatgatcatacacataagggcatgttaataagcaagggtttggacccttttaacctgtttgactggtcagcaggtagtactggtggcggtggtgatgatcataataatattggtgctgataataacaataacaacaacaaataaaacaacaagaagaaagagtagtgatcataaaaataatatatactacactttactactcttgtctctcttgagctagtttgtggagtctttttttttattttctcttatattaatatagcaaggtcatttggattgagctttttcttttttctttcttttggaatatcttaggaagttagagattttttatttctttctaccccttttcttaattgatgttttttttttttagttccttactttcttgttatgggtcagaagaagagtcagtaaaaaaatgagataaaaaaatgagagaaagaaagaaaagagtggtgatttgattggaaaaagagagagagagggcaatgagagtagtccctacattccttttggaatattggtggatgggacagaaagctgaggaacagaaggttgcaacagtgaaaagaagtacatccatcacagacatgactagaaagctcagagtgagattgatcgatatataaaattttcaatatttttatatgaagagatgggacttccctttcaattttcttttttttttctttttgtattgtaaggtagttgggtaaaaatt

SEQ ID NO: 193621 - DNA, 1624 bp, Cannabis indica
attttttttttaatttataattacattgaattttgtttgttattgtatatttggttatggtaatatttcacggcaactgacattagtaaaggagattttggtgtgttgggttgtttttatgaaaatttttattaggaaaataattttataaaattttttattaacaaaataattttttatggtcacaaaaacgattatgaattaaattgtgcgactataaataattattatcgcaaaaccaccataaatttattttgtgggagtacatagagtaaaaattaagtgatattgcaaattttaatattttaaatggtttagtttgacaaatttcttgtttggttgtcgagaaaaaagtaaagagcgaaaattgaaggataaattctccccttctttgtgcaatctctggttatccaaattttgtcttcatcagtacgttcattctatgaaaatttctaaattttaagagattttctaatttcctttttgctcagcaatttctcaatatccaaatagtaccaataaatttaacccctttactttttttaccctttacaactaatctattaagaattagggttttgaattttgattattgaactttaccttcttgtatcatctaattttgaaaattttcacttaacttgattggtgcttcggtttggtttgcacacaacctagcaatggcaacagctacttacccgccaccaccaccatattaccgtctctataaagattatcttcaagaccctaaatcggctccggcgcctcctccgccagttgtagggacatatgtctgttttgggagcacctacaccgtgagaatattccactttcttttctctctcagtactttgcagttagaatgcttagtttttttatttatttgttttagctttcaattattttttggggattcattcgaaggacaaaaagaatggagaaaattgtaaaaccaagtttctcactttcaaaatctggataagttgtgttcttaatgtggttgatggttgtagatttagcttgattggtaactatagcaatcttcactgttgatgtttattatttgattctcaaaaaataaaacaatattgtgctcataaacacttttttaaaaaggagtttggctcaattcccattattattttcttgtgttgttgtatagaccgatgacatacttccaagtttggaagaacagggtgtgcggcagttatatccaaagggatcaaatattggtaagcattctaatccccaaatctttgtataattatctcgttacttttcagttttcagagctcacgaaagtttgttgctttgtttgatatgataaatctccaaaaatattgtttttcttagagggttattgaattagtctactttattttcttatttgtttatgtatgatccctttcatttgctacttttcaaaatttgggaatgtttgtttgacataattgtgatcaaataaaccatttatgattatctactatttgttttcatctggagtttggttgagtttttcattggttagattatatgatgcttttatcaaccttaaagtatgaatgagaaaacattgatattaagtgtaacctgagggatagggcactgtttaccaatgttaaat

SEQ ID NO: 193622 - DNA, 2687 bp, Cannabis indica
aaaattattaaaatattaatatactaggaaaatacaaacacattttataaattttaaaggtttaaaaatatagctaatatacaaacacttaattaaagtaatgtaaatatgtatatttatttatatttttaattaaattttatttatgtttattatgtataatttatacttaatataaatatatgtataataaaataatattatatatatgtataaaaattaaaatttcaaataaaaattataatttatacaaaattcaaaaagaaaaaaatataggaaggctctatgcatcggttatttaataatgattgacggcatagggatcctacggtattgttattttataataaatgggatcataggatttctatgccgtggttaattttctgccttacgatgtaatttgaaataacgttagtagtaaattttgctaaaattaatagtataagaagtaaattattatttttaaagctcatttttctagtagtgatagttgtttatatattaaaaattattttggatttgcccatcaaatttgtttatctggagaacggtacaatgttttcgaacttctaactacttttcgttggctatatcattctttatttaaactttttttaaaagaattctttgtattattattttaacggaaaaaaccgctccaaaacgcatgggaaggaagaaagtattataggtagtctttggtattatagctaaaaatatttccttaaattttaacagcgaagaattaattgtagtgtcacaactattaaggaaggcttatggaattatctaaagtttttttttaatcaaatttagttctcgaacatgaaaaagaattcaaaatagtaacaaaagagaatttttctctcttcaattgttttttaataaaagagggaagatgtcaagtcaaatgtgaatgattgatcaagtggatttacactatgggctatatataaaaaatttatgaaatgcgggcaagttttctaaattttcgaaatacttcgtggtactctagtcatgtttcatgtgcctaatttgtttcttatggtgttgtcttcatactgtaaggctgcatgtctgacaaaataaatgaaataataaaaatataaagcactaaatattaagcttctctaacgtgtcaaacaagtacaaaaagataagcctacttccaaactatggtcaatcactaaatggtgccaaattaatcaacactgcggactcatctacatgacgttgcattacatataatcgttttaacattaattattattttaagttgtttttggcaaattgtctatcccataactgataagaatctacatgtctttctagtaagcattactattgtgatatgccataatagagatattccttcatgaagaaaaacaaaaaactaaaccaagccaagacaatgaccaacatgtcatttgaaatacatttgtatcattcttatgatcattattctaatatacacacacacaccacatatgttatgtatgtatgtgtatgtacatataataacatcattatatattgattgttctctctcatctagctaattgttaagccaaattactaccaaaccttttcttctttccccatgaactctaatatcccatctgagtttcaaattccatgttcaaatcactccccaaaaccatatattgaatctgaaaagtttcatggtagtgagcatcatcatagctctatgcatccaaaaagaactgtcatgctaaaaaatagattaccaagaaggtatctaggcgtgagacagaggccatctgggagatgggttgccgagattaaggactcaaatcaaaagctaaggctttggttagggacttttgacacaccagaagatgctgcgttgacctatgatagggctgcaagacttttgagaggtagaaatgcaaagaccaacttcccaaatcaaggaattacgacttcatctgaagaaaatttcaacatcctgggaaagaataacccgaggctttatcagcttcttcagcaggcagtcatgaagaacaaggccaagaacaactgtaacatgaatatttcattatggaataacaataaagaccaaaatatgggtgaggtagtactcgatcagtattttgattcttcctcagttcataatgattttgatactttggttgaaaagaccattgtttgttcttcatcaagccacgattatgacaatggggataataatcgtgatcaagagcccgatcattatcatgatcatcatgatcagacgcataataagaagaatagtactaaaaagctttgcagcagcagcagtagtggtagtaatatttcaattggtagttctaaggtttattcttctgttgttgtagctccttctttcagtgcttccaatcaatgttagaagaaaaaattgtacgatcaagaaggaaataaacaaaataatgtcaactatagtagactgttcacattttatatatctttgtttacagatagttgatgtcgatatgcttagttatgtcgtggaacatttatggattcttacataagtgtatagcactttggctatataggttgatatagcagccgttaattctgtggaaaaatttggattcaatgtgcaaaatcaaaataataaaaacttaatcaacaaacaattaagaatgacaagaatacatggaggcctctttggtgctctt

SEQ ID NO: 193623 - DNA, 1990 bp, Cannabis indica
atttttttgtaggacaattcaacttacaatttttactttatgtttctttggtttttagttgtctacttctctataggtagcttatcttgtcattaaattttaaggtaacttttactgtaaataataatattatacaatcatttttaagcaaaaaaatatacataatatacaataaaattctttcctaaaataattgatattttggtgaaatattattttcctaatattgataagcaaacttgaattttaatagatgcttaagtgaaatctgatatatcatattcaatatcatacctgttaaagtaacttgagaaccaattattatgatttatttttagttttataccaatagacaccaaatcttacaactaacacatgtacttggtagtccatgtacatgtgcaacctagctagttatgatgagagtgggtacatatatagggtgagcatatttagtggtcaacctataaaaatactaagcttacttcttcttcacgttttttttaaacacgttttttttataggacaaaatctaattctagacctataattggttgccttagaatcaacaatttatatatgttaatcggctaattagcaatttttctccctgaactttgacatgtactaaatcatgtcttttgaacttttttggccgttaaaaatttacattgaattattaaagattgttagatttaaggacttttgtctaattttagtaaaaaaattataacatggatcaaagttcaggggacatgatttagtgagacataatttggtagatatcataagtctggggagtatggtttagtacataaacaatcattgaaacagtaaaattgaataaaattagacaaaagtccttaaatctaacaatctcaatagttcaaggagaatttttaatggccaaaaaagatcaagagacataatttagcatatgtcaaaattcagaagaaaaaaattactaattaaccatgttaatcttgccaaaccattggtgatgtcaaataccataagtagcataagtagctttatagtcttctctataatgccaatgtgactccataacatgagcttttcctcatagatgatgtaatttctttcttgatcgttggatcagttggacgattaagattaagcagcaaaatcgatttctatattttatcctcactgctgggactacaagatagataaatgataaccaaactaattgtactttcatttagatgagcagtaccagtcttataatatagtcttattcaatctaattagcctttatttttcaactcactcataaaatttgcttcattttcatctaagttgtttagaacaaacgaagtttcttatttatacgtaaactattttccaacccaaataaaaaagaagggcaatctctgtcttctcaagttatgggtcatggattatatggagaactaattatcatctcgataactttgttgcttaacaatatatgtttattatttttagtttgaatttattatgaaatgagaagtgaagaagtaatatcaaaagttgttatgtttatacattattactagttttttaggggatgtttatttgaagttagtatatgttagaatattttatgatttattattatagatggtttatatgtataaatcaataattgattataattcataatttaaagattttatataattaattatatatttgatattattaaaaatattttaattatggtcttattttgatttattaaatagtctattattatttgattttatttctttaaattaattgtcaaaatattttgacaattagtgacacataattatctaaatatttagctaaagtctttatttttaagctcatctcacctaaacatagtcctaagtgaatgcatgtatataaataaagagaaaatgattgaaaaacctaatattgtcagattgtcacttcttcttctctttgtaaattcaaaattcactagcaaaattctctttct

SEQ ID NO: 193624 - DNA, 2669 bp, Cannabis indica
taagagactcacaacacaaccatccacaggaaactgtcataaggcgtatatcaatagaaaaacctgtatcaaagacttcgtaccaaagttcaaaagattcttaacataatgattaagcaaaggtgggctgaaaatgatgtctttagcgcattttgcaggattaaagaaaatcacctgacaacggaacctcagactgactaattgggagaggttctccatttgctacacgaatttgccactctaccaaatcttgaccaacaatcatctcagtcacaggatgctcaacctacaattgaatacactcaattatagttatgtcacctttgaagattcaataaaaatgacttcagaaaaggttgttgactaaaataacctgaagacgtgtgttcatctccatgaaataaaattgcccggaagtagtatcaactataaactccacagtgccagcattgtgataaccaactgccttttatatcagataaaaatgttcaatagctacactggttgaaatagtaatagcatgtagcagtaaaagaaaatgttaagaacacaaacctttgcagcagatacagcagcttgacccaagtggaaccggaattcatcagtgatatttggctgcacaaaaagattttccattaaaataatagaagaaacatgacacatgagctcataatttgggaattgatcattacagctggggcttcttcaattattttctggtgtcttctctgcacactgcaatccctctcatacaaatgtagaacgttcccatttttgtccccaaaaatctgtagtaaaaaaaagtaacaaatactactgtatattaccaacaaaaagtgttttaatatagacaatgcttccgacaaaaaacaaacccagctattttatataagattgcaagaccgtgaaactaactttcgggaataagcactgcatagtaaattaaaaaatattaatcaaactaacctggacttctatgtgccttggctgcgtaatatatttctccagcaatattgtgtttacaccaaatgaagcagcagcctcacgttgtgctcccaggaaggattcaacaaattcatctggactctgcacgatcctcataccctagaaatatctaaaccataagaatataactctgagataaaagaacacaatacttgagcatgtaaggttagcttggatatatctttcttcaccacacaggttctaagtacatcaaaaccatttgacacaaattaactgctctacctttaacatgttcttaacttagcaaaagaaacgtaatgggcatattcatatcagttcaaaataaagaatggccatagcttaaaccatacaacaaagtaaaaggaaactgaaaatagcaccttctatctttaaaaatgttgaattcattgtaccaggaaagcaaaaagccacacacctttcctccacccccatgagtgggttttatcaaaactggataccctatcttgtctgcttctagtttcatcatatcaacatcttgttcattaccgtggtatccaggcacaaggggcaccccagctgcacccattattctcttcgacgcactgcttacacagcaaactccatgcattataacgaaactaaattctcaattattacaagagaaaatcagttatgattgcatcaattgaaaatgaacaaaaagtaccttttatcacccatttgccgaatggcagaggcaggaggccctataaatatcagacctttggactcacagagttgagcaaaatcagcactttccgatagaaaaccataacctgggtgaatagcctaatcataccataagggaaagacgtcaaaaccagaattccaatcctacccttcagttccaaatatattccgagaagctcacctgcgcgcctgtacgagtcgcggcttcaagaatcgacgaggcactgaggtaactcaatcgagccggaggcggaccgattcggactgcctcgtcggctgattttacgtggagagagtggcgatcggcgtcgctgtaaacggctacagttcggatccctaggcgcttggcggtcctcatgatcctgcatgctatttctcccctgttcgcaaccagaatcttctctatgcggttcgaagcggaagcagaatccgaaaacgatcttactctgacaacatgaacgcgaaatagttttccgggaagccttcgccggagtacggcggccacgaaggccattgcttttaacggacttagctaaagtgattgggttggggttgggcctggtattacgcttctatggaaactgtaataagaagaattggtgggaaaattattaaatatacagtcccggcaaggctagttttgtaaaaatgaaaaaacaagtatatgatgtgtcgacgtttgattggtggtgttttataacagttggagcttgaagtaggcattccaaaaactaatcgtgttcccttaaaacttatccgttgacaccttggatatggatctgacgtggtactggcctggaagtcttagatgaagaagaggcggcttccttcagcataggctacattttttttttgaaataattagggtgcattttgttaattgttaacaattatgttttcagaaaatatgtttgggaaaacagttttacttttctttaaaaagaaaataagttttatttttaaattaataa

SEQ ID NO: 193625 - DNA, 1488 bp, Cannabis indica
aaaaaaaaaaattaaaaaagatcgccgtcagaatagaatatattgttcttccacatatactactggttctgtcagaagagtttacttacaatataactatatatagaatcatagatacagacttagtctggtagtggatactgatcaatcttgagaaagaagaagaaatgggaaactcatgggggtgttttgctcctcggagagaggtgaacaacttattacagcgtcgacccactaataataaaaagtcatcttcttcaccttctcacgactccttcatcacaagaaaccgttccactaataagaaaacagagcatagagaagatgatttgctccttcaacaacaggccatggcggcagctctgcttttccggcagcaccagagaaacggcactggtgatcttccggcctcccttatgaaccgttcaacctctgtcgtctatccatctccggctccaagaaagcaagcctttgctaagagctcaagttctaggcaacgctctgggtcagatactctgcttcaccctcaggagcttctcgtttctcaggtctgttcggctcacttccctctctctctctctctatgtatacatgtgtatgtttatttgagtttcttagtatagaatgattgtatgccagaaatgggttcatttcatttgatggtttaattttccattttctatgaacatttttttcctcttcctctctatacatttcatgattagtttttggtttgaccgactcggtcaaatgctgagtttcagacacctcactgtagcaattggggtttttatttacttggtgtttaagttacctctaatttgcttttaatcttactcggtcaaatgacttaaagctatatgtttcggttcacctctttagatgatggtttttggttaataagagtttcatagtgaaatgtactctaccacttaggaaaattatagaaatgattttttttccagtctagaataactgtgtagattataatgtgcccatttttctttcattaaactaatgaattttacttcattttgtcggcttataggaccggaagagtgttgagggtgtagaaaccaaacattttattcttgttcatggaggtggatttggtgcctggtgttggtataaaaccatgacactattagaagaagaaggcttcaaagttgatgcggttgacttaaatggttctggagtccaatcatctgataccaacagcattacaagtcttgcacaatatgtaaaaccattaactaatattcttgagaaactagaggatggaaagaaggtttgcacactctaatctttgtcttctttcttcttttggtcattgtaaggttgttttgatcaatttcacacaaccaacattcatattatcataacttcaagttcagactaatccctttcgagttccatgagtgcctatacacttacatattattttgattaagtgtaggtagttctggtgggacatgattttgggggtgc

SEQ ID NO: 193626 - DNA, 1951 bp, Cannabis indica
tttcggtttttgaaataaaaaaagggttaaaccaaaaaacgccaaaactataaaaaaccgtaataaatcgcccaaaatcgccaaaaatgccaaaccgaaaaactgccaaaaatcctacggtcggttacagttttcgtaaaataaaaatcgtaaccgactagtcggttataaaattgtaaaaaccgaccataaccgatcgatttttacccttactattttggaggctaaaacaataaaagtgtaccacacttattttccaaaataaaataaatttgtccataatttaattttagaaatttgaatggaaaaattttaaaattaaaattttcaaacaagccctctctttcctcaccctcagtagtcactggcgctggttttcagttgcagaacatataagatatattttcaggtactatcatctattcctcttcgtcacttcaatcttcattttagggtttcaattgctactacctattcgccatcccagtcgctgctcattttccggtcacactcaggtttgattatttcgaattctattacattaaacgatgcatctaagcatatttccaataacacttgacaaatcaatcggatcttaagtttattttatttggggatttacttggaatccttgctatggtttttctttaaatgttaatagcatctgccgattttgaaacttaggaagttgatgatctgtgatttacccttggtttcagctaaatcatatacaaacatgaagcctttgagtatgtggttattgctagtggggtctcttcgcttggcctccgtttggttcgggttttttaacatttgggctctccggctagctgtattttctcaatctccaagtatgtcaactatcctgatttttaattattattattattttttatttctcaacaattgattgttttgagttcaaatcaacaaattttatgttcgaaacttagaaaattttcatacttcttgttgtggtgtatttagcatattttgtttgagtccaaaaaagactcatttaggtaaggaaaggaagatagctgtttgtggaatttgaaacctgcactttgtttatttggttatgtaattaggagattcttattcaacttggttaaatttcttaatgccaacggatcgattggcattgttcacatgcagttataagtcacagctccatggtcattttagtaagaattgaattttattgtcataataataatgtgccaatttattgctgagctctatattgacaccaaaacctacctgtgtagtgtagatatctgggatactaagaagtgtaaactagttttctgattagtggtcctgcttttctatggttcatttgaactaaataataataacatggttaagaattatgatatgctacttatacttgtgtgtgttttcttatgtagtttttttttttttattcttgtcaacagtgactgaggttcatggtagaacattcggtgtgtggactcttctcacttgcactctctgctacctgtgcgcatttaaccttgaaaacaagccacttacttggccacttcttatcatttgtttatgcacttggtcatttcttaactgaatacattatctaccacaccatggctattgctaatctctcaaccgtctgttttttcgtcaggtataaattattttcttaccttattcattgtttatttcttatgtatttttaacacaaagtggggactaatttaatcccatttaatgattgctccgttgcttattgcttaatcttgaaacaaaaggatccccaacatgtacacttgccttgcctcatcctagttgagctggattaaagttgactaaatttgatgtctatgatttgatcaggcacatctatagtatggatgcttcttcagtggaactcccatcaaccccaagtttcctcgaaagcagactaaattgtttgaccacattgaagaca

SEQ ID NO: 193627 - DNA, 2153 bp, Cannabis indica
tataaaaatataacattttaaaagtattggagatggagattggatataaaagtacaacattttgaaaacatttgagtatttttagtcgccatttactctaaactaaaattgattttgattaaatcatgtcattacatcctaacttgtgtttctaacctatggcaatctcaagatgtcaaaccagtgacaagcaaaacagcagtgcatcattcaagtgtaaaatctattctccaacaaattatgttggaatatttaggtcaagttggcaatcacaatatccaatggataagtaacaataacataacatattattcttcaatggttaaagaaacaatttgacttaccaacaagttatcatttccttcattatggccaacaacctcattgattaagagttctcgatctgcaggaccaccatgctccaagcatttttcaataacatttgatgcaaatttatgctggctaagctgaacgacatgtcctgatagcttgctgataattagacttctttcgttagcttttcccctctccaaaacatgctgtgaagatatcacaagcatcacatcaatttccaatgaccacagcagggaaggtaatcatatcaatataaattcatttcttaacatgctagggccaataagagtattataatcctaaggaaatgatgacttggaaataagacaaaatttggttaaaaagggaaaaataatgagatggacgatcccatatcacaaattgaacggcataaataaatttattgtgaaaatcaatctaatacccctatgtttctactacgatgagattcaatctgataaattttgctgatattattttccatttataaaaatttaaaaccaaaacatctcactttcattttgaatttatttaactaaattttttgaagataatccgagtaacccttagttgttgtgtatatgagagagacagagtgacccaagaaactgcaaacctgagtcacataatttccgtattgatcctgagccagagtacatacagattccaaaatttcatccacaatgaactgacattgcaactcatctgtgcaatgctccagaactctctgcaagaaacacaaatcttagcaaccaggtcgcataacttgaagaacaaagtattaggaaagagaacgaaagagactgcatcacaccagtcaaggataggattacctgtatcacacggcagccataaggatgcatagaaagtgttgcaacttgtccacggaatgcagagattataaacgcaattttttctgttggaatgctctcaatgcatttttgtattacatgattcccgttttgatctcggacacatctcataacatgtccatcaagctcacgaacaagctgagctttctgttcaaggtcaatgacttccagtgcctgcaccagccaataaataaacaaagtcaaatgacagatgcatatagcacttaattaatcatggttacattttgtaattataactgtgtgtgactgggttggattacagctggctaattttagcaaactaattacatttagcggttgtgtaattcacacacaaaaaaaaagatgttctaaaaaacaaacacacttggaacaatagaagtcaatgcagacaagaataaactattagaattttttacactattattaaattgaatatttaagattatgtttaaagttgatttattttacacaagactatctaatttgcaatatcaattttttatcatgtttagtttccaacttatactaaattctctagtgttagtttcctgtatatgtttagttattgtttagttttctaagccagatcagatagggtccatgcaaaaaatgcacacatcaaatcctctgtttgcacagtatagacataagtacaattacagaagcacctccaaaagagcatgtacctcatgaaaggtatcactgaacaaaaattaaaaacactaagagaagctcaactcattttcgagttcttaaatatgtcaacttataggattagaaatttcaagaaacattttttttactcctgtgctactatggtgatccatctttcagctcagacatgtaaaaacagaatgtaaaacagtaaaagaatatcatggacacctgaacttagggctcgcctatatatgggatgtgataaca

SEQ ID NO: 193628 - DNA, 3244 bp, Cannabis indica
ttgtttcaaaaaaaaaaaagtgtaccatttcagcttcaacacgagtcattcgattgacttagaagttagaagagttaaagatcattgtttcatggcaactgtaagaacatttcttatgttggtagctcttgaagttgctatcatttttttgttttagcataatatcatcttatccatttgcttaatctttacacagctcactctttctctcaccaccacaacacttttgaataagactcaacttttgtccacatggttacatacaagattctcctgatatctacaagcaggagataatgataatgatatgagatagtaaccaatctcaagaagttaataaaatcttaaaaatggttaccagatttcgccgcagtttattgcagtactgatccaatatcaggaaggtcaggggccacacagaatcttaaccatctcttcttctcagtgtacttgagacaaggatgcataacaagcccaactatcacagccaagaggcttagcaccataaccttcaaagaagcaagggctaagaccacaaaaatcagcagggttgggggatgcacaacataattgcacctgctgtaccgacggggatcttataaggccgagatgcagctggatatttcatccttaacttgacaaatgctatgaactccattatcattccaaaacagtataaatagttctctgctgctacaatctcttgaaaactcatccacgaaagtagaatcacaccagacgcggagaatagaattcctataataggagttccatgctgagactttttgccaaagaatgctggaagcatccctcggtatgccatcccctgaagctgataggcatcgctgctcatttcagctacaaacatccccatgtttgacaaagcagatgcagcttggacccaaaatcttaaccatacaccgcctagtattttagcgatttcggagaagtaaccatcagaccagagttcacgatcaaccgggatagctccagttcctaccagaagtggaaatatgtatcctgatacaaccaaaataagagcataaaagagagctcttggaagtgttctgctcgggttgtctacttcccctgctagagtactaattgaatcccagtaattgagattccagaacaaaacattcaagtacaatgcccagttcacattttccatatccaccacaagccaccttgagggctgtattttcggaattgcaataagtcccatgaatatgaaaggaagtagagaaaatgttcctagtaaaatggcaacccaacctactatagttaagcctctatagttcaagtaagtgaaaaatgcagtcaaacacaatatggcaattactctgtataaacctgtttccaactcggggattcctgatttcagatagtctaggaataaaacggggtatagagcattgtcaataaccccactcagccatttcatccaaccttgctggaatccccaataaggacccaatgctgatgaaacccaaacaacatatccaccattttcgggaaacatggtcgccatttcagctgttatcaaagcctcaggaacactccaaatgagtgcaaaaaccagaaaaccaacaagggctaagaagggaccagctgcctgaacactgtcctcaactccaaatggaccccctgagacctcatagaagatcaagaatacaagaggcagcattgaaactttatgaattctctctagtttgggagaggacccttctcctaaatgaacgtatacatcactattggaatccattgttgaagaggaagtttgcttagtcaatgcacttctctgcttctgcaagtaaaatcataatttgaaccataacaaatatgatggaatagtagagtaaagaacgtacaaaacaagtacacaccccgtttatcagccatagaaagaaaattacacaaaatgggctctgaaagtgataatcaaacattagttttaacaaatgcaaacacattataacccccactgattctacgcaagctgaagcccatacaaagcaatattaggataccaaaattaggcctaggtgcttatttagcaataaaataacaaagctgaagttcacatatcatgacaaatagctaataagaaaatatttaagctcagattgcttttgtaaaaaaaagtttccaacaacaacaacacaatctaattactatcacaacaagcgaaattgaacgaaaccaaaagttgggtttttccccaaacagcacaaaagaacaaagtaaacatcaatgagagtaaattataaacaaacactcatcatgttcaatcaagattaataaaaatggtacctttgttcttgggtcaaagattaatcaccagaacgaacccaaagattaacacccaagaagcaaaaaacagtaaaaacgaacacagaattgtttcaaggtaagaaattgggaagaaagatagaaaccattaaaagaggaggggagggcgtgagttgcgagatgaagaaggaagaagaggtgatgagtcagagagcgagtggagtgagtttgagaagtagttcaccacgcgtcccaccctttcagaaacgcaattcctctgtgactttgtgactagagttatcgattatcgatccatatttggtttcttctcacttttttttttgcagtaaagtgagagacagcagtgactcttcactcataattggccacgtttttgtaatttgttgttgttgatgtttcgctttgagaaaccacaagaatttaaatgtgttctacagtttcttcaactaattttgtttgcttagtaaaaacgattgtgtattttagtgtaaaaatgtaaaattgacatgatcaaacgagaggcataaatattaaatataatacctagaaaaatgtacaaagaagtggtcatatataacctactagttttatacttttggtttaggttattttatttagggttaggtaaataaaatttttaaaaatatactggttttttttttttatatatatataattaggttcggattttgtcaaacttctaatacttaaatatggcccgatttggtatcgggttgaactcgaacttggccttgtaatttttaaaactgatttttttttggatattttgaattcgggttgattgggtttgtcggataattgatttagtacaaatgttttgcccttcaaaaaagagttcgtggtttgaatccaccccctatatcaaatgagatattattttttggctaattaagatttttaccccgaaatg

SEQ ID NO: 193629 - DNA, 2457 bp, Cannabis indica
aaaaaaatttagattattttttttctaaataccaaaatagataaaattaaaaaaaaaaataaaataagtattgaaattaacataaaacaatatgagaaaaaatcttaaaaaatattgagagttattttaaaaattattttaagcttaattttattaaatattagagtgtacttttcattttattaaatacaactccccttcttttttttttttaagtatttagaatagtttttcttaaatttgttttatgctattttaaaatttcaccctttaattattaggactactaaaatatattttctaaattttttaacgactaaaaaaattcacgaagcataatttaataattgtaatagttcggaactaaatttctaaaataagcttttttaagttataattatttagaatctttttgtgaaaaaaataaaaaattgaataagttaaaatgagaaactttattttattaaataataaattagtataaataatattctgaatttaattttaaagctggtaatagcataaataaatatatgaaaatataattagtctaatcataacacatttaagtcaaattattaaattttttatttagcaaaaattgaattatgagtcttattttgtaaaatataggattattgtcatatagtaaaatagatattctaatgaataatttatgtaaaatataaattttaaattggtatttactcataatctattgtattctattttttggaaaaaaagctaaaaaaaaaattaccatattggactaatttttttactataaatttaccaatatttaaaactaaaaaaaaataataattaaagtttggatgcttttacaatgtaaaacctaaagcttaagggatttatcctctatttatttgatttgatatttgagagaattttttgatttatttttttttataatcgtctacattgtagttatttaagacattcaaattttaagaaattcaacaaaaatttaatactttgagaataaggttcaaacaatctattgtatttaagagtcttttattttatatgcgtgtgaaataaattgtttgaacctactatggaaggattaaattttttaaattttataaaatatattaaatagctaaatgtaaataattataaaaaaatattaaataacaaattcttttggtattaatgaattcccttaaaaaataaaaacattcaattaatttgactggaggcgttggacaacggtgatgaacaatgaaagcctggctatgaagcgcgtgagtgtaacgcaccaatgaggtgtaaatacgacagagtggatatagtggggcccaccctagttaggactagtctttaagtaacgttaacataacctcattaaactacgttatatatcatactgaccataaaatctcacttctattaaggttagtttaggtatacactatccacaaatattttaatagagtgctattgttaacattttattacaatcttttaattaatttttcgtgtttaaaaatgtatgttgaaatattttttaaattcctttcatgacagtatttattattatacttacaatattatttctataaatttttggatagttcacagtactgaaaatacgtttaaaattttttaaacacttgtggtaaattggaatatcaaaaactttgtttttgacattgtaaactattcgaaatttttaaaaatttacaggaatgatattataactataatgaatatcgctataaaaaaaattgaaaaataatattctagcatataatttcgggtgtgaaaattgactaagaggttataatagaatattgtaattactagttgtgtgtatcactctctaatgtctcaattaattatcatgccttgtataatttattataataatttttaattagtatcgttagctaattataaaatattacatttaaagggtgttaaaagtgtactccccaatgctcatatttaaaaccccacacccacatcttatttattcttttatttataggtgtaatctaggagtgtcactagttaaatattaattaaactatatttactctttatattcattaatatgcattaaaataaagtgtgtgtctgaaatcgctgcctaataaatatcttcttaaattctaaaatagttttatgtgctcatttattatatcttagttggttaacaatgaaaaaaaaagtaaaatatctcccaccaatttttatttctcattacttacttttagcctatgttttatttattattttttaaaagacgaacaactttagagcattattatgtagtactaaaatgttaatattattatgaaagtgaggttttataaataattaatattacactaataaaataatattacatattatgcattgtgttatttaacattttctcataacttaataaagtccaacaagtgaggtaaaaataaaactgcacaattctct

SEQ ID NO: 193630 - DNA, 1156 bp, Cannabis indica
ggatggaaaaaaatttccaaacttgttttgccaataatgtgtcattgaaatgtgttaacctgaatagtctctccagcctgctctggaaacttcctaggggtctctccctctccgtctggtgttcatcttccagtccgattaatccaaaaaaattctcttttaatctttctttcttttctctttctctccttagcatttattgttgattgttttttcatcatcatttctttgcagttgtttctttttcttatactgctgatttgagaggcaaagaggatcttttaattagcatttaattttggctgctaaccctcttttctcaagttccatttattgctgcaagtgataatctttggtttaaattttctccaccatcctatcagccattaaatgcatgtcgatcctccttttttgggtttattctgcagcaaaagatcctctttttcaggtgcagagctagggaaaggctcccctaatctggtttctcctaggttcgagatgaagccttcattatccaggtatttaccttcttttgtctatttaaggtttcttttttatgagctttctgccatacccttttattctctgctatcctttttcttctacattgctgtttttaccgaccaacctttcaccatggacctttcatctcgctcccatgaacaaagcctaaacttcactgatgaagaagctttagttcatgaatttgataacatttcggttcgctctgatgcttcccctcagtctttctgtctagtttccagaatcttgtcccccaaaaatatcaaagcttactgggttgctaaggctatgaaggatgcttggatagttcgctgccctttctccttttctgattatccctctggtatgtttcttgtgcgtttttgctgtgagggtgataggagatgtgttatggaaggacagccgtggcactttgatcgcaatcttattctttttgcccttcctgatgaattcgacactgttgtcccctcccaagttaactatgttcccctctgggtccaggttcaccttatcccatttggcaaacggtccactgaccttgacaaattcctgtcagtgcaacttggtgatgaagtccatacaacctctctctatgacactatcttacccttcatgcgtattcgagttcttgtgg

SEQ ID NO: 193631 - DNA, 2924 bp, Cannabis indica
aaaaaataaataaacagtaactgagctagatatgtaatgtaacttacttatccaagctacacggtttcaactttcttggccagattttgccaccatagcccacgctcacaaatttgatagaatcaggtatcggttcgcatcgaactaacccgcttcgaaaaatctgaattagaaaacatgcacagttaaataacaaacatactagtaactaatttgtgaagtggaattagtatttgaaccagaaaattaacaaacatttcataacctgctaaagctcaacaattcccactgaaccgaaattgtcgaatgcaagaatagcattgttgttatccatagtgctaattggagttagtgattccatctgaaatttgataaccagcatccttcatttccattgctaattgtcccaacatgtcatatatttcatcacactgatgatgtttctggtctttagaaacgaaacagtttacagaactggaaatctcaatccaactacaccctgtctccttccacagacccctttccctcatttgttttctcaatttatcaacatgtgaccactctccttcctctgcatacatgtttgagagtaatacatggtagcctgtcatgtcatttgctttccccaattcgagcaacttctctgcaacaacttttcccagttcgaattgttcgtgaattctgcaagccccgagaagtgatccccatatttcgagcacattgccctcttcgcctaatcctctaacaaagtcatatgcttcaactaccctaccggccctccctaacaagtctgccacacatccatagtgagcagttgacggttgaatatcatattcttttgtcgtcatcaactcaaatattcgaagaccttcctcaaccaatccagcatagctacaagctgacaagacagcaacgaaggtaatggcatcaggtttgatgccagaactttgcattgagtaaaacaaagaaagagctttttcgcccattccatgctgaccataacccagtatcatagttgtgtaagtaacagaattcttcatagtggtttcttgaaacacattttcagcataggaaatcgcacccgatttggaatacatatcaattagtgcagttcctacaaagacattttggtccagcaagtgtcgaatcgagaacccgtgtaactgctttcctaaatctatgttccccattggattacaagctgggagaatcgatgctaaagttacagcatttggctcaactttttgcttcatcattaatcttagaagcataaaagcttcttcaatcagtccattctgagtgtaccctgcaatcatagaattccaggtagcaagatctctatcatgagaacaacttttctcaacgagtattcgtaaagtactaaccaatcctgattttgcatacatatcgataagatagctgtacatcccctcaaattctatcccattcctaattagataagcgtgagtctgctttccaacattcgggtttctaagatttgatgctgcagaaaggagagcagttacagttacagaatcaattgtaaccttctgtttctgcatttcatacacaagcattaaagcttcatcatccaaaccattatgcacaaatgcagaaaccatagtattccacgaaacaacatccctttccggcatcccatgaaagatactaaatgatatatcaacagaaccacaccttgaatacatagcaataacagcattttgtatatataaaggtaccactctcaaattcttgatcacataagcatgtatctcttgagctaactttaattgttgcaactgcgaaactgcagttacagccgaaagaaaactgacttcatcaagaacagcctcttctgacaacgttgctcgaaggaaaaggtcaatcgcttcattgggaaagttattttgaacatatccaccaatcatggtgttccaaatttctgtgtttttctccaaacaaaggtcaaacatcttcctagctaaatccaaacaaccaagctcagcaaacatgaatatcccagaactcacaacaaataagtcattcacaaattcccctccattttttattagcaatccgtataaagcaatagcatgattataatatcctaaacctgataaagcaggaaatacattaacaaaactaaccgcacttggttttactctcatcctcatcatcctcacaaactccataacagcttgttcatatctctcagtcttcacataccaagaaacaagtgtattccaagcaaccacatttctcttaggcattgtatcaaacaccttacgaaccaaatcatactttgaataatctaaaccaccatgtgaatgtgaacaagcagcatacatattcaacaacgaattatacacaatcctactggggttcgatatacacctcaaaatatggcaatgcaatgctctacccaacttaaggttccgagtatcagcacaagccttaagggttgaagagtaagtataagaatcacatttggtttgaggagcagatttcttcatctgggcataaaccaaaagcccttcatttggaaaattgttgcaaataaacccaataatgatggtgttccaaagaacagtagttggtcgaggcaaagtatcaaacagttggcgtgcaaggtggggttggccctcttggcaaagcttgctaaggcgagcacgaatggtgagattttggggtttcttgggaggtggaatggttaaagatgagtgggaattggggtttggagtggctgttgaggtaggtgaaagtgggagaggaacagaagaagaaggggatgaggccatggccttctctgttccttgtctacaaaatccggttacctctgttgcttatctccagaatcgccggcattttcaaacgcaggccgttcgttttctcagcaaaatcaaaaacattttagtatttgtttt

SEQ ID NO: 193632 - DNA, 2548 bp, Cannabis indica
tcttgtttttattgaagtgaacttcataccagtgcatggaatggaaatcatgcttaaatttagagacagtagggttcctgtttatggtttgagctttcatctcttctaaatataattttatagttcctacttaaataaaacattagtgcttaacattttataccgccctagcatctttttacatcgagatattaaactaagatcgtgagatcatgtttgaaaagtaagatatgattgattaaattggataattttttatgattggatttgttatttgtacagagtatctttgaaagattgatccaaatccaatcactgaattaccaagcaccaacactaaggcataatttagttccatattttgcaatcaataactcactcattctcttcatttattctattttttttttcatttaaaccttatttagctgtcagtattgtgggcaccctatgatataatagggtttgaacctaattgattacggtataatgctgtgattatagatgttgaaagcaaaatattcctgtcttggatttcggtttctttcagttgcatttgcataaatatatattacttttgtgtagtggaaactatggctgattacatttttgggcatgccttcatgcaggtagctgagtggggaagaatgagtatgtgcacggctgagaggagactcctcgctaatgcattgcttgatatatcaaacgaatggtttattcttctttcagaggcatgcattcctctaaacaacttcagcattgtctatcgctacatatcaagatcccgttacagtttcatgggttcatttgatgaagatggaccttatggaagagggcgttataacgagaacatggcacctgaggtaaacttaagtgattggcgtaaagggtctcaatggtttgagattaatcggatgcttgctgtaagaattgttgaagatacaacctactttcccaagttcaatgagttctgcacaccggcttgttacgtggatgaacactacttccaaacaatgctgagcatcgaaactccacatctcttggctaacaggacccttacttatgtggactggtccaggggtggtgctcacccagctacttttgggaaaaatgatatcaagaaggaattcttcaagaagataagtgaaagtaaaacatgcctttacaataaccaacctactacactatgttacctctttgccagaaagtttgctcccagtgctttggagcctctattagaattagacttctgatgtattagggatttcataaattcatcgatttttgtgttatttttgttcttctcaagtgctgatcagagattatcagaattttgatacaagctaacccagattatgttaatgtcaaagcttattacatatacaaaattggaacccacagttaacattctagtgaaacttcctggtataaaaatattattttagattcttaatggggttccagttgatttgatgtcataatatagcactatatatatatatcttataaatatttgatctctcactcttatataacattttttttctcaatttcttgtgacctgtggatattagcgtactcttctttgtttctgtataattgtttagataaatctgtattgacttgttgatgtttatttccaatacatgtttcattgctaaattaaaatgctcgtcccttaattgatatcaagatacagagtgcttgttttagttgattagtttaaaatctaatttaaaaaaagaaaaaaaaaagttcagtgacggttttcatttcttccaatgaattaaaatataattatttaacttattttagcagaacaaaaaaaattactcgtctgatttatcgaaaaaaaaaaagatagtatatacttaaactgaaatggaaatgaagactatgttaggtataattatacccggatcataaaaacaattcctaaaagtaaaagtttatgcaaaatgaaaacccatcttggcagctgaaccaatatactaatttgtaattgtctttaaaccaactacaattcatcatgtaattctccacctattaaagtggttttgggatggaattcggataaataggtagtaagctaaggaagcgtgaagtgcagcaccataactaagtgcttcttcattgatgtaaaaagtgaggtgaatgagctgattcaggctttccaacacttgtatttttcatcccaagaaagaagaagtatccaggtatgacctcttggtagaaaagaaaaatcttctgatcccattaatggttgctatttctttaacccttatggcttccaagtgtttcaccagctaccccttttgaagtaatcatgcaaactttcatggttgactgtcggagggaagaaaggtttctcattttcgaagaacttacactagccttgcacctctgcacactggcctgtccttttataacctattaagaaacaaagtttgagcttcttataaatagaggcaaagagaaaccaaaagattaaagaaaaaacaactcagacgcttgtgaaaatttgggtcctcatcaaacatactagttg

SEQ ID NO: 193633 - DNA, 2893 bp, Cannabis indica
gatgccaaacatgcactaagtgactgatattctcatctttaactccacaaatcaaacaatgaagattcaaacctggttcatacatccttattcgatatttagtcctaagcctttgccacataacaagccacataatgaatttatgtttaggagtcattagtctatcccaaacaaattttggccattcttttttttttcgtgcatttcaaataacatagtgtgtcccgcttgaatgctgtatttttgacccacaaaggctttttggctaatcttttccttgagctcatttttgacagccaccaaattaattttccaatactagctgcaatccgtggggtttgtgtaatcccaccaattgtagtttcccaggcgactttccattcttgtatattcctgaaacctaagccaccatttgattttggtcgacagattgcatcccatgctataagctctacatttatgttcactgcattttcctttcataaaaagactctacagattgcttctacatctcggagcaaactctttggtaagatcataatttgcgctcaataagagcgtattgctaacaacacagaattaattaataataataacaataaatgacgagaaggtttttacgtagttttaaagttagttattcataatccacaagtctatcttattctgggttgataaaattatatacagaatacaataaattagtcttcagaatgaaaaatagatataattctctttcttttcccaaaatggtcgtcctttgtttcttgatttatctccctatttataagagtctatgacgacagttattctcttgagatcttattatcacttgtaaccgttcgtgaaacgtggacaatctccacgttttatatctatacacatgagataattacaagtaacttctcataaccgcacttttaactttattcgcaagcggtttatgctagactattctcgcagttcaacaatacttttcaaaacactttatcgtaagccagcgtctaagtatagattttagtaattctcgcgtttttctattaatattgagtgaagtatacacaagacgcttattatagtgtaacataagcgagatgaatcatgtcgaagttgttgtctttattttttcaatatactcacatgtatgtgggtcaatgagctgtaaaatcattatctacactttctaaataatttcgtaatgtattctgtttatcatgagatgaactttctctcttcatcctgctggtctcatcaatcggtagttatttactcgtgtcttgccattgtctacaggctggtaagtttgagtatttttttaactgtatatctcgaggtgagtcgtctaaatgcattattaatgcataatttgagctagttcatattctagctatattatacgtgccagtaccatattgctactcgaaatatgagtataacaattgtcccctaaaatgtacttttttttttaaaaaaaatgactttttaattaccttaagggttcgatcatatttttaccattcaaaaaactgcacgctttatttttggcaattcaagacttcgaggtatatcattttaacatttattactttgatctttctctttccaatagcttccatccgttcgatctatcatcattgtgatcgaacggttatcaccttttgggtataaaattcaaaatccctttaattttgccattatcacccacgaaacttttagaactcgaaaaaatctcagccatcttttttctgaaattaatgccctcactgtcgcttacttatattcttcaaatttcaaccaattgcgtttctcaaccccaaaatcgccaaggtctagacccctcgaaccatgagctctcatcaagaagttcttcgagacccaaatttttccgttgaaccagtaagtggtttttccttaattaatttctttatcattccattttgaattccttacatatgctcttgttattttgcatcatttgttgttggagtgggttttatatgaattttttaggaatctagggctagaaattttaaggttatgtgattcgtagatttgggtttgtgctctatttttccaagaattggggctttatactttgtgactatcatgtcccaatttaacttagaattttcattcccagaattttagaattagactatcttcaatttcaggccatagcttttaaacctcaaatttgtaaacctcagtcaatactcaaaatcaatggcaaaaaaattaggaagcacctccttaggaccaatcaggaagaggtttctaactacatatgtggtttgatttgaaaaaaattacaacccgtactacccacaccgcaaacacttctagttacctagaacatatagtctatacctaactctatcacacatggcggaaatgccccaaggtcaggtgagatgatagtatgatgtagcactaatgtgaaaataattattttttttagaacaaccataaaacaataatttgtaatttttgtaaaaaaaaaaaaaattaataattcataaaaaagattataatactatagaatgttattttgtaaactttgtcatttttaggaatctatggataattccttattttccagtattaatataattttgaattctttatcccagaattgcatgagttggatttggaccaaattatatggactatggaatcgtgttgggctttttattgacaatgatgaaagcccatagacatttgaaaggcacataaaaaaggattcaacccttctttttctttttattttatttttatgacttttgaaaataaattctcgacatcaagtcgagtataaatttagattaaatttttaagaattcaaaatattatctagtataaatttagacataatcatatgtgtcttaaattctaa

SEQ ID NO: 193634 - DNA, 2508 bp, Cannabis indica
accaaacgctggtaaatatatactcaattcaatactaattgattttatatctaaaaacttaacacaatttgttaagtatataaagaatatgatcaatttataagtacacccacataattgttaaagagtaaaaaaaaagggtcaaaagtaattaataagtaatattaatctttgaatttctttgttagtttttatttggatttgtttatttatttaatgggttaggttggtaagttaaaacaaacccatctaagtgatcatttgtgtttttgcttaaaacccacaatttggcatctttcctctattttttgtgttttgattttatttaataaggttattaaatcacaatcatttgggtggattttggataatactttctttttgggtcatttcaaagaacttctttttccttttgttgagaaaaaaggaaaaaaaaacaagtgaggagatagtgtgtcattctcaaatttatattatatatatccatcaagaaaagtaaattataattagataaacaatttaataataattattattataatccattcaattgtcaacattttctagtttgtgcaattatggtatttgtgattggaataaatatgattaagactattgagattttgatattgtatgaaaagacaatgtgtgaagttatattaatttgttcccacaaactttttattttttaatttttccaccaaagtataaaaagacaatttggtgaagaagaagaagatataataatattagtaattaatgtttataattgtttgaatgaattgtgtgtttataatggatgtcctcaatgttgaggaaaataagtccatttttttattaaaataataaataaattaaaaaaaaaaaaagaacatagtatatgtaaccaataagagcaccgactagatagattctattctcatacctccaaaaataaatatataaataaaaagattattaaagtgacaaaaatcatgttcttattacttgcacgtttaatataattataataactattattttgaaaaatacatgtatatgtatttagtataaataaataaattaatagcaataagaacatactaaattataagtatatataatgtagcatatataacaaatagcaataagaacaaaatttcttcctattaattaatattatgctatagaagatttccaaacattatcatatataacacaattttactactactattattattgaaaaaaagacaatttgatgtgcatttaaaaggctgaattggcaaagctttgaataaatttgaaagtataaataaataattacatatggttttactattatactcatgttagctaaaatttgaccaaaaagaaaataattgtattttttttctggaaggactaaacctattgttagaccattaaaaatattttattgtcgcgttttaaatataataaaatgcatccaagatttttttcctttaaaaaaaaaacaatatttgattaagattgataattttgatagtaaatattaaaaaattttacacaaaatgactattttgactaattttttaacatttatattgtcttcttttaaacatttttactttttgaagtcttctttggtgtttttttaaagtttataaattacatatatacgatatactcacaaattttcactcaaaatatctaacactactactaatccgaactaagcatcactaatctatttcttttcttcttcttttgctaagacaaaattatttaaaaatttcttcaaaatcgtatccacatatatataaaaatccatttaaagaaaccgaatgaagcttcaaaacacccttttgtcttgagagcatacttttgtcctagatttcttcatctaacaacagcagcaattatgatccactacatagaattcaaagttgctcaatgtgttccgagtaaagttttgactgctcagaattcagagttgctcaagcctgtgttggaagaattaataagtgaagcatgctctgttctaaatgcacccagacaagagctcgggactggatgatgtgaatccagcttttttcaaaaaatattgggagatagttagtcatgatatggtgagaatgtttcgaattttttttaattgtgatgttttcttggagggcattaattgaaactaatgtgattttcattcccaagaagaatccttctgtaatgggggatttgcagcctatttctttgtgtaatgtgttggtcaaagtgattattaagatgattgctaataagataaaatagttgttggatgttgttatatttgatactcaaagtgcgtttatttaagatcgtctaatcttcgacaatataatagtctcatttgaagccatccactttttgaaaagaaaaaggagagatcaggagagtaatatgattcttaagttagatatgagtaagacgtatgacagggtggaatgagattatctttgtgcacttttgctttaaatagaattcacgaagattgagttgatttgattctta

SEQ ID NO: 193635 - DNA, 1149 bp, Cannabis indica
aagatattagctatcctgatttgaagaggatcttgtacagctatcctgatttgaagaggatcttgtgctgattgctgatacatgcattgtcgattcacgaccgattcttattactatgtcaaaaaaataaaaataaaaaatgagtttaaagcatttgatatatgttttaaatttagtttttttaaatatttttgaaattttttattttaaaaatgtgatttgagtgctcaaaatattaaactcttacaaataatcttaatcttaattaaataaataattaatatttgtttttttaaaataaataattaatatttgtttgtccaaaaaagtaaaataaaaaatagaagttatattccatagcatgagattgaccatcataataaatccgtacgagtgattcgggtagaaaagggggggagttcatcttcatcagatgctttcggatctgatctgaggaagaagctccataccccttttcggatctgagtaagttcctttctttcatctctatctttttctttctcttcctcttaattactttgattaaacattttctcctcaaatcgtagcgaaatatttctgactttactgtcttttgtcgatttagaggttttcgatttgaattcttatggctttcgatatttgacatcttctgtgcttttctgaaatatgatttggctattgcaattgatttaaatgagacttgttgaaattttatgggaattagtgattttgctcgaattccataattagtttgggaaaattctacgatgcatcgatgcatttatttgttttggtatcggaaatcattttttagtcaattcttttctatgaagttttaagtatttaagatatagtgtaaagttgtaagaaaattgaaaaattttaacattacaaactcttttttatattgtaaattattttgaattttttaaaattttgtaaaatattttaaataattataatatacaccaatataaaaaaattaaactaaaaaattattttgaatgcggaaacactgcatcattgcatcccttataagttttatgggggtgcattgtacccattagtttattgaatcactgacaatatgtatgttttagtgtaccattaattaatttgatggttgtaattggtttatacttttat

SEQ ID NO: 193636 - DNA, 4799 bp, Cannabis indica
ttattcaagagttatcaactctcttgatatgcaacacaaacggtttcaacactggttcatgaaaaactggaagaacactgaaagccaatgcgttaagcaggaacatcggagagctaaactgtctcaatagattagagaagcttatcactctaatcgcagaattacttctcgaaaaggtttttcgagtttgtgagagagacaccccatcaaccaactagtcacgtgggaactagtgtccaaggagaaacccttaatgctcaaaacaccactgctacatccggtaaccgagcaggcactaggaaaacaccaggcgtggagacctcctggagggaaggtacctttgatcgagagctcgagaggattcaagctcgagggtgccaaccaatgggccctccgcctaatgttgaacgacctcgtaacaacaagagaaccaacaagactcctccaccaagttctcctcaacgttctcaagaaactaggccccgagaccctgtaagggaaaaaagacctgctaggaagtagtaggagatgctacttcaaaacaaatggctacaaaatccagcgggtaaggaccaatgagccacttcatacttgtaagtactttcgagatgaaatgggtgaattgtgatgttactttccccgtggccctgatggccaacaatatgagtgcttccatcgagttcacagagaggaattgaacctgagcaaccaattcaattctctccacacttgtgatcccgctgaagattactttgagggaagtagccattacaatgctcctaatgaacactcctgtagtggatcgtctcgaggcgatctagagttcattctagaggcctcactagaatttccttcacgaccccgtggtcaggagacaactataagattcaggtcgaccagagtacaagaacgacttgaaagatcaagagacatgtgtgacctcttgaataagagaagaacagtggacgtgggaacttctagagaagaccatgtccaggtaacaaaagctctatctgggacgcaaatcaccactcatggggtcaatcaggcagaattcgacaccttagctactttagtgaaagggatcagacacctaagttgtccaaattcgagctcggcagagaacgacgctcaccattctctgaaagaatcaaagctcttcccattcctatgaaattcaagaacccttcttgacatcaatacaccgggaaggaagatccattgtctcacatccactacttcaaagtacagaccgatctgcaaggtgtgagagacaacgtcaggtgcataatcttccctgcaatgctaataggcctagctcaatggtggtaccttaagctctcccttggatcaatcgactcatagaaagatctagtggatgcttttggcaactcgtttgctccttcctaacaatgtcaaatccagcccaatgatttggtggacgtcaagcaacaggaagacgagccccttaaagactacatccagcagttcttagaggaaactctaagataaaaagtcttagcaaggatgtaagggttatggcactcacaactgggctcaaggagatgagtcgtctgtggtctgaccttcgtctcaaggcggtatacaccatgaacgaattcttagataaagcagatggcttatcaaacttgaagaagctgtcacccgagcaaagggctcaaagggtggcaagaagaagtcaccaggcactgaagcccctgctactaagacaacggtggcaaggaaggcaactcccttggtggaaagaagcctaagactaggagcaagcccttaagagattaagagcctcgtttcaccatttactccattctcttgctccaagagaggagtttcatacgaccactcaatcaattgtgttgtatcacaaacctcttacagatgccccatctctcaagaagctagtcataatttagtttagggagtcatcatctagctcctgaagctgctgatcaacatttggcaatcacttgccaaggtagttttggacaacttttttttttcctcctcacccttgctggagcaatctacccggctataattctggctaccttgccatgtaccttgaggggaggaggaagagttgtcttgggcgaagaatcacgaataacatgttgattagccggaagtgggcttgaaagaggaggaagcaaacaattctgggtcacatttgaggcagccattgtctgagaaaccttggactgagaatgcccgccagagaggctggtcgatggtcgcctctttaaaccttatattttggagaccatgtctacaaaagaaaaacaatgaggtcagcatacaaataataaatataaaatgcaagcaaaggtaaaaaaaattactattgtcaatctccacggggtgatccacccaaggagtatcacctaaaggcccctcatccttagaagaagactcactagagctgtcctcaatcatgatagccttgcccttgcctttgtatgtctgcacaggctaggcaggccttgtaggcccctgtctctcaggcctgatcaaaaatgaggtgtcaccaacaacacccccacagacaagatgccatcgaagagcgcggtccctcctactccctgtctgggccaccttggccaaagaggcctcctcaacagacttgcttttttcattctcaacagcaggtctcttccctttagttttctccttcccaacaagagcattgctagggtcttcaggagggttatatggagaagcaacaccctcaacaagagggtacaaaccatacttcctgaagttctccaaacatgctagtgtacagatgttgcatcgagtttctgggagagacagaatatggttggacctatcccttactctcaatgtgggaagtggtcaacaataagttagaactcgatgaaaaaactgacgaacacctattatgttgtatgtcataaaataacttctggcgtagcctccaacttttgacatggctgcatcattagtgttgtcaagccactgataaccctacatgctaaagtagaagtactcagtcatgttctagcctagattggatttcagctcaaagtaataactctcctcgaaaggtgaaggttacagccaacctatctcaacatagaggacaagaagtgctgataggtacttgatactcttaggtgcaatctaagttggacacatcttgaagaagttagctatgtctctaaaatacggatgcaaaggaagcctcgcaccttgctttgcatgggggctagaccacgctatccaatttggttacagatggtgagccaagtggtgtcaagtagacctaatgcatcgaacctgaccaacgattccactatcgatgatgtcatcaagattggcaaccgatagtgtggaacagggagatacccatctatctgcttcccccatctgaagaatccatggctcagcagcctcatcctcaatatgatcaaacctaatctctaagggttggacccctactattcagaggcactccagcctcaccataagagcccaaggggttgccttggatcacataacactccttagggcgcctctgagtagccataggctctacttcaggctcagtctgattaacttctagctcttcatcctcttgaccggccataggctcctcaacctggtcggcctcaggctgttgaacctcctcaatacgacgaactctcccccttgccatgagtttggcaatgtggggatcagtcagaggtgctttgagataagtttgctttatcctctctaggttggaatgttgcttagagtactggacaacattcacaacaaccactgttgtaggaagatttctaggtgaagaagatacttgacccacaggcaaggtgtcacacacaccctatcaaacaacgtaagtccaagacttaggtaggaattatctccagccttgattcagttcccagatgaatctctcgtagatctaaccacctatttgctcagaatagtggtgatgttgaactttaagttctgaagaaccactactcactttgaagtcactcaaagagctgcctgacaagctcttagaggaagaactagctgagtgatagtcttcgtacaaaagatagaataggtctttgtcgatccagatgtcacctccctaatagtcgcctaggtttatctgtatagaaagacaaagggaggtgaacaaccagagatcataaataagacaaggataaaaatatgggctaacatgccaatacatgtgggtactaaccgactagcccatgaagtgtcaagccatgaaccgactagctcatggttatttcaccatgaaccagccaacttctagaaatttcaccaagaatcggccagatcatggtcagtccaccatgaactagccagcatagatttatccccaaaagagccagacatagttcctggaaaggaactaatgtaccgaccaagggacttaagatgggaccaagaactggccagggtctctaacagacctaaagtaccgaccagaccccttaatgaattaaaaattatattttctaaaatccaagctatgttcttcgtgttcttcaaaccccgaagatcaaagtgtcaaaataaagctcaaaagtcgatctttttcatcaataagttatacattatgcatcctaaagctatttaacagattataatgcataaaaaccatcctaagacatgacattcaagaagttcataaaagcttgaaaatcaacaacagtggaagcttaaagaacaaaaaacaagagggaaagctttgaacttacccactgagaagacgtaaggaggtttgagctagt

SEQ ID NO: 193637 - DNA, 1006 bp, Cannabis indica
ggctctaactacatatcatacgtggcataatatatggttagtatatattctatagctaattgtattggcatgatgaagaatgttatatagcgtaaaaatccctaccaataaatttttttcaatctcgtacttcattgatcagtctactcaatttccaccattcataaattctttcctgaattggagcaatttattatagtccaattcgaagcttaatataagaaattcagacgtgaagttttgagtatatatgtattgtttttttttttacttatagaataagaaggaaatgaaatgtacaggtcaggtcagctatttataagatgagaaaagaaggaattcggttaattaggaggacttatcctcattggtccacgtgtcgtaatatcagtatagctcttttttctgagctagatttatttcatgaggactaataattcagtttatctttcgcacccatttaagttctttttaaaattaagtgactaatttctgtaatcaatctttatctaaaaatgaaatataattacatatgtccatcaattacagaaaaaaaaaaaaacaataaaaataatttattttatacacgggcaaaaatgccttcagattttaaatggatatataaaataagtatttgaattcagaatatgagctaatgatgatgagtaatgtacaactctacatgtatccatgaatgatgataattgcttccaggtgatcctatacttagctctattactcaagtttctttacttttactatagctagctagctcactctatatagtactccttccctatagatacaagtcaaaatgtcaaataactaataaggacattttagtaaattcccaaagtatataataaactaatattagctaccatatttcccaataataaagttccttagctagcaagaaataatgacatgatacataaagttgtaattgtatatcatgatcatgacaaaaacctaaaaacacacaccgaataaactaaaaaaaagc

SEQ ID NO: 193638 - DNA, 1062 bp, Cannabis indica
ccaatggcacttttcaaattttcgttttattttatatggtatatatatatatctatatctatacatctatctatatataaatcgagctaatgtcacatgcactaagaatccattattttatgttaccttttctctcaatctctctttttatttttcacgttgtcaatttttttttaataatgcacaagcaacttcaaaccatacttatatttttaattagctatattacttaatgaaatcacaaaataagagaaattattaaacatttctttatgaaaaaaaattagtattattcattatttttgttatctttataattacagtcattacaaaaaatgtcacttttaccagcacagttcgctactgcgctggtaaaagtaacttttaccagcgcatttcgtaaactgcactgacaaagaggtcaaagttttacggccagcgtacatttgcacttgctaaaatctaacttttaccagcgcatttacgcgctgggaaaagtcatctttgctagtgcttttcattttatgctggcaaaagttctaataccaacattgatttgccaaccccttttgccaacacatcacaagtaaattctattttaccaacgcaatactaacttttgccaacacaaaaatgtgctggcaaaagtgacatttcttgtagtgagtttaaggtacaaatgtcacatccacctaattagtcaaaattaatccttttatctaaacatttcatatagtaaaattccatcactaatattttttatataaatccttcgatttcactcttcaaagataaatatataatattaagcaactctttttacaactaacctcctacaatcacctatgtggagaagaaattccaataccataaaataaaatatcaaaaatttcataaatagctgttaaattatttttgtaattgtttattattcttttttcgaaatttgttgagttgttctctttttttttttctatttaattttaaaaacacatgcaattttatgttgattccatccttttctgtatttgtcaaaaattaacaatatctatctacatattt

SEQ ID NO: 193639 - DNA, 815 bp, Cannabis indica
gtgggatagaaacacaagacccagtccccagccccaatagtagccacggacctagaccccgaccccgactgggattgtagccacaggcttcgaccctgacctcaaaccccttccctggacctaaaccttgaccttaacctaggactcagaccctaatctcaaactccaatcctagaccctggactccaattttaaccccaagcaaagtcgaaatcctgaccccaatttgactacgaccttagtcttgtcgctaactatatgtatggactcaggacccggacccaaacctatacctgaaccggaaccccaatcttgacctcaaccttgacccgagaccccaaccttttgatctcagaccatcaccctaaatcgggactagaacccctaaccacaaccttaactcgaacaatgacctagatcctaactttaaatttataataataatctaaattcataaatattgcaatacaaactaatataaatcatttattatgtatcgatcaataataaaattcttattataaaaatgtgtgattgtaataactaaagtcatgagtcgtcaattgtcattgtacagcaagcaatatgattataaaaacaattattagcagcaatgagggtcgattctgggtaacatcaaatttttaatatttataatatttgagtttcatattgaatgattatttgggtcttatattttaaatgttggtctctttgagtgggcctctaggatgggacatagccacccaataatctagtccggcccaaacgacatcagctcacttcgctataggtaagatgtaatatgggaatat

SEQ ID NO: 193640 - DNA, 1416 bp, Cannabis indica
tacatatatatcttggcattttctagatatcaaaattcaatcactgcctcctccaccataaccctcaccatagccacctccttcgccggaggcatcaccggttccagagccaccaccgcgaccagaaccttgaccaccaccacctccagcagaaccacgaccactcccttgagccgacccgtgtccttcgcttctacctgatccaggcccggccctagacccagcatgcgacccagctctagagccagcctcagagcccgaacccgacccggatcttgacccggcatatgacccagcatatgagcccgcttcagagcctgcatccccaccacctgatgagcttgaactagacccagatgacgaataggagtttgaaccggaacccgacccagacccggatccagcacccgctcctgaaccgcttcctccacccaagcctaacccgatacctgctccgatcccaactccaacaccgcctagatccagacccagatccttccttgcaacccggctttcggattcatcaacaaccaataacattccaactagtagaactagaagaggaagtgacttaaataaagccattttgaaaatgaaaatgtcacaagtattagtgtaataaggttccaaaagcttagagagtatatagaaagaaagaagaaagacctaaatttgtattgtatgatatgattgagttgttatagaatatttgaacaatctcatcacctatttatagctgttattggtggaggaatgataaatatgctgtgcatgtcacataatataatataattttttttgttatgtccaaaaatttgtggctgagaaataagggagtgagggagtagtaattaaagttgtgtgaatgaagatttggatatggtttggagaagtagctaagagtgtttaggatgttgccaacccatttgatgtccactactactgatcagagtagtggagactttgagtggtatacacattattattttacagttttcgttgaccaccttctctgcatctctatatgtatatgtgtctgtcttttattatatgtatttattatataaaggtgatacgtagaattatgggacagatatataggtctttgctgtgtaattttataatttttgtaaatagtttataagaagtaacctggaattaacctataattttaaatttgatcgtgtgttttgatttttgactgaatttttgcatgaagtaataacttgatttatttcaaagctaaattgatagttgaattagtattcgtttttgtttcaggaagtaatctgtaattttgaattttgtggattgagttttaactgattttgtgtataaagagctgtttttattgagaaattgtaaccccataaatgattttagtctttatttctgattcatcaagtaacttggcat

SEQ ID NO: 193641 - DNA, 1269 bp, Cannabis indica
aatatggggtttacttcaacagtaagtaccgaaacaacattttcaccctgccgtttatcgaatgaaatcaaatgaaaagtaaataattaaaactttacccatgaattataatgatgtgcttatattatttaatatcaaatatattattatgataaattaacattaatatttacatattaatagttaggtttgattaactctttaagaaatacttttatttcgaatttaactaaaagtggaaaagtattgtttagtaataattaggtctaataattcgtgacacgatatgataatatcgcatgtaagtatgttaggtaaaggatcctcttcgagacaggacaaatctcttaaaacatactctttaagtcagtgtcactccaattaaactaaagttctattttctcaatcccagtcatttacaccctttataaattactaataaacccctatactatttcatagtgtaacaaagtaactcaaaattgacaaaattctttcttcacaccatatcactatattttagccagtgttttattaccattattcatgtaatgaacattaagtaaaataatatgacaccaatgatttcattttaatttgatttaaatataaccaagacacttaaaaaattctcttattagcaattattcaaattattggctaattaccttattttttatttttttggttaattgccttattttgatagatagtgaaaggactaaaagtatcacagtcatcaccaagtaaaaagtgagaaaaaccatgtcaccaaaatggatcatgcatcactgaaatttggcatatatatataaaaaataattacaatactatatagagtgaaatatatatatataagtataaaaaataagagttgatattataaaaggtcatttgaggtgtacaagaagagtagatttagcaagacacgtaggcaagacgttgaaagttcttaaaggagcataaaagcaattttcacatttagaaaaaaaaaccataaaaaactcaacttggtagaatatttttaattaaaatgtactaaaaagttttatctttgaagattattttattagttatgatgtgctaaatatgtaaggatatggattaagtttggcaaaagagagaaactcaaagaataaacaagagtattataatttaggataaatctgtcgtgcattctcttaaatagtagatgtttcggtagatttttatttatttcagcatctagcagagttttttcgtctaatattttttatgatcacatatgtt

SEQ ID NO: 193642 - DNA, 843 bp, Cannabis indica
ataaaaccttgtttaagtttaaccaaaaaataaaaattaaggatcaattgaaaagattgtattatagtattaatcaaacaaaaacttaaatcatgaatttgagatattatatttttttggtcacaaatttgagacaatggtaaaagcatcaaatagtatctatcaatactaggagtcataacataaatataataaaatgaagtattggatcctacatatattaaatctaataattgttaatacttataaacattctttgtaaatgattaacaatttttttttataataaatattaatagctaattatattttaagagtataacttcataataacactaatatccttttagcattttgcaccatatctacaaattaattagttataattattaatatgtaaagatcaaggagatctgatgtgcgtaaaccagaaggtgagaaatgaaataagagaagagttggtaagaaaaaagccatcatccatttctttcttaaggcttaaaagtcaagacttattattggttccaaaactgacctactaaatctaatcccaacgacttgttttataattttaaagagaattgttaaaagaattggtatctagcacccttttcgatgtcatatcgtcgctattagtgtaattgagtatcgagtctcatataacttaaaaaaataagaactgagatgtaaaatgatcctaaatttagaaactaagttagcctacaaaaattaataggcctaaattgagccaccgttgtaggattcttgacttttagaataaaagtcaactaggtattattgatgccagaagggtccccgaccttgttaagaatatcaagaact

SEQ ID NO: 193643 - DNA, 2811 bp, Cannabis indica
tatgataaataataagtttataataaataaaataacaatataaaaatattttcaaagttaaaacataacataataataagtaatgtttcatagttgtattcttttaaggtaattcaatcattgtgtaagtaagatattttaggtaattaactggactccaaaaaacagtctcaaaacagtctcactgattaccatctacagtaatttagattattacagttcagatttaaattgttgtttgccggttctaataaaaaacaattaatgatttcaataagtaatttttttttttttttgtaaaagtaatttcaataagaatttgattagaaatactcactatttaactattaaccaagcattaagaaaataagttgcattcttccaccaagtccaaattataaaggcaaaagtaatttccattaaacttgcgaccgcatagacattacataacccatcactgtagtttttcaactacatctttaaaacacaaagttttgacctataaaggtaaaaagaaaagaaaaaaaacaatagaagattttttcatcctcaacaatgagatcttactacaaatgaggaaaacaaggtgatggtaaatttggagtcatcaaacgcatatctataagctagcatattgccttgaacagataagcatagagtgagaaggggagggtcttagaggagatcacactactgaaaacttttcctccatcttcaaattgtgaaaaacagaaatttcatttagtcttgtgcctttgcaatctgaatatgggctttcccatcatgtttcatcttcatggaagttctaacatagtcaccatatttgatcttcttgtacaagggaagggacccttttgtgtctatcaaatgactgagaggtccaatttccacctcatctagtggaacaaaaaatgttgcataagataatcttgtcttggactcatttgtcacagctctatgctctacactcttgtacttgccattactcagtatctgtcatttgaagcaacaaaatgtttgaacttaaaaaaagaaaagattgctcaatcatcaaaagcttaacaaaactaactatataacattaccaggtacctcagtaacatctccaacattaacaatcaaagcgtttggaatagccttgaccggcacccatcctccttgatggcgaatctgtaacccggtcacatcaccatcttgcatgagtattgttatggtgcttgtatcagagtgtggacttattcctagcaccttttctggtgtttggcatggaggatagtagttcactcgcatagcttggacaagttctttatgcaaccctataagagaatctttctccattcccatgatcaaagatagtgagcctagtagctccattgctactcttttgagttctgtggaataagcctccatagaatccctatgttgatgcaacattttaattaaacaaacaacaaagctagagaattttgcataaaattgtgagaatcgaaactataacatacttgaatctctgtggttttgctggccaaatgtcaagattcctaaaccaggaagggtagacaagcattatcaatgtgtctgaccaatctaatatctgatcttcagatactacgtatgcatgtccatagccttgtatgtcatttggaggcatcgaaatcttgttcttctcttctaagggcagttcaaaaaactcagctgaagcatctttcagaccctgcaatactttgctttcaactccatgattcaccacctgaaaataatatattcaatttgtttatttcagtttgaggtatctaccattataagaatgtttttaactttatatcaagcctaaaagagaagtatcccaactagcttttgtctgtacccaagtctatataaatatacttttaagtaatatgacatgtattacctggaaaaatccccattctctacaagccaaatcaagtttcaataactcctccttgtccccattggagagcaatgatagatcaattacaggaacttgagatgaaagatgagataaatctggtctagcatgcatttctttttcatttcttaaatatctttcagggaccttaagagggtccttcaataccatttcttgtacatttggtacttgtagagatggtggataagttggtttattatcacccataattactttcttttcctaaactttgatgtaatcaatattcaggaatgaatttatacatgacgacttttagtaattatttcgctacttggccttgttttgtagcaaaagtatattttgattacataacttgagagattcttttagatagaacggcttagtatctagatgggacgccagcacaagacactatattgaactttgtttattactcatctaagagaaattttgtttatgtaacatgttttgtattaaggctagaagttcttagtaggattttctgtacaaacactactactacttgaaaacaaaatactgtatatttatatgtgagattgagcaattaaaactagtttcacctttagatttttcttttttttgctaagtgattggtttatttcacctttggattttattttgaaaaatgattagtttatttagacagaaaagtagagactctttgacttcataacttaaaaattttaaaaacagtttgttaaaaattgagttttaaaaaattagaaaacaaaaaaatatcaaaatgttgttttcaattttaaaaaataatttttttgtctaacatattatatcacatactcggatcctagactcggaaccaaacccgaacacggacctaaacccgaataggttcatgt

SEQ ID NO: 193644 - DNA, 1830 bp, Cannabis indica
tagatgtcctattcaaggaatctcctaagaagcacgttaattttatgatgtggtatggtctttactatatatatatatatttaattataactgtatttttgagttattgtgtattatttattttatttgttttgttgtggaatcaaaactgtttaatatgatatgtcttagtattttggaactactctccttttgtttgtatattgtattttttattaattttaaccggttcatattttatattattttttttcggcgagcatatttgaaaattgactcaaactatgagttgctagaaagttacaaaaattgtgttgtattttatttatgttgtttcatagttgatttttgatttagtcatttcaaaaaagagttcttacgttatttattttagaaaccggtcttgatttaattaattcattaaattaggtttcaatttagttatttcagaaatcgagtttgattgagttaattcaagaaatcggtttttgattatttattttatgtaactggtttttgtttgttaatttttattttggttgctttacggaatcaatttttttatctcaaatttttaactagttgataaatattatcggtttctttatctcatattctaatgtccaaatccaatatctaactctggtgacgacgaaaattctggcggatttttctacgaaatgacaattctgataatttttctagcgacaatgataattccagtaacttcttcgatgatgaatgcttctacgacaacttttttagtgaagatgtctgcttcagtgatttttttcgataatatttatttataatttttttgtttagttttctatattttaaattttatttgttttttagtctcacacccttttgtattattttttatgttatataaaagtaaattttaatattttttcttatatttatgaaaattcccaatttattttcttaaccttacctatgttgtggtccaatactatttcggacttttggacggcgcgtgccttcaaaatgaccattatttttgggcttagcccaatgttggccgctacaaaaacatttctctttttacatttattttacacacacgtgtatagaattagaaatatgtattaaaatccgaaaaaagagaaggaagttatgctctttttccatcaagtgggtgtttttgtagagttttggaatagagtccaatccaatcatttatatttattatgtaaaggcctaactttatcttattcttatgggtttcaagaatttccttgggtgggtcatcgtactctaatttaacacaagaccccaaatcacatgttccacataatcacattcacatcgtgtttactttacacctcttgtaatattatataatatatatttttattaagcttttcaacaaataattcatgcagccataattatttttattaaggaccattatggctagattaatataattttcaaacccttacagccatatatttttgtcctttgcttttcttttcttataagaaaaaaaaggtttgcaatcacttttcctccgccgcgtagagtagactttagtcaaaaccgagacgagatcacacattatccaactaatcacattcacacacatatctctcttttcatttctgaacccaaaattgtttgattaaaaaaataatatcaactcttcacatttttatattttcagtactccctgtagtaatccatacaaaaattacaaatattatggtgcatcattattaataatttaaatataacgacgctaaaatattacaatctatacccttaaattaatattacaaaatattatattttttttatttagtt

SEQ ID NO: 193645 - DNA, 1939 bp, Cannabis indica
aactttagagattgaccaagatactctaagtgacacatctattgtggccactcttgtaaagtcaatggttgtgttgtggtgcatggactgattttgtgcaaacagattgagtatcacaagatggtgtgtactatttagaatgggatagcttgagaatatgtaaggtacccattcccatactaaactagccttatctttggctacctctaaagtgtggtggcctcacatttcttttcctatttagccttaatcaagtttcttttcacttacaaaatacttagaattaagaaaatccactttagtttgcctattgactatacatgtaatataccttttcccttattttcaataaaaaaaaagtcttttttttcatttgaaaaatatatattttttgtttgtgatatcacgtgttggctaaaaagacttaattgcaaaaatttgcaaagggaataagaaattaaagaagtatcactagctagttaaagaaattaaatttattaagacaacataagaaagaaatttgaaacaattttatggtgaaatttcgtcctaaaaattaatataataaaacttccattcatccatctctccaactagtcaacatctataaatatattaatttatttcttctctctttttcaagtaggactagtttacaaacttttcttctaatgccaagaaaaatttcaaaagaaacatccttaacaatcattttatttgactttttagtcatgcgtgatggtaatagtatctcaccctctaaaataggccttttcatattttatttattatttattagtggatacaaaaacatggtgttttgagaaatgttgagttctaaggccattttatattgtcaaggactttaagatgtaactgtattgttattagtgtattttaatattagttaaagggtgatttctttagctagttctagtaatttttagtggagttctggttgcgtagttcttattatttggtagattttgatcaatttgataattttttaataaaagttttattctgattttctgctattttttcaagtgtatttcaatgagataggagtgttgtttgaagatgttataatttcattatctaaattttcaagagtagttttgttctatgtggctcgctctgagaatttagcgactcatagtttggcaaagcatgctctgcagttagacgatgagctatcttggttcgaggaggttccagcaccggtgacagacgtctgcgtcgtaaattcatgaataattctaatcattttgttaaaaaaaaaatattatcacatatattttaattaataaataatataaaaaagtattaactaattataaagtactacactaatgtaatattaaattctttctaacattgttagaccaaaggctagatgaagaaaaaagaagaagagttgtgtgagagtccctcacaaagctacataagtatatataaggagctttgactagtttgcctctcccccaaatgtatatataataaggtcgttcatcttgagtatcctgaccactcgatccacgtgtcggatgcaggttggtcggcaagtttgactgcaaacatgccaaccaacccgcattcacctcgtggattgtggtggtcaggatactcgggatggatagcaaatatataaatatatttaaaatttgaagttttacttttgtaatttctttttattttttaaatttatttaatgacctactcaattatttcttttgcactttggtccttgtcgcaaaaattattttgcctcagtccctacttagccgttgtgcgtgagttattagagtaagaccactcatgaaaatgattgtttggatcttgagatgagatcctttgatgtaatctgtactctgcttattattttgcccatttaggttgtttctttcctcttgtagatgtatttctaagcaaaaaaaaa

SEQ ID NO: 193646 - DNA, 3435 bp, Cannabis indica
gtttccgttgaaatttttttttggtcgtttccactaaaaaaaatgtgtactgcacaagattagaatttatatgagaaacgttaaaagacataggttaatttaatattatgttttccatattttaattaaatagcataaaaaacctaactatggtatataaaaatatcaatatgattatcgataattgtttgtatctgtttattttgtgaaattggtaggcagttaagctattggatatataatcattaattggtgaatatatttcaaagaaagaaatacgcagtaattggtgaatatattataatttattaaatgtaaaaagagtgacatcatggaaaacggacgctagaagacaagcatggcggcacacagcgcatatagttaggaatagtgccaccaccatatacgtgccctgcaaatgcagctcccgcaagacaagtttcagtaatctttttctctatctcaagataacaatgaaaaatatttattgctaagataaaatcaaaaatgtgaaaaaccaagttggaattttcttgggttttgtttctttcttatccaaaagggcatcatgtctcttatttttaccaaattaattcttcacacaaaaagattctgataatccctttttcttccttcgatgttgttataaattgagggagttggaagagcttttctattcacttctcataactgtttttacagatatcaaaactgctttcgtaaccaaatacaagttctagccatggctgcatctttctcagtgccttcaatggtgagctttctgagcatatgaatagctattcttttcgttgttcctctcagctaattattgtctttgctctttctagctgaaaaagcaactaaagtttgagttgtcaatctatgagaaatgatcatatttgtatatgcaacttgcaagcatttcttctcaatggtttttcttctatagtttttgagttatacataaaaatttataataaacccattattctttccttttttattttctccatatttgtgtccaggattatgaagacgtgtgagaagtatactgtttaattagtagtttataatatgtgttgcacatgcaagcttaagggtaacaataaattgatatcttattacatgacttaaaaaagtaagatcggtcttttaagttttaatactatagttagattatatcattatttatccctttctacttcattgataatcttgaaccaaacagttatggggtaacaatctgtttgattcttcccttaaaagcagatgaagctaaacttatatgaagtgtttttgagattttataaataatggctacttttatgtatacttctaatattatattaatgggatttttttttaacagataatggaggaagaaggaaggtttgaagcagaggttgcagaggtgcaagcctggtggagctcagagaggttccagctaacccgaagaccatactcggcaaaagacgtggtagccctacgtggtaacctaaaacagagctatggctcgaatgagttggccaaaaagctttggcaaactctcaagactcaccaagccaacggcacggcctcaagaacctttggcgctctagaccccgtccaagtcaccatgatggccaagcacttggacactatctatgtctctggatggcagtgctcttcaacacacacctccaccaacgagcctggtcctgatcttgctgactacccatacgacaccgttccaaacaaggtcgaacacctcttcttcgcccaacagtaccacgacagaaaacaaagggaggcccgtatgagcatgtctagggaggaacgttctcgaaccccatacatcgattacctcaagccaatcatagccgatggagacagtgggtttggtggtaccactgccactgtcaagctatgcaagctcttcgttgagcgaggtgctgcaggtgttcacattgaggaccagtcctctgttaccaagaaatgtggtcacatggctgggaaagtgctcgtttctgtgagtgaacatattaataggcttgtagctgcgaggcttcaatttgacgtaatgggggtggagactgttttagtggctcgaacagatgcggtgggtgcgactctgatccaaaccaatgtggacaacagggaccaccaattcattctcggtgtcacgaatccgcaactgaagggtaaaggtttagctaccgttttggcggaagccatggcttcaagaaagacaggaccggaacttcaagccattgaggacaattggaccaagatggctggattgaagactttctctgaacacgtgatggactcaatcaagaacgcaaatttcaatgaaaatgagaagtcatggaagctaaacgagtggatgaagcattcaagctacgagaaatgtctgtcaaacgaccaagcccttgaagttgccgatcaattggggctcaaaaaccttttctgggactgggatttgccacgaactagagaagggttctacaggtttaaagggtcggtgtctgcggcagtggtccgaggttgggctttcgctcctcacgctgacttgatttggatggaaacggcgagcccagacatggtggagtgcactgaattcgcaaaaggagtaaaatcaatgcagcctgagataatgttggcatacaatctatcgccgtcgttcaactgggacgcgtcgggaatgaatgatgttcaaatgaaggagttcattccgagaatagcgaggctgggatacgtgtggcagttcattacgctggcaggtttccacgcagatgcactagtgatcgacacgttcgccaaggattacgccactcgtggtatgctggcctacgtggagaggatccagagagaggagaggaagcatggagtcgatactctagctcatcagaaatggtccggtgctaattactacgacaggtatctcaagactgttcagggaggtattgcttcaactgctgccatgggcaaaggtaagcttcaatttaaaaactctttactcatttagttccttccatgcacttaataatgtaaatttaaattcaaatgaataaaattgagaacttttttttttctacaggtgtgactgaagatcaattcaaagagagctggactaggccaggagctatgaacatgggagaaggtggtgaagttcttgcaaaatcaagaatgtaaggggagaaaaagagtgaaaaagaaaagagtattatgatatgggggctatttaagcccatttccttatagaataattggggttgcaaataatatatgacatgcaattggggtcattttgagtcaattttttttgggtcactgaagtctttcttataagagacattatgttcagtacctcttttagctctctattaaaagagagtaagaacatgaaatttatttttgttattgtacttggttttgtatttaatcatcagtttt

SEQ ID NO: 193647 - DNA, 2746 bp, Cannabis indica
aaaagttcatggctaaaagtattagtcactaaaattacaatttattgtgaataaatgtatttttagtcacaacaattgttgtgactacaactaaattagtgataacttgtaactaaatattatactttagtcacaagtaatattttgttgtgactaaaagtcacatttaatcacaaaaaaattatgttgtgactaaaaagttgtctttaaaagcatcagatttttgtactgatttatcatatttattgaattaaaaaatggcatctcaattctgaattgcatgataatggcttcgattgcatttttatttattttttattggagtacttggtcctaaataatttgtgttttctcaaaattttgaatttttgtcttttaacagcttttttttccgtaaataattgataaccattgtattttaatcaatgaggtgaaaaataaaataaaaatactgtgtgttttttttaattattttctcttttttttaaaaaaatagtgtgtgtttggtgaatggtgaagttgtgggtaatgtggttcctgggagagggttgagacaagggatcctctatctccgttttattttcttctgtgctgaagcttttactagtttgatttctcatgaggaaaatgtgggaaggttacatggccttaattttggcggaaatgggttatcagtctcacatttattttttgtccaatgatagcttggtcttctttgatgctaatgagaacgagtgtgaggggttcaaaactctattggataattatgctaaggcatatggccaaatggttaatttccacaagtctgagatgtgttttggtaagcgggttccaaggcggggtgagggaccgattggctaggtataatggggggtacgagtggtggaaaactatgggaagtatcttggtttgccttctttcgttggtagaaccaaaaaagaggtctttgcgggtattagaaataaggtatggaacaaagtgcggggctggaaggcgtctttattttcggttgctggtaaggaggtgttaatcaaagctactttgcaggcgattctaacttatacaatgagttattttctgctgcctaaaagtatgattaatagccttcatcggatggcggctagattttggtgggggtcatctgagaagaacaacaagattcattggtccaagtggagttatttgtgtaagcctaaagagaaggggggattgggatttagggacttgggtttgttcaacaaagctctacttgctaagcaagtatggaggtgtatcagatttcctgatgcgctttgtagtcgggtccttaaagcaagttactttcctaatggtgatgtgttggatgctaagtgtggttctaatgcatcattcgtttggcggagctaaggaagattatgggttatcgatggcgcattgggaatggaaatagtgttcgagttcttgaagatccatgtcttccccatccggttagcttcaaaatttttgatcctccgccacttcctagtccattgtatgtcactgatttgaagaatgcagatggttcttgggatgctacgtttattaatgcggtgttcaatcgtgaggatgctgagttaatattgggtattcctaatactgattgtgatcttgaggataaaataatgtggcattatagtaagaatggcgagtattcggtgagtaatggatatagattagcttctgatctgttggaggaagaatcgcagtctgataatagtagattgagtgggtggtggaatggtctgtggaagaaaaagattccacctaaggtgaagcactttgtgtggaagatctgtcattcatggattccaaccaaggtatcacttgctcatcgaggtatggcaattgacaagacatgttttcgatgttctgaggggtatgaggaagatgtgtttcatgcgttatggggttgtcggtgtacttgtgatatatggaagcagagtgggctgtgggaacaaatgaaaaggcaaagaacttcagacgtcatcgcatttttggaggggttaaatgaggtatggactttcgatgtgtttgattattttttattgctttcttggcatctgtggtctattaggaattctgttcttcatggtggctcggcccctcgagcgagtgatgtgttcgaatggtgtggaaggtatatgaaggattacattaatgctcagtcgcaaatgaagctacaacagcagcgtgctttagcaaaatgggatctgcatagccgtggccattgcaccattaatgtggatactaaattcttagcaagaaaaattgtttttattagagggaaagtggctcttttgatagcagtggaaccatatacaatataatctttaatagaaacatacgatgaccaatagatcctaaacgatccacgagagatttaatacgaatcaaatattcattcacagataacaatccttttttaaaaattttactattgattaatatatacaatcaatttttccaacagtctgagtcaccacgtttctactttataaacttttagtataaaaatttaaaaattacatatagcatatacaatcttagaaaacaaaattaatattaattttagaagaagaaaattttctaattagatgtatatcatatttattgaattaaaaaatggcatctcaattctgaattgcatgataatggcttcgattacattttttatttattttttattatattggagtacttggtcttaaataatttgtgttttttcaaa

SEQ ID NO: 193648 - DNA, 2673 bp, Cannabis indica
aatctatatctctaccaacaggtttcgatgaagaagaaacctcaacgcttccgatcaagccatctagttctcctgctatgtcccctgctggcaccctaagcccagaagctacatcaggcagtgtcaacaatactatcaaaccagaagctgcgccgcccagaaatcattcgtcaaaacttaactctttctcatttatgttcattctactgattatttgtcaattctttgtcattgtttgatcattctttttatttaggcaggttttctcagcccctgtataatatatgcatatgtattagtttggtttttttttttttttatttttttttgtatcgaggcatattctacaaacaaataggaagttgtacaacattccttatttttttggggggtatatttgtaacgttggtaatagtataaacatggggttgtaaatatacattgaacatgagcagaaaaagtaacatctttatattgattctagttgagttattgaagtattgttctttggctatgttttgattttctgtttctttgtgtatcaaaattgattaatgtaaagttttgtgttgtagaaatctatattatcaatcccttttttcctttgagcagagaagtttatctttgtcaaaaataaaagcaaaagtattcaatttcaagtttcaacaggtgaaaaaaaaaggccatttaaggtgaagtgcaatttaatcaaagttggcatcacatgtgatgattgctgcaattacaagtctcaactcaattcaattttcagtcaacaatttgtcgaaatgccattatgtcctcgaagaaaccgaataattaaattttgactagggatattttgattctattatttctctcttataatttatatgactatgtaatgctattcacccaatttacaactttggaaacatacacaaaggaaatattatcaaaagcattacacccaaataaaaatcagataaaggcttatgtaaaagtttaaagctgaggacttgacaatcagctttcatcacaagattagtgaacccacattggtggcattggcaaagaccatagaagacaacatgagcttcagccaagagagcagggaaatcagctttcaagtgccaaactgtagaaacttaggacttggccatcagagttacgaaccactagactgaccactcatcccaatagaaattcccccaatgaatgtggatttgcttaagagagacatccccacaaaggatgataagtggattcaagcccctgggaagacactgtgcacaaggtaccagagttaataccatgatgagaaagatttgacagtgtaaggaaaggagctactgattagtctcttgagaaacaaaattttttacctttagaacaatctacatggccccagactagcttgtcacaagaatcaatacgtaattttaatgtaattttaaacataaatatttatgagtggaatgacaatcttaaattttggaataagctatgaaatagcaaaattttggagggtcataagagtctttggtggtgcatcctttctaatgcgctccctgttaaatcattgcttggaagaagatttcagatggaggatacaagctgtcctttgtgtgggttgaaggaggaatctattgtacatttatttctttcatgcgatgtggtgttacacttatggcgatctttgccttggggcatttaccttgtgatactggtattcgtgtttcggaccgggttaaattcatatgggatcttagaaatagaaaatccgagttgatgatgtatttctttatgcatcgattgttgttgacactatttggaggacgcgcaacgaaattgtacacaataattctcctccagatgtgatgaaatgtattgaccatatttatacttcttttgcagagttacatgcttctctcttgcctagttctacaccgatattgagggagacatggtctcctcctcctcaagattggataaaattgaattgtgatgttagagtgggcttagagagtatgtgcacagctgttgtagcaaggaatcatctaggcagggtggtttgggttcacacatctcggttggatttctcggatgcgttatgtggagaagctacggcctgctgtttggctgttttgttggctatggatttagggtataagtatgttattgtggagagtgacttgatgctagctatcaatgtgctcaatggcaatgcgctcaatgggaaggtgctccattgggctcttgagaactgtcttttttgtattaagtcatctccttcttttattagttgtaatttttctaatgttagcagaacttgtaattatattgctcataatgtgactaagtgaactttcatccaccaattgtacggctctattccgatctcctctttactggagaatctattttgtaatgaccgtgaggtctaaatgcttatttaattaatgtatgaatacgtttagttaaaaaaaattatataaattaagagcgtgcaaattattactctttgtacaatttaaattgttttacacacataaaactaaagttattgtcataggcggaccctatgcgttgacaaagggaacttggattaaattttcatttttcgtcctaacatttttcttgtattgaaaattttgctattgtgaccttacttagtctatttactttttatgt

SEQ ID NO: 193649 - DNA, 2402 bp, Cannabis indica
taataacaaattaaaaataatattgtacctaaaaagtcataaattcaatcaatcagagaaggcctaaatcagagctcttctcccttcggaatcccttaatttctccactctcatcctcatcatcttcgctaagtaatcatcttctttttgcgttcaaatctcattattctgaaatgcatgatcgattttaatttagtgcatattgattatttcgtgattaacctaatgttattataatgttttcccttttgtgaaaggcaattctttccaaacttcttgggctttatttgaatttgtataattgcttcttgccattctggatgagtaatcgccacgcttttgcactgtttcgtttggaatttttatgggtggaattctgtgtttctgccaatttaattacacggtttttaaagatatttattttagttttctgaatttagtatttgatattgtcttgagtgttatttgggaatctttaatgttcgataaaaaaaatacatttgttcttattattatttgctttaggaagctttttggagtacaaatggagtcactggatgaatccctaagtaaattgtcagcaatgcggcgagtgatggttatgaaaagatatttacaaaaggataaagttccttcaaaaattgaggaggtactaaattgtatgcatttctagaaattttgtattacttgcaacttgtaagagtttctaattaaatttcattatcagtgtctctttttgggatctcttgaagctgcaagaaacaagagtgagctgaaagagttaaaaattactcatattttaactgtggctcattgtttggtgccaatatatccagatgagtttgtttacaagatcataagtggtatgaatttcgtttttttgaccttcaatactgttcctcaacataagttatggaagatttaaattcaaaattttctgatatttttttaaattaatgtagttgctgataaagaagatacagatattaagcagttctttgatgagtgtttcaattttattgacgaagcaaaaagaacaggtggtagtgtgttggttcattgcgtggtaggaaaatccagaaggtgattccctttctattaaaagccaataatccactgcttattggttcatatgaagggttaatctgttgttaatagtccttcattgtttattacttttcatttaaaattgtgtttcaattgaataataatttcatttatatatacaactcttttgttcttgctctataacttttgttgtctagaatttatgtaacatgaaaaaggagtatatcacagtgactacattctgaactttcctgtacattgcagcgcaactattgtcgttgcatatctaatgagacaacatggaatgagcctttctgaagccctgaagcttgtgaggagtaaaaggccaatagttgctccgaattctggttttctttcacaacttaaggaattcgaaaaatctcctatttgtaagcatttctttccttctaactttggtttcagctcatataaaccaatgtgatatcatgcaaatggtgttgttcttttggaaattgaaacaggtttagttcttaatcaggatgtagattgtgatatgatatacatcttaaagaatataaaatgaacctttggctgccaatttatgttcagttctataccagtccactgcatgatctatatttcttgatggttgggtcaccctagtaatttataaatattctttggaattacaataatgagggtatcgatattgaaggaaaggagtatatccaagaaattaatgtatagtattagggttagtactagtgcctagtggttacagtttgtatcccacagtggaccatatttaaaaaaagttgaaagatatagggctttatgcaaaataacacactttgagtctattaatatgctatagattacctctacaattagagcctatccaagtgctatttgttgagaaaaatgataaaacttcaagcgcagtgtaacaccctacaagctaagacacattatgatgttttcttaagtactgtgctagccattgtttatcaaagaggttttgatttgtgctaacaaccatcttaccataaagtctggtatgtgtatttataactctaaaaaaattttaagtaaaaaaaataaagataatgaaaattggcataaaaaataacattttacaagaataaattagtaacttttgaaaattttgaccatgaaagtattaatatgacaaaatacaaattacaatgcttgaataggtttactacttccaactaaaatcagacaatgtcttcaatgtctaaaaatataaaaattcgaaaagaattgggaaagagaacacctagagagcgagcaaccatgaaaataacgggcgatattgatcctcaaaaaca

SEQ ID NO: 193650 - DNA, 748 bp, Cannabis indica
agttgcaataggatttctatacgctttttgttacaatttaggttacaacgctagtgtaataggaagtttctatgtaaaattactagttgaaaaaaataaaaaaaaaaaaaaaaaactaattttaaaaatgtaaaaaatgaaaaaaacttctaaattttaagaagtatcgttaattaatcacatagtaacatatttaaacatgcttaaacaccactcaccaataaactcaaaacttggttgaaataatgatcttgatgatggggttgtacccacaaaaaaaaaagatgatggggtaatccaataaggatttgacaggtggaagagattgatatctaactaagggatacgtttacactgccacattactcgagtctctctttctggttcagaaaacttctgttattggcagtgtgtgacccactctctctctctctctaaatatatttatttgatttaattttttctcttgggaaatatcaaagaagtcagcgacagaaatgaatgggtttccatacccaaatttgttggtcattattttaagggtttctttgtaatagtgaaacgtggatgtgctacgaatcacagtgtacattttatatattctcttctcttcttgcatgtgggttgtgcagttttacacttcgaatcaagtatctagtcactatcttttacaaaaacatgtgtattatttcattcaactatatatattaattggggaccgatctcatttacataattatataactat

SEQ ID NO: 193651 - DNA, 1472 bp, Cannabis indica
atgtcctcgactttttgaattattgcaaaaaagatggaaatgactcttttgtaatgtaacggttctaaaccattggggttgagggtgaaagagatgaatggaccagttagttaccacaacaaagggtcacatactcacatgtatggttaagttagtttttatccaaaataagaactattattataataatttttaataagaattagttaaacttagttttttctttaagaatagttgaacttagtttgaagttcaaaaaccaaaattttctttctcaagaaaaagtactaactagtcgtttatccgtttggttggggccgtgcattggacgccattaggcattagcctccacttatcaatgcataatgagtgttaaattttatttttattaataataaataaagaaaggaggaaggtttgttttgtttttatttcgtgtacaaatttgcagtagtactaattctatctaagaaagtttgaaattgataaaatgttatttggggaccccattcttaacatgctcttcaatgttgtcgataaaagatataatgaactgggatgagatgcgatactctttaatatgttttatttaaagcatgttaagattttttggttggtagcatatatgattttaatcacatattatcctgatatcattttgctttttctagattcgaaaacttcataatggggtagtatagtctctcatgaaaaccagctgggatacatatatatccatatagcatataagtacatttgtatttcgaaatatacatatacatgcacactgcaatcatataagtgagtatgcagagccacctgtaatgcactatgagtaataaggccatactgccagaatgtacaagttcatatatattctattattatttatttctattttaagagaggaaaaataaaaagaaactaataatgagtccatttatacgatcaaagatatacttacatgaataaagatttattaccctaatattattttatatttttgttctgtaataaggaaaatatgtaaatgctgttcacaatctcaatattatgaaaattggagtattctcttgcaaataagaaaatcattcacttgcttaaatttgatgaacttttattttttttttaagaattaatacataaatactatatcttagcgataaataaataaattatagtacataatataattataaaatagtattttataaataattattaaataaaatatgtgaaactaaataactaatgatactaataacaataaaaattgttatatgacatatcttttcacatttctttcttctcaattttagtcgttttgttaataatacaatgaagaccattacgtggcatataacttgtattgcatatacaccttgggtgcttcaatggtccatgagtatgaagattattatagatgatagttagtggtgaagatcatgatggaatacatatagccattatat

SEQ ID NO: 193652 - DNA, 709 bp, Cannabis indica
gtccatagaattttgcagactaatgtgttgaatgcctatcttgttactttttcttctctcttgtctcttgtgatttgcaaataaccttggcatatgcattgaatctgctgaccttttgtgcgtttgattcttttcactgtggaccctgtactcattttcttcaagtgttggatacccttcttgattgctatttgtattatgtagacttattacattgacgtgctgataaataattttattttatttggcagttaagtgtgcctggatgtacaagactcagtatcgagggcatcttgaatagcttaagggcttttaagtcaatgggtgcacaaggtgtgaagcatttgagaattggtggcctctatggtgtgactccaaaacattttgaagaattgaagacacttttgggagctgatggccagatacagcagagtgcccggaaaccacgttactataacaggaaaaacctttatctatcatgtgacgatgataatgatttagatgtagaaatgtgccctagatgtgagaacctgaggctagtctatgattgtcctgtggaggcttgtcaagggaaagatcatgctacacagttgtgcagggcatgcacactttgcatagcacgttgcgttcagtgcggcaggtgcattaatgacagtgaatatgaggagacattttgcctggaattgctttgctcagtctgtttaacggc

SEQ ID NO: 193653 - DNA, 2071 bp, Cannabis indica
acttgagctagtttggaatagttagaatgtattgttcttcagtctttatgagtttggagtagtctattatgggctatcctttgggtttgatcagcataggtacttgtgaattgtgattgggcttgaattagagcacccgtgagctcatggttgactcaacactgctttacttttgcatgtaaattagagcacccgtaagccaaaccccagtaaaacaataataacaaatataaaaatcaacttatagcatatatcacatacaatacgctcttgtgtaaatgattgtgccaccgcaccatataatacgctatctcatatataatgacaccacatcatcttatatctatattacatagacatcacgtgttacactcacatgtctatatatatttaaggccttcatagggtttatcttggctttaattactgaatctaacctagctatgccttaatcgcataactcttatcatatattcacataattcctttaggatttgcctaatcatagaaattttagggtaataaccctaacacacctttctacataaatatacatatatcatacaaatgaaccattacgctatactctaggtgcttagtttgttgtcttacctaagtttcaatgtatggggagatatccagtccacaggtgatctcgagcaagctagtgttggtatttttagtcacaatcctgatttatacacaacaaggttaatccagaaatcacattaaataatattcacatttaggatcccaactctagactaatgaatagagctctagacgagctttttaacgatataaagaacatctaagtcgaggtttagagtaaaaaattatgaccaaaaacaaaatagaaaaaaaaaaaagtgaattgtcgcctcagggttgtcacaactaattgtcgccatgactaaacatgtgatcgctgcggccaaactgggcaggggctatcccctattttaggtaaagtctcgtcgtgaccaccataaatttagtcgcagcgactagactagaaaaaactcaaaaaactaaattttcactactctgaaaatacaccaaattaactcaaacttaatttaatattgcaatcactttcaaactcaaatcaaagtgtaaataagcataatttaccacaaatattacatacctaaatacacatgctaccaaaaaatccatatcctcataatttacataatcaaaactcaagaaaaccaagtagaattcatacttgaacttactaatattgacattaccaaagtcccatcaagactaaatcataaagaccaaaccaagatcatcacaaccataccatttaacaactacatgtaattcaattcaaatttatgaactttttggaaattaaattaagagaaaagaaattaaagctacctaaaatgatccttccaaagctaaacacaacccacaaccaaaattctcttcaaattactacacttcttctcaaaattaaagaaacttcatcaaacagggataaatcacaaagagtaaagggcagcggggtttttttttccaaaaccagaaaaagaaatatttatctcttgaaactcagaaaataaacttacgatttgattttaaagtttggtcaaatggtccttttgcccctagaactacaattcggagccaaattctctgtcccatattcctgtcccaatatatgtcccaaccaattatattataacaactcatttaatttgccacataagcatttaacagactttacaattctacaaatacaaaatttagtaacaccgttagtattcctctctctccagcattaattctctattacaattaataaatgaatttattatttttaaaaaaaaaaacttttcaaattcagtttccctttgtcatctattactcaaaaaactccattaggtttttcattttatttttttagaaaaactcttctccacatttcattttggctctttctctgtcaatttttgtagctcttattcacacaagattttcctactgtacaaggttagtaatttatatatactttgtattttatattttgtttcatttttttaattataaaaaccaa

SEQ ID NO: 193654 - DNA, 2462 bp, Cannabis indica
cgatataggacgagagtacctaatatagtttgtgtagcaattaaaattgttatgcttaatgtctcctatgtgtttaaatttatcacgagagtagaaaatttgcatatagattgagatttatatgccctatactgaatataaattttttttagtaaatccgttatcacatgaaattaattaccctaaactttaatcattgttaatttcaccttaatatttattttctttgttttctttttagcagaaactaatcatcttttcgtatttttattattaccaaatagaattagaaatttaattatttggtaactaactacagtcttggtgggatcgacctcactcttgtgagcttattactcgtaaatgatacatatacttgcgtgttgaatttttcacaacatatgtcaacttgggcactaggatgtcaacatgggccctggatgtcaacctagtgttggttcttgaactgccttcagtaaaataatcataactcactcaatattgacttgattgacgcaattcaaagctaattcaatgctctattaagtcatgtttcacacttcaatcgcaattttgaagctatcgacctcaaatttcactccaagggaattacaaaaataagtttcgaattacctaacgggtcccgtcgggctctgaaaagtgactatcaccatcaaaagttattttttatcgttatatcatcatctatggtcaaaaacatctaatttttatttttcttctatttttgtgggcctgcttcacctataaaaggagagcttccttactcattttttacatttggaaaattacccacaaagtcaaagcatctatttagtttctcactctagaaactagatcttaaacacttagtatttttttgtaattaccatctcgtgaaaaatgaaaactcgaagtagacgtagcactctatttaccgtcgcgtcatgaaaaatgaactatttcaaattaggtgtatgtctttcatttttttacttaaatttactattcatcttatcaatctggtgagttggtatttaccatttttcaacatcaacataagtatataaagacatcaaaataatgatcaatcattcatgcttaaaaaaacaaattaaaattcaacgtcaatatagtaaaatatatatatctagaaagtcaaaatttcaaaacacacaattaattttttttagaaaacataaaaaattaatttaaccatcaaacatatattatattatatattatttttttaaaaaaaaaattataaatcaatgatattcaatagccacccaaaataattattaaatagtttgtattttcttgaattatttgatttatcttttgtattttcactgtttcaatttagtttgaacgatttgtaaaattgaagagtgttattttaattttctattataatttttaaatcaatttttatgttcaaaaatacatgttagaatattttttttataaaggtattcgttatagttataataccattcttgtaaatttttaaatttttttaaatagtttacagtatcgaaaataaatttttttataaaagtacatgttagaatatttttttttataaaggtattcgttatagttataacaccattcttgtaaatttttaaaattttttaaatggtttaccgtgtcgaaaataaatttaaagttttttaaatacatttggtaaattagaatatcaaaaaccttatttcgatactataaactatttagaattttttaaagtttacaaaaataatattgtaactgttacaaataaaaaattgaaaaagtttattgtaattaacacttatttgtaaaatttgttacacacctcttatttcaatcattaaaatacgtacaatgtaattataaatatgtgtatatatatatatatatttaagggaatcatattattattataagaagtataagatgacatagttcattgcgtcatccaaaacataagagaatataaatgattatagaattagttgaagggtcaatgttctttgggtatttttaatttcaattctttggcttaatacaaaacaaaattaataattaagtcaccaaccttgattaattcagtgttattattattattattattattattattattattattattattattattttatgagcaaactgtttataacgagaatctttgcaagatataattctaatttttattaattattttaattagtatattctaaatactaattaggagctatagctacctttctgtttatatatatattgcaatttaaaaaaaaattagtttagggtataaaacattacacaaaaatcgaacttgtgaattattacttagtttgtatatgagatgagagtactaaatttggctggaattgtaataaaatataataaattgatctattaattattttgcatatatatatatagtattatatacattacatgtatatgtatat

SEQ ID NO: 193655 - DNA, 1360 bp, Cannabis indica
cacaaactttattcttagaaaaaaggaaaaaaaaaagtgagagagaattagcttagattagattaggtgggtgggattttgtttttggaacgaaagaaatgaaagtagagaagaaaagaatggagaacaaagccaaagaaaaagaggaggaggagggtagaactttgaaataggacacagaaaactcacgccctctatctgcgcgtgacccttatttttggggtttagaaatattgtgggagtgggacccattctgccatgctttttgtcttcacagcaatcttatgctctctcatatcaaacaccctcattattctattttaattactttcctaaataacatttttctcacataattgtataaaatatatttgcatggctataatctcagtatggtttattaccataaccatagcatttgttaaaaagttatagaactcaatttagcttaaaactatcaatttcattttccaataagattcaaattatagttatttggtaaaaggagataatttaaattataaaaagtaaaaaacaataattgcaaatttagttaaggatggttgatgggatccggtaaaaatggggaaaacctaaaacaatggcggaactttcttattaaaacaaacagtttggctagtttttggatatgtcaatcgagtcgccgctcctcacgcgccattctcttcagttctcttagtttaatcacattagtcttaaattaaactctatttataataagcttggtcatatgatttagtaacaaaacaattagctggaaacattgaattagtaggttatacaataaatgtacctagctatatataagctactatttataagacaaatgtatatatatatatattgatagtttaggttaactaattataaggttgtttagcttcatgtgtattagttaattattgtattgagagaagttttagtcatggatgattattgttattgttattattattattctttcatggcttgatataataataaattaataataataatatgtaagtcaacttaatgatcaatcgtataaaccaatgtcatttaatggatggatctcgccttacgtttatttaaaaatatccttgaagcagttattattacatgacgattatatcaaattaacttatatatatagaggatagtgtagtgttatggagatcacattctaattataaattgtaatatttctaataattattgaataacatggttaacaataataaaaaagtataacatcatgcatttattattttagttatttaatcccccaaataaagctaatgcacacatataatataactcgtatatttttcacatagcatatcatacatattaacta

SEQ ID NO: 193656 - DNA, 1245 bp, Cannabis indica
tcttatcttggagcaatagtaggaatgactccactatcaaggttactaccagagacatcaaaggacatatatggattccttatttcagaggatgaagatggtgaagttacttgctttccagctttaggagtgatcacaggttctaaagatttggtgtctgattccggcatcataagccatatgttttcgagttgtctgaccacctccgccattgaaggtctagaatctgtgctttcttggcaacacttaagggccaaatcaagaaacttttccacacagtcagaagggtaagaccccattcgtccatcaatgactgagaatatcataccagactgaaatgcaagattaacctaaaaatgacagaaaggaatgattggcaagagtttttcatatgagtcaaagtcaaacaaatagagattataaagttgaacaggtcctgtacctctctgacaatgttttttccatgtgaaattggctgcattccggttaagagctccaagagcacaacaccgaaactataaacatcactcttgtctgttaatttacgagttaggaagtattctggatcaagataaccctgtaacgtagtaaattagcttagcaagaatgtcaaacaactacttcatcaaaactattcgacaatcagtataatttcaaaagccatataccggagtccccttcacgactgtggatacgtgctcaggtaagtccccttcgatctctggaactggcgcaagtcgcgaaagtccaaaatcagcaacctttgcaattaacttagaatccaataatatgttgctggccttgatatctcgatgaaatattggaggattagcttctgtgtgcagataaaggatgcccttggctgatcccagagcaattctcaatctcattgaaaaactcaaaggttctttggatttgactgccatacaaagatcaattatttcataacttgtgtcagtagcaaagcaagcaaactaaaagttatggcattaatgggaaaaacagcttgcagttcattacagttttgacatgcttaaggaagctctgctaaaaatagaggagaacaattgaatttgaaggtatatttgaagaaatatagatttttaccagaaaggtgatcccttagggtgccattggccataaactcatagatcaacatctgcatagaaaaatgtaatcttgtcaaactttttcaatgaatattattggcttctatacattataagaaagcagtaagaaaatgac

SEQ ID NO: 193657 - DNA, 1067 bp, Cannabis indica
ttctttactgcctttctcattttaacacccttcactgaatatcctttttaggtgggcccagaggaggaaggaacagctcattaccgtctgaccagtactgtcatgctgtccttaactacaaataatgatgcatcaggaacattcagtttgtccggatcgattagacgagaggtacttgtgtttgaattcatctttccatcttttattgaagcattcttttaaaagttgtagctgtacaaaaagaatgtttgtttctgaatttgtgctctttgcaccaacacatatactacaagagtttacatggcatggccatccatctcatcccgggtttctttagactttagctcaagcggtataggagtttgatataaggggaattaatattgaaacggtgttatgctttgattatgtaatgttacaataattgactaccgttagttttatttcttaagaaacagaaggataaataaatgaagggccataaatgaaataccaaacaaaagtacaagttatgtaaaagcaaagttgtttggaaacaagtgagaaaataactgtgactggtgtagagagttaggatttctgacccttttttttggacttaatattcaagatatgaaaattaaaagctacaaaaaaatgaagaaattaatggatgagatgcagatagagaagtaataaagatcccttgtccaaaaaattgtaatgtcccctcattaaagttaaggcatcattaaaaatccaatgacaacaacaacagagtaataatcatatattttcataatttgatttcttcattctttgtcaacttgtcaaagaactacattttcttggtttgttacataatgattttgtgaaattaagaaatgaattgttttcaattttcacttctccttttttgtagatgaacatggacctttcaattgaagaaggccatctttgtaacatgggaagaatgatagaagaaatggagagtaagcttaggaattctcttgatcaggtacaacaacacgaaacttcctttctttctgattttctttagagccgttatctaaaaccgttgggcaaaa

SEQ ID NO: 193658 - DNA, 1118 bp, Cannabis indica
agagagagagaaagatagatgaagtaggggatttgggtatagtgttcctcctcgagagtatatctcggaaaatgacactagaagaagaagaagaagtagtgggagtgaagaagagcacaaggtctaaagaatttgtaaaagagtcaaaccccaaaaaatatagtcactttggattttgccttccccggagacgacgggataaaaattgttagaccgagaaagacaccctcatgtgtgattccttttcccccactctcttcgcttcatactctctctctcctttaatactttttatttatttattttattaaaataactggctttactattcttatattaatttatgcttatatatggtggcagggccaggctacgtatattggagcgtactagtaaaattctttttttttttctttcatcatttttttttctcaaaatctcacgagatgttgaattttaataaaatatactgattttatattatatataatacgaattttagtttgatgggggcagacccacccattgacctcaaagagaaagaaagagatcatcagatgaaagagaaaagccacaaagggttttttgttttcttccttatgtacacatcgtaaaccctaattccacaatattattattattagcttctaattccccttacatcctcccaaatattcccttctaatctttaacaactttgtctggcatcctgggttttattatgttttcctccacatgacccctctccaaactccaagctcatcactctatctccaagtgcttggttttcaaaaccctaggctcaatcagtgatccatataatcatataataatgtacatgcaattaattgtagtgttattggaaacttacccactttctattttctattttttatagaatactttcaccgagataacatagtagctagctctaggggagagcgaagaaattaactagtactgttttcatttaggtgtggtgtttggatacctcattaaatgcaaaattgggtaatagtaaatgcatgctgtttgatttttgatttctaggaagtaggaacacgtttactatagaccatttccccgttttacaagtacttgagagagagagagagaga

SEQ ID NO: 193659 - DNA, 2547 bp, Cannabis indica
gtttttggtgtgtgaaccaaagatcaagtgactcttttcttggaagtgtattttgggcacgagagaggtgattcttcgaggttctatggcagttgctgcttcaggaaattcaataaatttctggaagcagccttggattccttggatggaatatagggaatttcgtgagctgatgcaacagcttcaaacccaaaggtataccataagaagcctggcagatgtctcggtaggaaatgaatggaatgcggagatgattcttcagatctttggtcaagaacttggggggaggatccttcacatccctagaattcctcggccgtttactgatcaagtttattggaagaataaccagaatggtaagtttacagtcaaatccgcctacgtggtggatcaggattggagatttggtccagtccgtagcatctggaagtggatttggaatgggaagattcatcctaggatatcgattttcctttggagaatcttgaatgaagcaattccaactagggaccgactgccttttgttgtcaacaaagattgcagcctttgtggaatggaaggagaaactgctctgcatcttttcagaaattgtggctttgcaaaggccttatggttgggaagtttgtatcctttgaggatagactatatcccaggggactctatggcaagttatttggagaacttaatctcaatactccctaatgtcaatagagatgactttgttaactactttggatgtatgtgcattgagatttggaaccagagaaatgctctttgcattcgatctgttttagcagttcctgcaacagctctactcaatgtaggaaaggctctaagggattttaagatgttggtggatgagccttttgaggtgactgatgaattatcttctattcctgaaggaaattaccatcagaacctagattacaagttctgcaaagagaaagtcctgtttgttttcttcactgacgcttcttgggataagagggaggtcggccttgctgccataaggataaatctccttaatggaacctggtctgtcaaagctcgaagatcaaaagctgcctcagttctggaggctgaggttagagcaattgaaatggcgatgcagtgggcaatcgcagatggctgtcaagaagtcctcattctctcagactccaaaacagccgtgactgcttttgattccaaagttgggtgtccagattggaagattgcaatttgttttttttcagtttttaatttatctagaaggttgttagtgtgtaagtttatctttattaatcgtagtttaaacgctgaggcggatggtatagccaagaaggctaggttttctagtgtttatgatgttctgtaccaaggggagggagtaccccctgttattcccatcctttttctttagttaatgaaccttgagttctttcaaaaaaaacacctcatacaatatcatccaaataacccaatccatcgatcatcatcaaattctggcacacttagagaaagtagtaccacataaaccacaacaattccaaaactcaaaatcccatttccactaagacaaaggacaccacttacaacagaagcatctttaagcaaagcagccaaagcagacaaagggcaattgaatttttcaaaagacaaatatcaaatactcattaataaaataatgaggacaaatactatctacaagagacgacaagagttattgcaatataactcaatattgaatttggttgccatgacagagttcagagaggattaaaggtataccattagtaaactggggcagaaaaactctaaaagtacactactgttgacacaaaatttcatatgttatgataattgtatctatacttttcataattaactcggtcaaaccagaaactaatgtatttatgttcgggaatttcaaacccaaagtttcaaaacaagaaaatcatcagagaatgatcaaaagcttcaattcctaaataaaattcacagaaagtagctttaagtacttgtaaaagagaccaaaagacattcaaagcaatcatcaatccaaaaatctcaaagttaaaaaaaagcctcctgaatctaattaggtgaatcttctctaattcaaaggctataaaataaattccttttataatagttaaaaaactcaaaaggaaagagctaagaaacataactcattgcagagagtcatctaaccttccaaatgactataaagaatcctgaaaagacatctagaattatggacccttctttcaaaaacactaggcctcaattctagctctaaactacctaattttcctaaacaagaattgaaagaaagaatcacggcccgcgaggagtgccaaaacagaaacaaccaggagcgcggtcttcaggtatcatgccaccacctttccttgtatcaattgcttctagcagcttaactacatcagccatgtcaggacatttctctggatttgcatcccaacattatttcatgatccttgcataagatttcgaacatcatcctgggatttcaggtcgctgattttgccattttgcaataaatgtttt

SEQ ID NO: 193660 - DNA, 2845 bp, Cannabis indica
tcataaataaaaatgtgatgcagatgtaagaaatattgctaacaaatgaatgagattatacaaatctaaacacagtaatacaagtaggtagaactgagaaaataaaagaaaagaagaggggaatttattacaaaattgaaaatacaagtagttgtaaactaaacacatagaacaagatcaagaaagtacacaaactgaaaacacctcagcttacaaaatccaattcaaattcaaagctttatgtaattcctcaaaagtcaacttttatgtaacacttcaaaacaaattttcttttgtaaagatattattattttagagagacaacttgagaggaaaacacttgggtcctggtaagagatagatttggtacagggtaaagtgtactagtggggttttacctgggtttaaggcattgtaattattaagtgttgcaagtctcaagtggtagtggtgacaagttgtaatctccattgtttttcatagtgcatagaagaacatcccaaggagatttaggctgaacatttctaattcttggtgttgttttattgtcttttctagtgtttttacctttgtgtatagataaagctggtgtgagggagctcaatccctaacagtttccatttaatcaaacaataaattattacaaataatataacagcacatcattacataacttacatcatctttctgtgagatttattatgagaaataataaaggattacatagaatgagggacataaatgtaaaataaaattctgaaattcccactataccatgtgataaatatgtagtaactgaaggagtacacaacacaaccaaccagccaacaaaagttctgatgggaataagaataacttttcatgatgcaaaattattgtaactgagaataataacattcctttttaccatatccactaactaggtccttgtattactgtatgtgagaaaagaagattcctatgtttgttggtacagtctactccacttttttgtaccatattccttgactcatcgattcaaagaggtcattagattgtattgatacaaatgctgcagagaagccactaaaagcagtacttaaaacttaaaagcagtaattatatccaccatcaaggcaagtaattaaagtacgttaggggaaacaaaatgattagtgttagtttaaactaggtaagagaagcacaaataagtacagtttttgtatgcctttttttagtgattcaatttcaatttggccaccaaagcatttatattttgttctagaagataatgtttttcttctatgtgcaaccaacaaagtaaaccaaaccttcctcttggaaagaagagaacaaaagcaagaaaatataaatgtatattatattgggaagaaataatctttcacattggctaaaacaggtcaattaacaaaaaaaaaaagtatatagacaaaaaaagaaaaaaccaatgtcacaaaccattgttctgtttaggctcagcaaatctcctagaagacatttgattgaacaaatttctcaaactattcttactttccttagttctactcttcttaacactactattgttattattattatctatctcagaaaatgaggtatcaagaaccaaccctgtctctaaccttttggagacagtaacaatctcataagaatcccaaagagactgaccaaaatcccaagatggtgatgatgaagtttcattataataataattaatattattaggtgctgctgatgatgacatattattactaccattattcttgttcctcttcttcatggcttcaagcttgaacctcgaaggccaactgcctctaaaactgtaggtctttcttgcatcaaactcattcaagggtctactacttccaccatggttgtaccaagcttgagccacagctttcataatctcaacctctctcttattattatctactttctcttcaacctgctctgccctcttcttcttcttcaacatgactttattattatcattactataattatttttattttctagtgttctaagaaagagagaaatagaaagtgttgtaatgagagaatattgaatcagagcctcatatttgtttttatcaaaaggcatagagaaagataaggggtttttatttatttatttatttatttatatttttgaatggtttatttcattttctttctttggctccaaagaatgtcatgaaaacctacctatgaatcacccatttgactcttctgtggtgaaggaatctgttcatcaccattcaaatttattctttttctagttaaaggtttattttgatagtaatccaaaaaatttggccccttgaaataaatacatagattattggaaaattatagagtacaacactatttttgtctagcttcttatttttagcatttacaaaaattataattcaatttttttatatataactatctaccttatagttataattgatattcaaaaatttataattatttacactattcaaaatagtattcaaacattcaattgtatgcatgtttgttatttttttttatatgtctgcaattgattattttgaactctgttattagcaaattattcacaaatttttgaaaagaaattaaagatctattataaatatataatttaatgtagagtcgtagacatctatataaaataattaaattataatttctttaaatacttaaaataaaaattaggtgtagttagacggtctatttaattttttttgattttaaatattgattattaaatgatatatatatatatatatatttgtaattattaattgtttaagaaataaaataatataattatactattttttttttgagaatataa

SEQ ID NO: 193661 - DNA, 1205 bp, Cannabis indica
atagacggagtgatcaaaccttcaagatcacaagggacattgactccgcctgcagtatagagcttcttaaaaaacccattcaggatatctcttttagctgcctcattctcttgcggcctaccattgtcatccatcaaaaccaaaatctgatttcttctttttctcaccaccgtggcagcatgaaagaaggatgtatttcggtcacctttggccagccaaagttccctagagcgttgtttccagatgctttcccgacgccgtaatatctccaagatctcattctctattctcctttcctcctcaacggcatgatcgtcgacttcctttgactgaattgcctggagattgttctccaaaagtttcatcttgatatcacactccccaaaaacctcttttttccacctctgtaaaacactacatatatagagtattcaaacgtttgacatatatcatgaaacttaaatttctaaagccaaaaatttgacccactatagctaagagtaaaatttattctaagcaaattcatatttgaaaataatatttatgtcaagttgagtctttaatttttaaattcacctaaagtttttgctatgtcgagatttagactttagttactgtaaaaaaaaaatatttctcttttttttatttaattcattaattttgtgggagatttttttgattattttattgtgtaattattaaattaaaaaatatatatttaattttttagagttcgtttggtacggcgtattacaccgtattgtattgtatagtattatattaaattgtattttatacaatctttttatgtaaaattatatgtggcattaacttttatggacacctaaaaatataatattttagtatacaatataagacttaatactacgttacaaactaggctaatgtaatattttttcactggatactacagccttgcatgccccacacccaacaaagtgagtacgtccctactctaagggtcttttggtgatttgtctcctcacgtcctatatgaccaatcatattctcccaaaatctatcttaagtataacaatgtagttaaagttagttaataagttgcattggttagtagtggactagttatttgttgcttgtttttagttagtgtttgttcgtaacaaattagttattcttagttactatcttgtagaaaaacttacattatttcgtttttttttttt

SEQ ID NO: 193662 - DNA, 1044 bp, Cannabis indica
ttattattcatgtgtatatatatgacaagtagtttgcttcttatttttcagaataatacaaattgaaacttaattataaatagcaataatacacatttctctttctctatatatataaaggttagttcaatgtagggaaacaacaactagtgtagataaacaaacattttatacctaaaaattgttgcttgtgacccaagaagtggcaaccatatatattcatatacataaatatatatatagcttctttcttatatatggaagttgagaggttgtatctttatgattagttaagagcacaagcaaagcagtgaaaaagctaattcactaacttgaacatcaagtacatcaaacccaaaagtgaaagataagatcatcatcatcatcatcaaaattaagaattacaaaatcaaaccactaatattaatttgtacatatttttaaatttcttgaaaagggtcaaaagaaaaagagaaaaaaacatttaaagttcatcatgttggttccttgtattatgtgtctctatatatgtgtgtgtgatccttttcttattttcatgacatatagtacccaccacatggtgctacccatgaataccaccactcaccaattgacatagcaaaatgattccatgtattaaaattttctctactatatatatgtatatatactttgcactcttccatatttatgtatatattttttattaaattgaaaggaataatatatatttgtatatatatatataacaaatgtgggtagagatttatttatgattatgtcagtaagaagggaaaggggtgggtggtggtgctatgatttatgagcctttggctgtgtgtgtgtaagtaagtacttgggagagagcctcatgagctattctgatagtgataattctagtcacaggaaacagcagaagaaagatttaattttaatttttaattttttaaatttaattatattattttttttttatttagaagatcatggaggtttatttggggaagcaaaatcagagagtgtgtcccatttcaagaaataata

SEQ ID NO: 193663 - DNA, 2461 bp, Cannabis indica
gtgagcaccagcaccattccaatcaaccctggtaataaaatgaatcaaaaccaaatgaaaaaataagtatcatcactaaacaaggataaaatattccatgaaaggagatacagaaagtaaaaagaaaattgaactcaaaatagataatatcaataccggaattggctttggatcaaaggaaacgacaactccagcaatttctgttatcctctgttggtacgagaaaataactatataatttggaccaaaaagaaaaaaacgaatcaaaagaattccaaatagaggactttatactacctccagaatgtaacgagcagcccacaactcgtctccagcagatataccgacagaaggccctacttggaattcccactatattgtagaagcaacaacttaatcacattataattgaaaaaaaaaaaaaaaaagaaatatagtaagaatgtaattaagaacagacaaaatagagtaatgatctcttacctgccctggcataacctctccgttaatgccactaatgttgatgcctgcatacaagcaggccttgtagtgagcatcaacaatgtctcgtccgaaagctttgtcagcaccgataccacagtagtatggtccctgttgataagtaatacagactctttaattttagaaccaaatcagtcaaccattagatatcaaaatagagctgcacaagcacataaacactttcatagcaatgtaagtagcaaaaacttgaaaacaagaacagcgaccagattttaaagcaaaagttattgacatcaaactgaaagagatcaaacatatacttagctaacataatcaaatgtgcctctcaggaatcacttaaaataaagaagtttgtattgactgagacgcttataaactcttttagtatcaaaactctgtttaaacacacagtagcagcaataaaattgtaacagcaaagaatgacttcataaaatatgacagggagttgaaaagataaagtcttagaaggtgggcagctccattacctgagggccagggaaacccccgacaggccacccaatgggccagtggacttcttcttcaagtaaggtgtattcttgctcgataccatacctgttttcaacatcatatgtctcgaataacaataataacattgactcgtagaaatataaatgaagcataataactagacatgaatatgattaaatatgtaaaggaaaagcaggctaagaagtacaaaccaaggttcctcagcaactacatcaggatggctgaaaatctttgcagcagcacttctcttgtttgtaggaatggcttctcctgccggagtataggcatcacagatgacctatgatcattacatcaaaaacaagagaattagaaaaactgaaacccaggtatgtatgattcatgaagatgcaaaactctccttacttaccaatatgttgttgcctctcctaaatgggtccttgaaaattgcttgagggctacatcaaaaaatgacaataacaaaaaaaaggttaataggataatagtgaggggggaaatgaataacagcggagaaaataaactaaaatgattcttactataaaatcacttcactgtcttctccgggagcttgacctgtgcttgaaccatcgtaattccacttgggtaactttgaaggatcatcaactggtccttcaagagtctttacagacagcgaaaaattgacatggtcatttgaaggaattaaataagtaagaatttttatatcaatcgaatgtttataaagaatttcttactcttgctttgcttcttaggtcccataccggatccaccaatcctgttcaaagaaatgattaaacactaaagattaaaccagagaaaaatgaaaataaataaacaaaatgttaccaaattgtaggggaaaaaaaatccaatttaattacatttcaaacgatctagttttgcaaacggtagaaatataaaatagagcagaacaattattattattatgatgatattattaaaattatcattatttctgataaaaaagcagaacgattattaatcctgaagaaatcggtccacaacatttttaaacggagaaaaatacacagatcacagaacaactcagaaatcagtaacaaatatttatggagggatataagtaacagtaattctttttggttgataacgagagacctgaaacatatgagtaattatatatatataaatacacaatctaacggtttctgtggtaactttgctgaaaagtacaacgatcaaatagcacttatggtatgaagtagagatgatatcaagaagtaaaagaaaagaatcaaactacataacataaaataaaataaatagtcactcaaaaaacatacaggaggaagcaaaatattttagtcaacagaattcaaaattatttctcagcaacaaaacaaatagattcatatcttacaaccatagcaacagatcacgacgacat

SEQ ID NO: 193664 - DNA, 2871 bp, Cannabis indica
acagaatacacaatgaaagatgttcagaataaataaacaaagagcttgcaactcattgatccacatactcgtgagaagagcttgcaactcatcgattcacatactcatgagtatgcttaaggaatggaaacaacttcaatgtttattcaccgcacttttgatgcatagaagtatcactaatacctttcaaaaaggcaaaggatacctgtgagatgcatcgaatcttaacacttaatattttttcctacaaagatggttaagaaagataacatgcaatcaacgagaaccatccaacacagtcaacataaccgtctatggataaagacaaagagaggttgaacatctatttaatattatcccatgtgcgtaaagataaaaggtggggaatgaccacgtttcctgaacgattatgaatgagtagattctaagggaataactgtcaccccatatatctataaatagagacagaacccagggtaaaagggacaaccaattttagagagatactattgccaaattacatcattgtattctgtatttaaagatatttatccttaataagatggactcgtgtactatgaagatttaacttcaaaacaatgttaaaaccttcctcttatttacattaatttagtaattaattgctatataataaattttgtatttattataaaaaggctaatattttagttaacaaaaatgtgcgttaataatttggtgctttcattgagagcctttgtagtataacttagaaaataccctcctcaaaaatacaactcaaaacttttactcatggcagaccatactcaatgtaataaagagaattagctagaggagacaacccatcatcctagaaaggagcctcaggctactgaaactccctattctggaagaaacgatggagattttaatccaactagtgaatagatcacagaaaggcaaagcgagtacgcttatgatccaaccagatatgattcattggtggaactagaaaataggcaactttgagaatgcctggctgaatcaaactgaaggaatgaggagttagaatgcaaagcagcaagggctgcacaaggaacgactcctcaaaatcaacctgatccatctacaagatgaccacaggggaggtcccaaggttctaggaccaatagacaaggaaaaatcaatggaatcctcagacactcaagaagaacaacctaggaatgtgagagatatcctaatggatggagaaaacctataaaatactagaaatacatgaaatcaagagactcaacgtgataatcaaggatcttcccatggatttgcacactaagggaataaacaacctgatataccagagtcttctcgcatgaatgcaaatgccaggtatgcacgacttggaaaccaagaaattccatagactgacacaagaaatgctagaaagaaacctgggccaagtcgaccctaaggcattcacaaaggcctactcgtaacagtagagatagtgcacacacttacctaagtagagttcgtatggaaaatctttttcgaaggagaaggctgatgctagaagaatcacatgagactggctcaagtacaaatccaagtggatcaaggtcgaggacccgcatgcacatcagatcaacccaagctcataattgtggtaggcaaacacgagatgaaggtggatcccgacattattatcaaagtgaccaagagagtattagtaactcttaaagttaccaatctaaaagttactcaaggacaaaaaatgtgagtaattatgatcaaagatgtcgtgaccctgatcttcacgaacaattaaaccgaagacaatatgacttacgcgagcatttgaactgtaatgtgccaaatttatgtaattaactgaatcaaagtgcatgtgtactaaaaccaatggagcaacagctcgtggatcctatacaattgcatgtaatacagttggaagataagttcagaaaataccaggatggagaatatgggaaactacctagatatgacaaagacaaagagatagaaccattccatcatgatttattgaattcaaaatttccttaaggatttaaaaacccacttttcgcacaatatgatggtacaattgaccctatggcgcacctaaacaacttcaataccataatgcaagcaagcaatgtttcaaacaacttgcgaggcatattattcccaacttcactaataggagccgcaagtagttggtttgaaaaaattaccaatcattccataacttcctgggaacaactatcaaaggatttcaaaaagtaaatctaagctgcaagggattggagaccaaaagactccgttaaccaatgataaacaacaaccagaagaatccttaaaggcgtacttgagctattaaagtacggctgtagccaaagtcaggaatcttaatgacagttttcagttaacagcacttcaagctagagtaacaactgacttctcaaatgtagagggagaactatgggattacctgcaaggtctgttaaaaacattaacgagttcaacaaaagaagcatgaaatgaaataaagctacttaagttcggctcaggaaataaaccctgcaatagcaagcactatgaccaacaaagctagaaattcaaattccattggcttaaatgccaagagaaaggatgagccaagagactcgtcaaaggaccaaaagaaacaaaagaaacacaagaaataatgttccaatatacttgatgtatatagaattgaatgaaactcgtgaaaatatctatctcatcgacaaaaattgggtcacattttgcagattcgatccaacgagacattcgagaaataaaggagatcctaacaaatattgccgtttccatagagacatcaggcatacacca

SEQ ID NO: 193665 - DNA, 871 bp, Cannabis indica
tgtatttgtgaaataatccctcattttaaactgaattttgatcatgttttctgaaaaataaaacagaaaaacataaactaagttcaggtattgtaaattatacaaaatattctaaaaacgtataagatattaatttacgaactcaatttcttctgatattaatatatagatatccatattggtaggaacaactaacatcctcacctcctttatatacataaaccttaatgagagtagaatacatttttttttttacttttttattaattattttttaaataaagaagatatatttttggtcacgtgcatgtttgtcaaatccttgtcaatagctgcttgttacgtggttttcatttcacacgagaaatacaaagaaattaattagaagggtacatattatattgctatctgcatgcacggtttctatcacaaatttgtaatttaattttattcaatatatatatatatatatatatatatataactagatgctcaaatattcctccctatatatactaatacctggtcctcatattatatatagacgagctagagagaagcatatatttactataaagttttagtattccttcctttttatttggtatgatcaggtctactgttgtaattaccggtttggatttttgacacggcatgaaaccggcacgagtttaggcggcacgagcatcaggggcggagccagaacttaattactaggggaccaattattaatttttttttcatcccttcactaaaaaatcttttcaatatatttcctatcaattttgacaactaggaaagcttttcagtctaatattttttttattattattattgtgtacatgacaatttttacagaccacttaaaact

SEQ ID NO: 193666 - DNA, 1216 bp, Cannabis indica
tcttccatatatatatatattaacattgtttccacatatattcatgtggttgattattggggattttaataattatcttttcaataacgataaaatatggggtagcctccctggcttccatgaccttttttgcaaattttgctatgccctcttccttatgttgctaacaaatatatttggactaataaaacggtgagagaacagttagactgggttgtggtttctgaatcctggtgtgacctctattcagataatagtctccatcacttaggtttttatggttcagatcatcgtgccttaaagcttgttttaaccaataccaatcctaatcctctcaactttattaataaaaggtttagatttgaaaataattggcttgaggaccctagtttttacaccttggtggatactacttggaaagagtgtaatacccattcctcttcaggtagccattttcatagtttccttgctaagcaaaattgctgcatttcctctcttaaggtttggaataaaaacagtaaccacctttttcagactagaatccaacatcttattcatgacattaatagtatccaaaataaagatgttctcacttaggatgataactatagactcattcagttacaatttatgttagatgcaatgctttatcaggaggaaatatattggaaacaaagggctagagttagatggcttaatgtgggggataagaatgtaattttttttttcatgagtatgccacttctcagaaaaagtccaatcatattaagtaccataagactgaagatggaactgttgtcaacacccaagatggtattgctgattggataactttctatttttctgaccttttctcctcccaaggcagtgatattgaagctgctgcttcaatttttgcttctttgggacctgtgcttgaggaccaagaaattgagtttcttgctcaggatttcactgccgatgaggtgagaaaagctgttttccagcttttaggggagaaggttgtaggtttagatggtcttaatgtgtttctctatcaaaaaaattggtctgttttaggtgatgaattcaccaatgctatccttgattgccttaataggggtgcagattttactgatattaattctatccttattgttctaattcctaaaaagcagcatgccaatatgttaaaagatgttaggcccattagcctttgcactactctttacaaagt

SEQ ID NO: 193667 - DNA, 3314 bp, Cannabis indica
ctcgagaaggttggacaagtgatcatgtttcttcaagttcagttgatctcgtagatcactccaagtgtgattgcagttagaccttgctcttcctcttaaggtttgatttaccttattctctctataagggtttgcgtgatgttatgcatatcccaggctgtatcctcatattttcctcagtttcctcaggttgcatctcttaagagttctgagtatatttctaggttgtctcctaccccttgatttgcgagccgcaaggttttcctcgtggatctcttttgccaaggtcaggttaatttcgggtttcattctcatgcgctgcccttactgtagctatttcatgctctaactcggcattacacttgtttgcttcctccaactgacgcttaagatggcaagtttctaactccatgatcggtatgtatctggttgggtcgtagatgccatcctcctaaacctggttaagaagtgaccggttgttgttgtcccaaggtcaatgaagccagggaccccaatatagggttttcttaggacttgcagtctgttcatggttctgattcaatagatccctgagtgaggatcattatctttggtgtcatccattacttttatgtcaggaggttttttctgagctttttcatagaggctcttaatgaaagcaccctactgttaacgtagattttcgttgactaaatttgagcctcacagtagtaatttcacatagaaaaataagagctatagaaataaagatatgaacacagggtttttcacgtggttttgcagttaaaattctacatagtccacgagtcaatcttcttcagatttctaataattttttaggaactctcccgtatgaattttttccgtctccctttttcaacttgtctgccactatttataattacatagtgggcagtaaattacaaacgttgatagtaatctttacaacaattattccctcaaatcatgggatttgattacaaattatgctaagaaaatgtgggttttatttataatccacactactgtcagtatcccacttttattaggccgagatgaacgcatatttaaggatatacggtaagccttatctcatggaggtgcctcgctaggaatagaaccgagttaactctgatggcgagctgtggctcgtcatatgacttcccgaaattaatattgctttaattctgataactacattgtgtgttgccaagatgatctttctcccatgcatgccatctttcagcaagatagacgcctcgctatctgtcctcttgattcagcaaactatttaaacttagtttgtataccatgtcgtatatgctaagtgtttttatcgttattgtttctcttccacgcgacgaagttgaagcttcgtcatgcacacttgcactcacatggtctctcttcgatacataagttagcagttcgtacgtttctgtcacgcagaagactcttcagccagccgaattataaacatactctgcacattatatttctaacgagttattccatgccaagtgtagttacgactgcgtgtttgagttcttcgttcttcccaggccgacaagtgtcctcttccaatgtgcttaccaaattttgggtataacaatagcggtcttgaagagaccaaccccaactcccgagatggctgagcgacgcaggctcctgctgggtctttcgtataatcttcaattggctgagttccgcgtgaatgaggttaacttgaggtccatggatctcctcgctgagaaggagtttccttgtgattacaaatatcccaagtattcttcttgttagcaagtttcagtcccagccaatgaggaatctcaggattatgtggctcgggcacattacctccaaaatgctgtccctcgagaagccaaagaaggagcatcccgaggtaatcaatgtggttggtcacccacagtgcatagggctgagcgtactttagtgtctttttgggatagcagctataaattctacacctggaatcccctcctcatagatcgcgttgcacataggtttgatagttggtacgcagacttctacatccaaattagttgtactgactcgtattatgggatagccgaccagtatgggaccatgctggatagggaaaatcatatagatgcgagctaggatttagaaccaattaacccatatgacatattcaaaatcacaggatgtagagactttagggaatattatagtcctcctacctcgtcttcttatgattatggtaaatcccttaggcaggaaattatgtcccaacttcccgttttacttgtttttaaacaaatgttaacacatttgtcttgtctcgcagaaatgaatctcaagaacctccttcaatctttaggcaagaagggaaagaaaaggctgactgccttggagatttcattagatgtcaacgtggagcctctcaaaaggcctaggaagacaactgctaacaagaagtgagcttcctaggctattgatctaggggtccttgagattgagactcaggctcaaacccaatcttcagcccccacacatactgaagagacttcttcctcttcgagcgaagcacttgagactctgcctaacgaagttgggaaactggctcgaagtacactgggtagtttggtgcagcatgtcggcatcatttcaagtccttccttcccaatgaatgggacttgatcaacaatgggaacctcgaagagatgcttgagaggagtgtcgcctatggcctctcagtaaattcctttatccttctcctcttacttccctttttaacattcttcaaaaatactcatgcattattgtttttttattttcagcaaactttcatctccttcgtcgcccaacggcgggctacggaaagaatgaagtacacggagagcgagatccagaaggtgataagtcagcacgaggctgtgaccaaggaattgaatgttgctaagttggagatttctcacttaagtaaggaaatcgaggaggtgaagagggcccataaggctgagcttgaagctgctcagaaggaggcaaaggataagatcgaggcatgccagaaactccaagaggaaggccaaaaactccaagaggaactcaatgtagccaaagtaacgctcgaggggaaagaagcttaaaccattaagcgatgcaatgccgttgcacaatgttccatcaaccaagcctggatggtaaatccagggatggatttaactttcctgtgaaaggccatgggagaagtctttgcttactacgagtaagctaagaaggtagaggaggaagtcgaggtagtagctaaagaagaagaagaagaactatcc

SEQ ID NO: 193668 - DNA, 1541 bp, Cannabis indica
tttacatactttattattcatatataaaccctccaaagtcctattctttctcttcataataaaatcaaattctcactcttctcttctttcttaatatttctctcattgttgggtgtatgcatggagagaatggacggtcatgatcatcaccaccatcatgatcaagatcatgatcatgatcaagaagaagtagtagtagtagggtttcatcactccactactacaatatcgtcctatccatgcgcatactacgtccaaagcccttccaccgtctcccacgctaacagcgcaacagacggcctccttcgtaacaacacaaccctaagtagcaccgctgatcaggactacttttcctcatccaacggtcaccacaaaaaaatttcttatgatgctcgcagtcatgaaactgctgcgagcatcgatcatcaccatcagaagtatagtaatagtgttgatgagaatcgtcgtctcatcatcagtaatactactcttgatggtgatcatcattgtgggagtgaagatgaagacgatgattacgaatattattatggtgagaaaagagggtggtggaagaggtattgttcttatagggattcagattcaagttgttggatttgtattcagataagttggagatttttggttagtttgtgtgttgctttgcttgttttctatattgcttcaagaccacctccacctaagctttctattcaggtacttattacacacacaacctcataattatatctatacataacatttctatatatacatataataattgttactgatgattatagtcttacactaaaagaaaaagcttattatgacaacataatactttattcaaaagtggttactattgtattttaatgtataataatatccatcacaataataaggaccattttaactagagaaatgttaaactgtagtgtctaatactctcctatgtgtcagtattgttattggtccaattaagtatcggatcccacatagtttaatataatagattttagggaatatcgctagccaatcacaacgtgacatttcgagaacgtgctaggcaccaattattcataaactggtgcctaatatcaatgctcttttaattatgtgtggagttgcaggattagttcgataactttattattattattttaatgtatcatgagattgctccaaagttatcacataagtgactaaagtgacaaaataaactgcataatgagaaacagttcatgaataacttttagtatgtaataacatggaccaaattataataaatatataacttaattaaggtaagacaaggaaatttgaattaagatatcctctttaaatgtcttattttgttgtctataatcaaatggtacatataaacaagcttctttcaaaaagttttgaaatcactataaataagttatataatatgccaaattaaatgttgagttttgtaattttgtttagtaactaatattaaactcttatatatatacttcacaaataaataaataattaattcaaccatgcaatttttt

SEQ ID NO: 193669 - DNA, 2147 bp, Cannabis indica
ggttaaataaaaaaaaaaaaaaaagttaaatgtataaatattaaaacatatgcaaaatctgataaaaatatttaaatggaatttgatataatataacgttatccattgtagccggagtggctttgccttggtctctctcagactcatactttcactcgcttcctcctcttgcttgcctcccttcacttgtaagttttactttcttctgccataccaaccaatatgattatgttcagatttgttttgtttttcttgaaattaaaacccctaactaatccacgctgcgtttgattttgattttaattatgatttttggttgaaacagatagaattgagtagagaagaagaatgtcgatgtctacatcagctaattcagtttcattctttggaattgggattggaattgggtccattccaaggttaccatccataaccagacctcactcacttgttgtggtatccaaggccaaaaccagacaagaagacagaattgcccgtcatgctcgtattagaaagaaggtttttatttttttcaaattattctttatgggtagttgttaaaactacttaggaaccaaacccatcttcaattcattctctagcgttcaattttgcctattattaaattctgctgtttaattgctatcataatgcaaatggctgccacaaagttgcattacttctttctttccaatacattcatttaatatctgtagaagaaagaaatttgagatttgtttgtggttttttttgctgttttttttttttttattattattataatgtaaacaaacaaatggtttgattaggttgaaggaactacagaaaggccaaggttatgtgtgttccgctcaaacaagcatctgtatgtccaagtaattgatgacaccaaaatgcacacccttgcttcagcttccacagtgcagaaacctatctctgaggagtttgactactcttctggtcctactattgtaagtcatgaaaattaccattggcccttttgattatgcaattatatttaaatctttcaactggtttatataggccagttacttactttataatgtctgttggtagtactcaaagtaggtagttcgaatggtcagggatgtgtttgcttccacaaggtttaaggtcctcagaatagctgcatagcaattgttataattttctgctccccaaatatcccaagtattgtaaggttaggtggtagtaatagcagtaattcgtgtgttagagtccatgattagctcctgtgaggttgaagttcaaagacttatctagcaatttgctgagtgtcttgtattatgtattgtgtataactattgctctctagatggataatcttacaagattgtatttggtactattcatcttgtgctattaggaagtagcaagaaaggttggtgaagtcatagccaagaattgtttggagaaagggatcacaaaggtggcctttgatcgaggtggatatccataccatgggcgagtagaagccatcgccagtgcagctcgggaaaatggacttgatttttaaggttctctgttttgggtaggttttgccttttgtacaatttgtttctgtctcttgtaaaaccatgtgatagaagggcaccaattgtaatcgtttttttttcttttcaatgagctgcaagaacattcggttatatttttgaactatctgatgttggttattttctccgtcctggagtgtggtcttgatgaattcatgatgttcttccacctagtgatagtcatatcatggttatttcctttgctcgttaaagtcggtgtcttcagccttggtgatcaaggagaactggccaactgcagccattgtctgcttcacaattccacaaatctgtccattttcatctactctatttctttcagtttttcttttattttctaatctttgaagttaatagctctcttttttcttagctcatctactttatttttattttcagaataaggaaaaatttaaaaggaatacttgtcaaaagaaagtctagatatattagcctaaaatttgtctttataaatgtaatagatccatagacatcttaaaatgcagtcaaaattctattgacatctatataatcctaaaattttgatgcaagtttgcttagagtcgatttttggtt

SEQ ID NO: 193670 - DNA, 1284 bp, Cannabis indica
gatgcagtcaagtgatcttgagttgatttagataatgtctaaactttgttgttagcagtggcttaaagaacatatttgagggattgtcatcagttgagacctttagcagcttgatctttctctcagaaatgatgtcttgaataaaatgtagcctgacatccatgtgtttcatcctttcatgaaagaccttgttcttgcttagacataaggcactttgactatcatagtatggagacactactctttgatcaacccccatttctcttgtaataccttctaataacactgcctcttttactacttcagtgcaagcaatgtactctgcctctatagttgatagggccactattgatttgagtgtggctttccaacatatagtgtttctatttagcatgaagacatagccagtttttgatcttctagtatcgaattctcctataaagtcatagtcggcatatcccataataccaatgttgttatgatcagatccatatactaaatcaaaattcaaagtcccttttagatatctcatgagcaacttaattgcctgccaatgtaatacacttggagctcccataaagctgcttatcatactaaccccatagcaaatatcagttcttgtacaaatcattaggtacataataattcccactatgctaatatagggtattttgtccatgtaggtttcttcatctggactggagggagcttgagtattagaaaatatgaattgttggccaattggtgttaaaaatggaatgcagtcttcaaaaccaaacttcttcaggatcttcagaacataccctttttgagataacacaagcacccttttggagttttcccttataatctgaattcctagtatcttccttgcactacccagatctttcacttaaaattccttgttcaactactccttgattttgttaatctctattttttctttgcttgctaatgtcatatcatcaacatatagcagcaagaaaaccttgatatttgtgttttgtcacatagacatgcacaactgtcatatgcacttctttcacttaaaatatcagctctcattatcatcaacaagcttatagacacttacaagattctgagttatggagagaacttgtaacacagactgtaatttaagaggacatgatgaattatgtgatggaagagcaaaaccaccaacatgagaaattaaaagtttcttacaatcaaccacgactaaggtttcagttccagtgtaagcttgtggattttcaagatttgtagcatcaaaggtaacatgag

SEQ ID NO: 193671 - DNA, 1238 bp, Cannabis indica
tatatatatatatataatattgtgaagatagtgaagatggaagctgagatacgtaagactttggaattggataatgaattgaggagcggccaccctaccttaataacatttatacggtacgagaaatatgtgaaaaaatatctgttaattaaacaatattttaactgttagccttttgtatctatatatagaacctattctaagtgctagactgattgtggtttctttcaatttttcggtttgcaggagatttatgagtgttgatgaagaaagtttagaagtcagtttaatcagacattatattgatctataaatattatgtatatatggatgtctgatcatatattaacatattatacacatgcaggacaaacccaagtatgaattcctgtgcgtgtatctttctaagctagcattattggattatgattgtactgtgaaattcctaccttctttggtggcagcatcagttatctttcttgcaagactcattgttaagccacaagctcatccttgggtaaatataatagaacttttttactataattatattcgtacttggaactgtaattatattttgttatattaattaccagacattatccctgcaaaaatattcgagatacaagccgcccgagttacagcaatgtgttgttagtttaagaaatgtgtatcttggtataaaatggaaatctctggtggctataagagaggaatacaagcaggtacaatatatatatatatatattctatttcgtgttataattgtttatatatgtatatatattatatatgatttgcttaatttgtctagataaatgaaagttaactaataaacaactatatatgtatattttggaacagtctgcggaagacgtgtctactgttgcagagataccagcacactatttcggagacattattattagctagctagaaataaacactgacagaagaaatgaagtaatttttggatcatgatgacttggaaaatagggtttgtcaatacaaaatacaaggcctttgtgctcatgcatgtagccacgggtattagtatttttgatctgaaatacattattggaatttatatatatatatatatatatatatatatatatgctgatctacatgaaacatgtttgttaattttagttaatgatgtattttcttctatttgttcttgtgtatgttctcacgtatttattgactgaaatctagctagtctctctccaaataaa

SEQ ID NO: 193672 - DNA, 3147 bp, Cannabis indica
ttcacatatgctgttaagtttcaagttcatcttttttatgggaaaagtattaaataagagaaataacatcaataggggaaaaggaaaattaccagctctactcccagcaccttggcagcgtgctgagaagtcaattgtctctcttacagtcatctcaggaatgtgcaagtcatattggctgatgtaggctgaggttttttgaggaacaaagtcatctagtttgtaaccattataagaagtctctcctgtcacctggagtcaaaggtttaggacttctattatgttgattattattgagtatgagaaatatattgtgttactggaaatctaaaacaagtattttggtagtcatagctctgttcatatttatgtattcagaaaattaaattatgttgtaagtctgtagtaagttatgtggtgcattgtgattaccaacttgttatattatattttcatttcatatcaagttttctgctatataatttctctaattctaatgatggagctggatcaacatgagtcttccccttttttcaactttctcatactagataattgactttgcagttattcataagttttttcaaagttatatgttatttgtgccaactcaagtggttggttgcgtgagtgtgttacccaaattcccttaaaaaaaattaacactaacccttagagtttgatctagctttcctgcaagggcaagtaggaaggtggttttgccacagcctggtgggccaagaagaagtgtaagcctgcagccaccatataacaccatttatcacgagactcatacctcagattattaggaatctcttaatcatgtcttgaatggtatgatcagaagtttatgtaccttgaaggtttgatgataccactcacatcttttacaatacttatcttggattcttctgagttgcacagcactgcatttctaaccacctatttgacatgatcatcacaatctcatcacatagaatcagtcaaataataataataaaaaaaataagatggtgaaaattgaaaaaccatatacttactgataatacacttctcacaacagagttccataaggttggtagaggctttcctggaaccacctcacactctgcttctacacacagattcctatacctcacttccacacttggcaatgtcacattcactctaaacaagaagaagattattaatgaactatcatcatcatacgactgcttaagatatgtatacttgttcaaacactaaatatgaatgcatacaacagtaggattactaattatacctgtctattctctccttgagtttctgcaataatctgaggttgtcatgttctatgtgttttatgagcttgtcaatgaaaagatggcgttctgctgctccgagctttgtaacatcaaccattctcataccttcagcttcttttccctcatgatcaatatcaatcagtgaagttctaagccttttgaaagttggaagtctttcaatggcagcccacttcaaccgagcttcctcatcttcctcctctttaatcgaattggttgaaccaaagcctccaaatagtgacttcttgtgtctttcaattgagcttagctccatatcaaaccaatccactcaattcaacttgtgtgtgtttgtgtttgtgtgtgccttaactaagtttctgtaagagatttaaagagagattctaaatgtgaactaactgtactgtgttcaaacaacacactattaaatcaaataaaactaactttaagaaacataaatcatttactttattttcttgcctgttattttcctctgtagttgactaaaacaagaaaagagaaaagcaaaacaaggctatctttttttcccttccttttaatgcttttttttttttctttttcaaggaaccttcgagcaatatcatttctgatacacacaaaagagaaagaaaaaaagccattatcttcaatcataagtataatttggacttgattatctcttgctcttactaacttgaacacgtctttttgattggtagacattgacttagaacttcatttctagtaggtaaggacaaaagagtccgacccaaccaatcagctacttgctcttatataaatatatatatatatatataaaatataaaataaaaggcagtataaaacaatataaaggtcataatcattttggtgtgtagtgtatatgcttacacagctgaataaagtgaagataggcatatcaaaagctgtgtccaaaatcttagaatacttggccctacgtgctgtgtttctattataattaccgcattcatattattttcatcaaaatttatcttcattgactattttatagtgtagaaacaacaaatacattagattagtgtaaaacataaaagagagaaagagaaaaagagaaagagaaagaaagtatggaaaattcaaattagttgtaaataattattaaagatggctgtctacttttaaatgttgatgggaccactgtcactaggccatcaatcagatatggggggtgacgaagagggtcatgacataaacatttttggacgaagagggtcatcagtatgactcatcacatacattggtccacttccaactaaattatattagtccttttcttctattatactctttcaataattaaaaagaatcagtagacaaattatcgttacgtttaaatatttaatttaactcttagttataaaaatatttaagtttaatttttgacggtaatattatctaagttatgtttttggaacttatgtaggaacctgacccttaaatgttaagccattatccatgtattattttcttattggtacatttaaactttttttttaaaataaaaattaatgactttgactaattaaggattgctaggtgacaatttatttacacttaacattcaggtatctaaagatttaatgacctgaactaatcaaggatcgtcacatgataatttattaacacctaacggtgagatacctaaagatttaatgacctggaccaatcaatgattgacacgtaataatttacttaacacttaacaacaagtatttatagaagtttcaaaattataacttaagtattattaccgcaaaaacttaaacttaagtatttattgacaatcgaaagttaaatttaggta

SEQ ID NO: 193673 - DNA, 824 bp, Cannabis indica
gtacaaaatgtaaagaatatagtccataaaaggtttgtaatatgattcatcacaaaaccaaaagtgtagatattttttggattttgtctttgaattctattgttttgttttacgtttgattggcaattggagttttgtagggtgtttcccttgatttgtacatatttgttttggcattaataaaattcttccttacacgtaaataaataaatatataaataaataaataaataaaaacttccaccaaagtgaaaagagctactcaagagctaaaaaaatcattgagcaaagcctttgccaaaataaggtttttgaatacaacttgaatattaggagcaaaaaataaaactcacaacatcaaaatatttacataactctctaatatcattaagaattaaacacaaaaacgaatataaaactataaacatattaaatttatgaagtaaactttggcaatcaaattcgaactgaatgttgtaatttctaagagagatttgcattgcaaaaaatgctttccactttttctcacacagcgtattttttctgagggcactcttaatacttagcacctttataaaatgtaatatcgttattgaaggaaaacaatatccaatcttacttattttaatttaataaaaattatacaaaatcataactatatgatctgttcttctcattaagtgggaaaatatagattctgatgaattctacccttcttagaacacatgcagctgcattaatccattttgtatgatataaatattgccttttaattttgaattaatgaactgttctatcattctccctctcaaaaaaaaaaaaaa

SEQ ID NO: 193674 - DNA, 2104 bp, Cannabis indica
tttcttttcatatttttcaattttagaatgtagaaaaacatcatttaaaaataagtggaaaaggaaaagtaattaaatttatatatttttcacgaacatcctcaataattgtattctttaaaatatcaaaaactttaatcacataaaaatataatattttattcaatcaacattttttattcaaaaatgttctaatagtactttaaaaatattataataatataaaaaatataaagaatttgacattgacattttttttccactctaataatagggtatcaattaaaaggcgccagaaatatatttatgtccaagtattttttaaaacatctctattgaaaatgctttgaagtgctttaaaatgcccttttaaaaattaatttaatttacttttttactatttttcacacgctcttgccgttctacataatcaatttagtttggttgccattcaatgtttcctgtcatagaacatttgaagagatgcacaagtttgtcaaactctactttctctttcattcctttaatcccaagtaaaataaaattctttactaagattaaactgacaacttcaagtttatacttttctccaagagactaaatgtagtaagagggccttcaattactgaaatataaagagtacatgaagaacactcatttgatcatcgaccaacaaactgtataatactgtaactgcagtacatttaactcaactcaaccccatcatcacatcacatatcgtagtagttttaggtaagactttttataatctgatgccctttgcaacaaaacaagagagaaaggaagaaaaaaaatatagcagaaaatgaaacaaagcaaagaagatcactatcattttttagagaggttcaagctgcaagctaagctataccgacacgactggctttttggcctgtcaaagagaaagaaagaaaccaagcatctgagaactatacaaccatagctgtattatgtacctcttgtgttcccatgggaatattccctatttaatatacttcttacctacaaagccaaacaacatgccaagttaaaaaccaaagccactgcttttgactattaaatcaggagacaacctgggtatccgcagactcggatgagcctccagctgagcctggaatgttcttcagtttcaatgatgcacagtgatctgatgacccaggttcagaaacatcgccaatatccaaagtatctggaagactctcagaagactcgatcgtttgaaactataaaaaacaggaaacatgtacctctcaagaaaatgcctagaatataaaatatatgaattaatttggaaaagataaaagatttcaggataaatcataatatttaccgagcactttcttgaaacctatccaaattttaatgatactactatactacccagggtaaccaagacacagggattaaaaataataataaataaataaaagaagacagaaaaggaaaaaaaataatctagaaaagcagtgtgcctcgggcataattttcatgtgctggcacaacagatgctcacattaccattaggataatgttgtctatcaaaacttaaaaaccaatttgtacttttagctgaaaaaaaagacacactatgtattagcaaattctctcaggattcatttggtatgcagtattactactgtatagtatttttatttaaaactatttgtgatattaacttttatggatacttaaatatataatgttttagtataaactaaagtttaacatagtgttatataaaaacataatatgtaatccaatttaatataatacaatacaatacgacctaatatgacattccaaacgagccctatggattagcctacacaattatcacccattatgaaaagctttataatgacaaaaagccttctaatgaatgagtaaaaatatgttttaagccttttgattggtaaaaatatgttcttagactttcaattggttaaaatacgttttacgccttataagtaaaactatgtccaaaaccttctaacatggctaaaacaaacttatttcaaacttcgtgcagaataaggtggtgagggagatagaatagctcgcaatcaaaaggtcaaacgaaaag

SEQ ID NO: 193675 - DNA, 1381 bp, Cannabis indica
taatgtatcagtaagtgtagttagaaatgtatttgtaaaatgtactacatataacgaaagtaattccaatgacgtgaagttggaaactaagatagcatacatgtaaacactcgtaataatactaagttgataacactcaacccaccatctgtaacaaccaaatgaaggactgaactgacaaacttagattcctaatagaaacacaggataggtacttgggttgaattttagcctgaatgaaaatcaactgtgtccattgattgaacatttggcccggaggttgagtgaccctgagggatgtcattcaaaactgaagttccggcctgccagacaaggttggtggaagtttctttagctaatggaccaacgatagcaaagatagtcatctcacctttggtatattctgcagagatgtttgaaacttgaaagctgagagaacttggctgcatagaagggctgtaactggttatggctgttggataggcagtcatggtcccgttagaattttgaaaggcgacaatggcctgtgatccaaccatgccttttccagttgggtttatagcccaagcaatccatcctgtagattcttgagcggctctataagcaacatggacacttttggtggatggtatgtagttccagtggaggtgtgcttgtaacattggaaggtccttgcaagaatcgaatagtttgttgtctgagaaggtatgatttgagcaggtttgagctaaagtagtaagcagttgagggacaagaagcaagatcattaagaattgtcttgtaattgtagccatttctaggagttgtgtttaactaaaagattggccgagagatctagaatcagagattgtttgttaagagaaggctcttgtgactgtagtgatgaactatatattttactctgctgaattatgctgagttttaatgagaggaaatcatagaaaacttggggagtttttataagagaagaggttgaggtttataatacaaataaacttgacattgttataagctagtttaatcttgtataggaatctcttctgacataccatgcaacttctttttccaacctaccaccaatgtaagacaacctcattcgaggaatgatgttatttggtaaaccaacaaggacttcattcaaatgttgcctcaagtgaaaataaatatcttaataatactaataataaaaaaaaataaaattcatggacatattgctctttaatttgtaagttctctaagtaaataagtctagcatgagtagtctctcacgctgtactggtttaagttcaactttgggtcaaactatatatttaaatattcttcagacttatcccgaccaaatacaattacttgttcgaatttgtgataatgataaaaaagg

SEQ ID NO: 193676 - DNA, 1774 bp, Cannabis indica
tttttttttttaagttattttttcaaaatatctcatactaatgtagtaagtgcaacacttatttttctcatgtaggacttggttgatacccccaataactttttaaatttagatttaaatatatatacatatgctttcattttttttagtaatatatgcgttgtcttaaaataagtctctcatgttgatttctagttaatgtttttaaatttaatcattttgatactaattttaaatttgattttaactagttaattttaaagttaatcataatcatactaatgaaagtatatacttttcttacttgccttctctaatagaagatacaagggatctatttcaatgaactatattgagaaaacgaaacgcaatttcatttttcttttccacgtcaatgaatgttaaaaattcattgaatactgcatgagctggctcagactcaaaaataatttttaaaagaaaattgtcaaatagtgggaaaccacgaaaaaaggagtatagtacagggtgtactgtggtcctactacataatattacgtttaagtgctcttatcatatcaaacatttatatatgataaggagtatgggataagagggtgagattatcacttcatggtcatgatcaactcagtactatatatcatatgtatttgactatttgtctttgttgtttataagatgcattttaatgtaatgaatatcccaaaccaaactactgtacgtgtggctgtcaccttcgtcttctctttcaaataataaataatctgataagatatataattctacatttcaatttctttttatctataattaaaccctatttttcttggtcatacataaggtgggtgggaatttgttgaaatctttggggtagttattgaattcattcacacccgcccttaatatatatatatatatatatatttatatatatatttttttttatatatataaatcatatattttctcgacttattagttgtgatctcaatcatgacaaattctccaaacctacacaaagttttcatatacataaaaattgttagtcatatccatatgagttttcaatagtaggaaaccaatcatgcaatccttaaattacacctaatctattggaatttagcatatgataatggttaaaattaaatactattaaaaatacatcatccattaatgttttgcttactaaagattcaattttaacttcaaaaatgtttcaaaatagtttttattccaaaacatttgagaaccatcattttcgaaatatgcatattaattacttttagagcgggtatataacaaatttttatttttaatttattaaactaagaattcatagtttaacatcattgtgatgataagccggcatataatctagtaatactatatgttttttatttacattgagaatattgtttcttatttaagatttaattttttcattaatagttttttttagatatatatatttaaatctctatatatatattttgaaagggattatttcacaaatacacaaaaatataaaaaaaattacaaaattacagttttacggaattttaaatatttttacgatttttttatttatttactagaaatacggtctttttatgttgtctcttgttaatttattgttatctgtatgttattttttgttattattttaatgttaattagattttattttgtatgttacttttgtgtagttttattgttgttttctatgttatttctatgaaaaattgtaaaaatgtcaaaaaaaaaaataataaat

SEQ ID NO: 193677 - DNA, 1338 bp, Cannabis indica
ccctaaattttgaaaataattacaaatttgcttattctataattaaatactaatttttaatgattttattcttatggggtaaatttttgggtaaatattatttgggcttgtgttttgtaaaaattattaattagatcttctattttattaattgataaaatgaactctgtatttttttcaaaatagtacaaatagaagcatcataaatcctaatagcaatactcataaaaataaataggatttttgcctttcaattatgattcttatagaattttatcctatgaattttttaattttttttgtaaaatatttcccacaactttgaaaataattacaaatttgcttattctattgcattttgttcatgtttgcaaacaatttcttgatgtaagactaatttatagtaatttaagagtccaaataataaataattaaataaatagtattaatattctaagttgtagccgattagcataagttatttaaagggatattgacggtaaatttatttatactttatatcttttaacaattaactactgttagctattctccttccgtctaaaaaactatgttaagtgtcatagtgtacacatatacatttgtgtacactgtggcatgttcaccgtgtatttaatatagtctttttagacggaaggagtaaataattaacagaaagaaaatttaggtagttttactataaaaaaaaaatcaattcagttagttaattgttaaaaaatctaaaacacaagtaattttacccctaatatctcttatttatataaactcttctactttattcatatcccgtagtctgtggtaacatctatagattatatcaaaaagagatgcaacaaaagagaaaaattataattacttttaaatttttttttttttgaagataattatttttatagtttcaagtgatttttttttttaaaaaaaaacaataatttaagacacaaaatcctacatatgtgatgattgtgggcgtaaaaatcctatttattacatataaataataaagggtaaatatcattttggaccctgtgttttgcaaaagttatagattgaaccctgtattttgttaaatgataaaatggaccttatattttttaaaatagtaaaaataggaccctgagttcaatttttgacaacttttttttaatacaaccaacttgaagacatgcttaataagaacagatacaaaaaatgtaaacagttttgtcatagcacttttaaatcggattaaaattaaactttattttgacaaaaaatcaattcaaggtcctatttgtactattttaaaaaatacagggtccattttatcatttaaca

SEQ ID NO: 193678 - DNA, 1988 bp, Cannabis indica
gtaatgatggagtctgggtagtatcgaaaaagaaaatcactttttgctgctgtgtaatatataggtttgcagttatgttctgtaattttggtgtaaaatttccctgttattttatattttaaactcattagtactagttttcctcaaatggttggtttttaaaggcaaagcagatttttctttcatctccgtttctctcagaaatgtgaacggatacataacaatgaacaagtgcagcaaaagaacagcaaaattgtgaagtagaaaatgttttgaagcaagataaaaataatttcgatgtaatagaggagaggaacaagaatactgcacatgcatatcagcatagcatgttttgaacaatgttgagtaagattgatttcagtattttgttcataagggattgggacatgttctctcttgtcactttgttctttgacgacgcagagttgtcaaagacgaacctgggttcttttctacattcacttgcataactttttccaatatcaatgaatgaatatcacttgattcgtgttcctgaattgggtgttatgtgttgatgacgtattttgtttgtttttctccaggctgcgtatactgttggggggcattctttcagtgcagcagctattgagtatgtaatattgaagatgaaaccgcctcttcatcggccacaaattgtacgaatctattctattgatctattgtgtatgtttatcttctcatggctatgtacatcccctgattcacatttgcggtgaaaaaatttaggcattacttcttgcccttcacaaggtgaaggtgtctgaagagcaaaaaaagtctgcaatgagttcccatgaaccgctcgtatcttttgctttgagctgtggaatgtactcttcgcccgcggtaggccaaatagtacctttatacttcttactttggactttttatcattctttttccaatgaatgaaactatatcatcatgtggttgttgatttcaaatgtataggtaaggatctacacagcaagaaacgtaagggaagagcttgaagaagcacaacgagatttcattcgagcttcagttggaattagtagcaaagggagattgttagtcccaaaaatgttgcattgctttgccaaaggatttgttgatgataccaatctggctgtatggatatctcactatctcccaccccatcaggctgcatttgttgagcaatgcatatcgcagaggcgccaaagtcttcttggttctcgcaactgtggcattcttccctttgattcacgcttccgatatctattcctgcctgacaaagttcctctgtaatgattatctgacttaatttgttacaccacatgccatatcttgtgttgttccaacaagttgggacgatagaaatcgagcttcaacgatttttggtcttttgccttgtagaccagatgtataaatccctaaaagaaagggtcttgtacatttttgttgatgcataactggttttgtaactaatgatgtttactgactgactggtttttattcaagctttgtgaaataagagtgttctaaatactacacagaattttattaatgttgtcaatattttattatacataaattggtaagtactaatttaactgttattcttacactaactcatataatataaaatttatattatccttagaaaatgattctagcgatttctttaaatcattacctctaggtacaaaagaaattatgaattggtagtaggagaaatagatagaaactaatattaaatatttttttgttgtgttgatttgaaattgggttaactgacagcggagttttattaattgctgataatcactacgtgtaaatagaggttcgatctccttaggataatgatctattccttttttaattgtattgattctaataccttgcagattacaggttaaaactttgtaatttctagctatgactctcttcaatattatagtactgagaattgagtgttacaaatt

SEQ ID NO: 193679 - DNA, 2728 bp, Cannabis indica
agtttttgataagtgaaatttttaatgagttagttattataaacattcaatgacatatgtaaataataattaccattaatggaaaatactatttacatatttatatcaggatcattttttaatgggtattatccatgaattgttatcaaacaaatttaactataaatattaattttaaaaatattaaatcatcaaattttgatctaataacgaataataaaaaagaaatttgattttttatgcttagtctaagtacttaattaaaaaaaatataaaaaaaatatcaccttttatactaaatcagaaatatgttcgtataaaaatatttaagtgaaactcaacttttacttttttttttttctcttttactttctttttctctctttatttacaccttcttcttttccttcataagagttttataacaaacaaaattgatttgactgatggtgatgaatagaccaaaaatgataatgacatagcaatttgcgtaaaagcaattgcaacaaatcgttaaattcgtattcaatccgaccatgacgacttttaacgaaggagtcgcatagttagaatgggtatacccgtgcgtatgtgataccaatccgtccctccagtccagaaaggcagaatccaaatatctcagattcgcacttgtgctgtgccaaagtgccattaggccactcccattaccatacacacacacacacacacagggtggtccaattcttgaattaaacttattaaatctcacaacagccaattccaattccaaatccaatttcaattctttaataacacacactgattaaaaccccaggtacgtaaaaccatctcaatttttcacgttcaatttcgatattcaaacttgttctgaatctttaaacatttgtgtttggaacttttcttttctttttcgaatattctaagcgtgaaaattctccatatcattgcagctattttttttgttaatattcttattctaatattaataataagaagatggagaaatccaatacttgttcaagaaagcatcgacccttgaacctgttgagactagtaaggggtttgatatgtttagtggtgtttgtatcaactgctttcatattccttgtctactttgcccctccattagctgtaatcttgaggtttttaagcattcgatggagtagaaaagacatctttgcgttcagtctttggctggctttgtggccttttctgtttgagaagataaacagaacaaaggttgtgttctatggagatactgttccatcaaaggaacgagttatggtcattgctaatcataggactgaggttgattggatgtacctatgggatctagcattgagaaaagggtgccttggccatatcaagtatgtcctcaaagacagcctcatgaaattgcctgtgtttggttggggatttcatgttttggagtttgttcctctacagagaaagtgggaatctgatgaacctgttttgcgccaaatgctttccacttttactgatgctcaagatccattatggctagctattttcccggaaggaactgattttacgtattacccctttctttctttttaatttactcttaatttcttttttgtcttttcttcttctttctgggatctaaatctttcctatctttgaatacaatcttgagtcttgatctagatattggttggagacataataatatattgttattaacttaattacctttacttgtttacaaagcataataacttgtagttgcttgacttctaatacagtgaacaaaaatgcaagaaccgtcagaattttgctgcacaagttggacttcctgtgttgtacaatgttctactccccaaaacaaaaggtttttgcgtttgcttagaggtcttaaggggttccttggatgcaggtgatttgttttctattttatattaaaaagaaaaaacaattacaacaaatcaattatggtcttaatcacctcactaaaatatcacatatatttgagatttggataacaggatctaatcatatttggtgcatggttactaatcaaatagcctccctctgtccatttcttttaaacatcatgacaaggacaatcttttttctttttctttatttgggtttaaacttattcttctcaatttgattgctgcagtttatgatgtgactattgcctacaagaataattgcccttctttcttagacaatgtgtttgggttagatccttcagaagttcatatccatgttaggcgtatcccagttacagatatcccatcatctgaggccgattccagtgcttggctaattgattcattccatcttaaggacaagttactctcaaatttcaagattcagagccatttccctgacccagtttcacaagaggaactttcttctttcaagtgcttggcaaatttcatgcttgtaattttttgactgtcgtatttggttaccttaccttttcatttctttggtccaaaatctacatttttttatcttgtgcataccttgcttcggctactaatctgaacattcggcctaagccatttctaggctctattagagctttgttttgtttcaagacaaacaagaaatgactatatacttatcgatgaagtaaaagatagccaaataaactacatatcttgtttgttttcttttttctttctttcttttttttttttttagttttttttttgttttttttatgtatcgtacgtaactactattagtt

SEQ ID NO: 193680 - DNA, 4827 bp, Cannabis indica
tttatacactattattggagttcactttaatgaagatagactaaaatttacatataaaccactagctctatattggagatgttcttaatatgtacatatatttattcacttaaatttttttttttcaattataaataatttttaaagttttttttttacttattgtgcatcgtttaggtgaggttttcgtaatttatttgttcttttatattttttcaaactaaataagattattaatttgtattttttttatgttggaagttgtgtgttttattttatttgtaccgattattaagtttttatcctttttttaaagctcacatatttccccatttctcaaaaaatctctcattttttactttattctcttttttaaaatatttttttaactctcttctacaaatttttaccttcctttttctcctttgttttttttccattttttttttacttttttttaaaaaaaatttcatcatatttagtaaatatataatagtgtagaggattgtacgagcatacatatgctattaatttttttttgttgttattctttttttttaataaattttagttaattattattttttcctcttaactttacctattaatcgatgatagtagagcaaagcacatagacttacaattacacaagacgactgatgatcttagtttcaataaatgaacctattcacactatgtcatcgcttaaacataattttttaaacttaattcatgaaagtaaaatatatatgattatactcatggattttgaggggagttaggtacatgtggtacgtccttcatacctagtatatatgtatatataattgtacaatgtacaatctatattgatataaatagatgtgaaaatttctctagtagactcttataaagggtcgttactcttattaagggtcgttcttgtagactctttatttgtttcgacatttataattaatttttaatctgattattttatgattgcgtatgttgtagctatttaggacaacttgtaaattttaatcaaattttaaattgtttatagtactaaaaattaggtttgaaaaattacttaccacgcatataaaaaaaatagttactcgtccaacaaaatatttcaactttattatcggcattgtaaactattttggatttcctaaaaaatttatagattgccttaaataactataacatacacgatcatgaaattttttttgacttaaaagtttttttgtatgtagaaacagatagagggtctatcgaaacacttttttagggagtgtactatagacttactcaatagtcatactaatttggagctagttttatcagtatatagtaaatagtataggaaatctctatagtagaccttcctaaaggatcgttttggtagactcccctcagttctcggcgtgggtcgtgccttctctataacaccgcccgtctggaggctggaggcatgggagtcagcttcctccataaataagtcgaatggagttttcttgttggtgttcttttgagtattcaccatagtcgaagtgaggcagcaactaataaactttcctcagctctcaataaatgtaccaaaatatttactgagattttcaaaaactgattattaaaagcttaaggaaaatgcaaaacaataaatattagacaaattgatttttgacgtggttcgggcattaataatccctagtccacgagttagttgtatcagccttgtcgagagtatctgagtattataagtgtttacaatggtaactttgtattcctcttatttctcttaaaaaaagaaagctctctaggaactttaatagtgattttctaagtaaaaaattgttcacccttttgtacatgaaaaataagggtatttataggcacacatgtgggtaagggaataccctttacctacctacggttctttactcaacacaccacaaaggaaaatattccaacaagaccatctgatcgttggtttggtaggtaggtttctaattgtgtggtgctcgatcagtgcaagatattttgtaagggtctttacatgcatcgttcaaaggtttctcaacgttggacaataagcactacagaagcacgtacgcgcactaccacgatctgacgcacgagacaaaatttgatttggtgtcggaagatatgcaacttttgggtttaactctagaatagatatcatgaagatccaagaaaggttaggctaatatcttccttaaccaactaatgtgctatcatgatggagcatccgcgacttcgcttacttccagtagcaacatgatagatgagaattgtgaaaccattcccacctttgctagaaaggagggctttcgggtatcatagcaccttctgtaatcctggcagagggcagaaacaaggtaacagtatttaatccgacatggcactcttctatgatttccacgtacaacccatccagaaataaggataacacatcacatctagattatgatataaaaccaaatgcttccattattcgagcttaaaaaatattgacttcttctttcatggcccctaaggttcatttgtaacaacgtaacttttctcacaccgacattttcttttctttgaagtcacttttttctttcaaaggtggaattgaaccttattcaacttttctaacaattctttgccttgcaaaggtgatggtggcatttaaaattccttattaccgtcgaatgcttttttctaagtcctaaatatatatttgattggcaaaaacctttagtatcccatataactcattttattcgagtgctttaaccacgtagaacatgttttctcgtcacaaattgggcattcattgtaccctttcacattgtatctagaaagatttctaaaagctgtaaattcattaatggtccacagtaatatggccttaagattgaattctttgttcctaaagtcatcatatgcaagaatactctcataccacaattgactgaaatcatcaactagatgggctaagtacacatcaatgtcattaccaagctgtgaagggactgatatcaacagtgtaagcatagtgaacttccacttcattaccaaccaaggcgaaaaattatacgttataaataaaactggccagcaactatacctactgctaagggtagtatgtagattgattctattcacacaaaactaagacgcatattcctaggttcattgtcaaattcaagccacctagcataaattattttctaagcgggagagtcaactggatgtctcatcttaccatctaattttctatcactggcatgccaagtcaaattttctacatgagacatttcaaaataaccgaactaaatgaggtattgggggtaagtaccataatacctttgtaggggcacaaatctttacctcgtcagaattctttttcttttgccacctagactcaccacacatgggacacgatattgcgtctacaaacttctaacgatataggatgcaatcatcacgacaagtatttattttttcatatttcatgcttaaggaagatagtgtcttcttctcctcgtagaaagacaaaagcatcgtattaccttcaggtaataactctactagaaaagctaataaatccaaaaagcccttatcaacccactcgtgtttggcttttatattgtataatctaacaagttttgataatttattaaacctattacaattagggtaaataggcttctcagcatcctttactagactaaaatttcaatggatcagcattttattcaaattttgcatctcctatcatttctagaatgtgatcattctcataatccaaattaatatccttaaccttcttagacttagacatttcctcgcccgaaactctaatcttttccccgcggtgaagctaaatcttataactcttgtttattctgttcctaaatatatgctcctttgtcttagtaatattaatactctccatgttaacacatttaagccaaggacaaagaaacaacttaggattttttacattcctctgataaaatttcaagaaatggtcaacaccttttttatactccactgataatctatttgcactcatctaatttttatccatttcaaaacttttaaaaaactatattcaaatattatttgtttgaataagtgtagtaattaattagtaaaattaattaccacacatatataaattttatcctaatacttatgtatttttagtgatatttatctaattctaccaaagttttggcagcataacgactataatcaggcgttctcaaaaattctaaataaccaaaaaaaaaaaaataaagaaacaaaacacacaaacattactaaataaaaactaacattaaaattaaaaagtaatctacccatccagccacagtaatgtattcgcagacctagctcagtatcgatgaatatttaagatactcaaactcatctaacatgcatattctacccattcgactgtactacaattaatagtaaaatctacttcactaggataaatatctaagatattataactctactaaataaagaatggaaaagttttagtgattatatatttctccaataaagctagctacttttgcgttcttcaatcaataccaaaagctcgatacctataaatgattaaaaataatgacatagattaaattttaaattttataactattatcaacttgtattgatatatatatataaactaaaagtacatatatattatcgagaataaggagcttttctcgaaagaccaccgaaaaataaggaggagctcaaccaagtttggtaacagctaaaatagtaaatgatggacaaaaaaaaaaaaaa

SEQ ID NO: 193681 - DNA, 2498 bp, Cannabis indica
aaaaagaaaaagaaaaaatggcagtgataatagttggagcaggaccttctggactggccatggcgggttgtctaacccaactatcaatcccatacatccttctagaaagagaagactgtttcgcttccctctggaaaaaatacgcctacgacagactccatctccatctcaaaaaacaagtctgtgagcttcctcacatgcctttcccttccaatttccctcgctacgttcccaaacaccttttccttcaatacttacacgattacgtttctcgatttcaaatccaacccctttatcatcgcaccgtcgaatcagctttctacgatcaggatttaaaaaagtggaaagtgaaagccagagttaacggtaacggcgaagatgttgttgaggaatataacggaaggtttttggttgtggctagtggtgaaacggcggagccttatgtgccggaagttaaagggttgaggagttttcctgggaagattcttcactcgactgggtacaaatctgggaaagagtttagagagaagaaggttttggttgttggatctggtaattctggtatggagatttctcttgatcttgctaatcatggtgctaacacttctcttatcgttcgaagcccggtatgtttttttcttcttaattttttatagattaatcttagtgtattcccaaattagtaaattatttgatttttttaaaaaaaattacatattgatttattatatatagtagtttttatttttgttattatctttttattagtaattagatatataattttagaaatattaggaactaaatattaaattatgtagtgctactggcatcattccttattgggtaaagtgtacgtacaaaaattcttcatttttttttttggattttttttacttttaataagtttatattacataactaatataaaaaattattatcataacaatattattgccaaacatgaattttttgtccaaaaaaatatatattaagcatatataaaataattatacgaattgatttaatttgactgaaatatctaaaattgtgactgaactaaaaaaattttaaacgatttggaataaccaaatcattcatactggattcatttggttcagtctttagtccagattggttaagatttaaaactacaaattacgaattatatgaacacccctactcataaagtgtataccggtgacccaattaaagctggatgaactataagacccctataactagtaagtgctcactaagtttgtcaaagctactaaaaaaatgaggaggagataggtgatccctttcattgttaagaaaaaaaacattagtactctgtctagttatctcattaatttcataaatatttttaaagccaatttacaatatatgcttagatcatgatgagatatgtttaatttgtactttacttgatgctctgtcttaaggtagtgactagttttcctcaatactcgtttgagttgaaaaaaactttcagtgatgatcgaataagctctattgtttgagctataaaatgtacagattttgaacacaaattttgatttttaatgtggaaaactttatgaggatagttgccttgtattaaattaaatttagcaatttattgacttaataataattgtatcgtgagtaaatgatatttttatttattatggaatgtatgtaggttcattttgtgtcaaaggagatacttaatttaggggtgtttttggctcggtatttaccctttaaaatggtggaatctttagtggtgtggcttagtaagttagtgtatggagatttaaccaagtttggtataaaaagaccttctgaaggcccttttactatgaaggccaaatatggtaaatttccgattattgatctcggaacatgtcgtaaaatcaagtccggccaaattcaggtacattacatgtttcgagaaaatttaattcattttttttatatgatggtatatattataattatagtatatgtaattttgattttttttaataatttttttaataccaaaaattaaattcgaacacccattgaaaagaaataaagaaaaaatgcaaagaaaatagattattttatattgataacctactcagaaattctctaataaaatcatattgaaaaatacttttgtttttgacaatgtccaataccaaactttgatgtggaaagtttttggcactatataatttcttttttctcctccactccacacctttatttattttcacttattcattcaaataaatttatatatctttaatttatatttttttactactataaagtatatgaaaaatcatatttagaccatattaattgaaatataaaccacacatatatggtttggtagtgaatatcttatataggtctaataattcatctatatagatctagaaaaaagctagtactaagtttacaattaattgagtaactcaataataatttctaaactacacatatgtttggagtaggtattg

SEQ ID NO: 193682 - DNA, 1074 bp, Cannabis indica
ataaaagaaatttttaaataatttatgtttgtttttcagtacatatacgaatagttaatttttaatatttttttctctaaataatatttaaaaaataaattattttatattttattaaacagtctaatcgaacacatttttttatgaaataatttcgattatgtgttggttgtaaatttagcaaaaagaaattatgttatgcttttgagagatttgctcaatattaatgaaatttcattaatcaaacaaaacatatcaagtccacgtgtattaataatttatatgtgtatgtatatgtaatatatatattgagctaatatggcaaaacacacatatataaatttatataaataaatactagctaaagggtagtatctttatctagttctcctttgcttttagttaggttttcctttcctttttgtagttgagttttagattaattcaattaagtattttaatctgagtttagcctattatttttaattcaaaaattatttcttctaatacttattattttttgacgttgttttgttatttttttaagtaatatttcagtactataagccgaaactttggctctttagggaggactcaattaggcttactaattagtgaggtttatttagattcattttctttggtaagagctatcaacaaaggaatgttattttttaataagttgggtgtaatgtttgagaatgttataattttattgtaacttttagaaataattttgtctcatatgacttgcgataagaattctacaactcatagttttacaaaacatgtcctttaattaaacgatgaactattataattagagaaactaattataaattgatgcatagagaatctattaataatacatcaaataaatagataaaaacatttatataatgtggtgagcatgaaatcttattcttatatataaacgtatttcaagaaaagaccatttgaatataattgattttgatgggataacacttatcacattttgcctcctcaaatttcctgaaatttctactgtttaactctctaatcgattttggtaccctaaattatttaaaaaaa

SEQ ID NO: 193683 - DNA, 2320 bp, Cannabis indica
ctgggagcaacaccgtaagagaatatgaactcatgtacactcgattagtatcgagcgctgagagccgtacacgtatcttcccaatcctaagatctttaccctgtttccccgcttcgtcgcgcttgtaccttccattgtcaaaaacaccaatggtgagtacggtacaagggtcgtaaacgtcccaagtgtactgctcgttccagcgtggattaaagcggtccaggatagtacgggtgcggacccacttcggtccgtatttggccaccacgtaagcgtctgtagtgccacgtgtgccgtctttggtcttgacgggtaagagattagtggcacctcgtatcccaacttctaataatccaatcggagctttggataattgtttagcagcggctctcacatcgctggtcacgtgcgccgcttcgtcgagcacgtgatacccaccctccaagccaaacccgcacgtgaattctgccagcgtagggctgtgatttctcatctgctccaaccagattaaaccacctggacttgggttcggctctatcgtccgtacgcttctcaatactcgccacgtgtatcttgacgtgtccaactgattgtgcgtgcgtggcatcgtcgaccgtaaccaccaaaaacggctcaaacggctcggctgctacaaacattagatcttcattccacgtgggactggatgaccccaccgaagcacgactggtcttgaaaagctgggctccaagctgagctttgacgtacacgtcagcacctatgcccctgatgactttagcttcgggtccacccgaaccaagctgcaaatcctgggtttggatgaccgttagcctcaaataccaaagcttcggagacaagtaaaccttggctcgggtctccggtatcaagccacctgaatcggactgccaagcctcctgaaaagcctcatcggcctgagttccgatccagacggcaagcatgacgtcatttcccggcgaagtctccgattcgagagtgtaccattggggagcgaggggactatctggtggcacacgcttggggatctcttgaagatcaaacgacaccgttcctaaagagctttcggtaacggtaacggtggtaacggtcttgtcgttttctgtcgtttctttcttcatttcttcttctgtccaaacagagacttcgagattggttgagttgagtccgtctttgtcgaaagcgaagacttgatcccaatctttgtcggagctctgttttttggttttgatcgagtgagttccgatcacgagtttggcgtaagctgaggaattagctgataaagctttgggctttgctttcagaactcgaacgtagagaaagggcattcgttcgacgaggtcgtaagcgctgtgacttcggtcactggctatggaacgaagcttgtgatccattacagtcaaagtcccaccaccattaatttccgaagacgaagtcgttttctgatctttgcttatctgactaatctgtttggaactcgtatcgatttgagctattgctggtttttctacctcagctggcggaggaggcggtggcgccagcacagcaacatcagtagtggctttggcttccgccggtgctttctgatcagactctgttttggaatccttcttctcatcctttttgggttcctctgttttaacttcctcttcttttttagcttcctcggtcgctggttttgtctcttctgcctgcggagcttcttgcttagtctccggcggcggtggaggcggaggattctcatcgacgtagtaaatcttcaaaccgacttcccctttgatctgagaaaacacacttctcttctctaaaggatagtaaacgagtggaacatcgtcggatttgggaaggaaagtggagccggagatcttgactttgccgagaaaagtactctttttgccactctttttgtggtcgttgtagagattgatctcgagggtttcggtgggcatggcttctgaatcgtggactatgaattcgagggtctcgtcccagtgagggttgagatctctgaactgggttttggtccggcgtctctggccgtcgaagtcgaccatggcgtaggcactggcggtgccttggccgtctttgggcatcagattcttggcgttggttacctccacgaacagcttccgacaagaagacgttggttccgccattgtcgtcgttttgattgggtgaagctgtgatttttgtgttggttgttttatttatgtatttattttttggttttatgaaatatgatgaaggtgaaattgagagagaagagagatatagtgagtgagtagtactagtgagatagatagta

SEQ ID NO: 193684 - DNA, 843 bp, Cannabis indica
aagaatgtgaattatctcttgatttatattgtcacaggtttgcccatatgtatgtataagaatataattaagcctacactatgcatatatgcatattcataaatctatatagatagatatctaaatgggcacatgtatatcaaatgaagaaatgaatacaagaaccaaccgagatcaacgtgaaattagcccttcaatagaatccacgaaattaacttcatattaagttcatctatacaaaataacaaaggagaccgacggaaattcataataattataatgaatacaaaatctagagagcaatttctatgaatatgtttcctaaagcacgcccaatcgaagaaacctaagagtcaacagagttagagacgaagataaaataaagaatacctgaggaagttgataggaatcggcatggcggagaaggaaggctagagaagtgagaggttttggataaaggaaaggaagtaaatgtaatcggtgcagatgaagttgcaattgaattagaaaattgaggtgaattggaaggaagataaggaagacgataagctgagcagcagagcttgctacggttggcaatcagttgtctcaacagcagtgctgggtttctccccatctctctcctcttttcttactgcctgccttagggtttgatgtttaaccaccgttttatgcctacgtcctcaatttaacacaagcgtttggtaggggcggcctatttagggaaatttgctaagcatacttaaaaatttaacaaatctcttaatataacatatttaaataaatacactaatattctttaaaaaacagatatccataatgaccctaataaaatacctcata

SEQ ID NO: 193685 - DNA, 1532 bp, Cannabis indica
ctccattaggagttggtctccgtaattacacatccccgcaatataaatttttatctctacacaaggtacatatgtttttcatatagggagtgtttttgtggtagtttctcttaaaatgagatttttaactcttaattctttttgaattttcaacacttaaaatagttataattttattattttattaaattttatgatatagttaatttttcttaaaaaaaaattaattcaaagagttattataatattgaaaataagatacaaataatttatttataaatacgtgatgcagaatgattgataaactctaatctttccataaattattgaaaatatcatattatatgaaaaatagtgagatacttagtactataatgttagcatacaatgtcaagtattaaaattatactcaaatttttggccaaaaacacgatcagatatatataccaatagtcttctaaaattttgaggggtcataacaagaaataatgcctttccataataccaaaaaaatattataaaaaccgtaggataatattttttgaaacactagaaaaagtcatggcactgaagtattattgattattttaatacaatatataatgtacatttaaatgaacattatctttattagttatattttttcatttatatttatagtattattgattagtaatatatttaatagcaatatataatatttggagatatatcaacaacaaccacgatattatatattcttgacatttgcaccacaaacgtcacaaaaataatgtataatagtgacattttgttttttatgtacaactatagcttatcatttagccagttattgttatatatcataattatgtgatccccagttcgttcatgacatgcatggctagaaaaactagacatatctaaattaatatatatcataaatatttatttatttatatatctaagaacctcacttaattaaatgctcacaatcgaattttgggttttgattgttgactatagctagctatagaaagaaaaaatgagtactaaaaaagagagagtaattgttataccatttccagctcaaggccacgtgaaacccttggtgctcttttctcacaagcttgcccaacatggttttaaagtcacttttgtttacactgagtttgactataaccgaattatgagtgccatgaagagccatcgtgattatgatgatggtaatattgagttggtgtcaatcccagatggtctgaggccagagcacgatagagttgatcttggggatttaagtggagcaatcacgaaaagtttccctatagagattgaaaaactgataagagcatcgaaggagaagattaggtgtgtggtttcggatgtttatgttggctgtgcgttggaagtggcaactaagatgggtgttaaaacagctgcattttgtccttcttcggctgctcttcttctctacattttgcatataccaaagatggcacaccatgggatcttggatgtttccgatggtatgtatgcattattattattattat

SEQ ID NO: 193686 - DNA, 2915 bp, Cannabis indica
  modified_base (104)..(104): a, c, t, g, unknown or other
gaatcttgacaacagagtaggaggtgctagttggtagtatttctttagagagtgtattgtagaagccaccctatattattgtcgtttttttttttttttttaanattttagagtgtaattaatccaaccgaattggtgaatagtgattaattgagtagtggtaggttagtctgattattcattgagtttatatatggcattttgatttgatattttgtgggtgcaagggcccagagaattggcaataatgtgattaagaaaaagtagcaaaactagatagagtagtatcttgccatttttaatgtttccttttaaacaagagtatctaggaaggtgtcctcatgtggggttttcaatttattgttgtattattatttgaaaatttatatatttataggaagcttctttgataagggcatgctgtttggctttaacactactgtgtttggcagaggagaattttggaaggagggagaggagaaagaggagagcaaaactcttttgtttggtaagagggaaaataggaaggagaggatacatggagggatgagcttttcttcctaatcttgtgttttaggctatgtttggtaggatggatggagaatagagaggatgtagagttgatgaaggatgtagaataggagaaagggagagtgaaataacaattagtttaagttgtttggtagaaatgatggagtggtggaaggatggagagtatttatttttgaaatttttatattgtctttataaatattttttaattaatatattaagaggtataattgtaatttccgacaattgaagagggagagcatggatcctttcattagtggaaggatttctaaattggagatttggaaggtatttgctttccatcttgctttctcttccctcctcccatctctcttgccaaacaagaagaattattatcttctctcatctctctctatccacctctccctcttaccaaatattgtataaatgaatttacaaaaatatccttttaaaaggtatttttttattaatttacaacaactattatattacaaaaaattgtgaaaaaaatgacttaattataaaaacttatacaatttaaaaaatatacatatataatatttagaccaatgtaatatttgctaaattcttcataaatatatataatttattatatcttcttaaaaatggattatgaggtgattaaagtggctattaaggtctggcctttaatttttttttaatattattaatttaatgctcatgctagttattaatatctaatctttgatgaaaaaaaattgaaattattataatttaaaaaaatattaacaaagtatttatgattatataaaattgttatattaactaaatattttgtttatgataataatattattattaatgttcaaattattataatttatttttataaatttgtgtttattttataatgtattattataaaatatacgatttattataactataagttgtcttttttaaaaaataaacaaatatattttaaaataaataataaacaatttaatataataaacataatatttttatagtataactttttataaatatatatttattttaacaaaatatttaataaaaataataaacaataatgtattaataatttatataagtgtttatttaaaattaaaaaaaaaaacaatacaaataattttactaattattgatatgttttatatctatgattaatttatatggaatcatcctatatattatttcttaattttttttttctatttttacgttgttatatctaagtttttgatgagggacacgtggaatccaagtcaacatcaaagtcctacaagtgggtcccaaagaagataatttgggccaagctcaaattatataggaccttctaggaacatactttggctccgtgatcagatgatcttctgctagtgacaatctgtatccggaagtagctctagtactgtgatgccggaagagtcatacaacttgttcctagaagactagttcaatttttcttttttattcatgctcacaaataagaaaatagatgtttctcatatctcaatagaagatcgtattaggattgaccacatgatccttgctatggggagatctctaacgtaaaagagcagatactttgatgagagcttaaggattcataaacttagaagaagcttatgctcaagtttatggagtacttccagcaccttccaaagacataacaacaacccaaacttcgcagatgactactccatcaatttttcctttggcatctgccttcacaactcctaccatttatggaccaagtgcttctacatagctagctgcacaagttagttttttcaaattcagagcagtacaaatcggattcagtgccgctcttggacaatcgaagcaaaaagtagaagctccagagtccaatgtaagccaatcgcggagcaagaggagtttaaagggtccaagccgacatgattctacgaaaaaaggaaggacccaagagttaagatacttcgagtacacaagccttgtggatactcgagagaatgtttataagacaacttgtaatatggtccattacaagaagcctccgtcgatgtacaaggacagaagataaaaaaatgatccgaacaaaaggtgtgaatactatggtgatatagggcaaccaccaatgagtgtgactatctgagggatgaaatcgaaggattggtacaaaacggacgtttgtccaattgagtaagaataccaatcatttatcctggacaaggggttgcacacggacaattttttattcctagacagcatggagccattaatcctccaccgaaaccaccaacatgacaccatcccaccgaaaccctaatgcaaacatcactatcccactgatttttttctttttcttttcc

SEQ ID NO: 193687 - DNA, 4316 bp, Cannabis indica
ctcaactagatcatcttcacatcttctatttacacataattctcagtagggccctttattgatatcataaataagagggaggtagcttggtttggaccagttaataaataaaattacaaacagatatgaacccatcatggacttaaaatcacaatgcaaccgggggatgaaaaaattatcatattgcattatttccattggaataagaacaaaaaaaagcttctgggcaagataactaatcattacaaaagggtatatctctatctcccacccattggaactatataacaagcataatccagtttaacaatgccttggtggagcactcgcgataggtatactatctttgcacaaatacaaattaagagtcttgcggtgtctcgaatcttgttggagtatcgattcccatcatacagcagatgccagatactaggattataagcaaaacaataccctgcaagaatcacaaagtttaaacaccattagaatttactacaacaccgacaatggcaatatgaacctttgccaaagaaaaaaagagagaaatgattactacacagtttagcattgaattttactttgaaaacatatatagtggaaattatttgtcagaaactaataaaagattgtcatataaaattcaaaacttacaactagaagtccctccaaaagtgatgatttgatcttgcaaacttcaccacagattgtagaattggtgccttcagccaaaaatctttctacatcccgagataatggatactgaatagacttagaaggggttgaacatatagaactgcgtattttccacagactgatccatggaaccaacaagctcgccaaaagtttcagctgcacaattagtcaaaatatttggtaagacaacctcaaacaggactgtactatcacatagtccaaagtaagatacattgatacaatgtcataatcaaccgatcaatcaacaaacagatctactcaaacacaaattaccataccctcagaatgtgattgctgagcattatccagagagttagaatcttcatggcagaacacgaccacatctgcttccccattagctctcttttctgtccttgaactcaggtaatcctatatcattcattgaggcaaagaaaaaggcatcagatatttatcttacaccttaacattaacagtatacgatttcatataccatagtcaaatcacttacacgaacagactgcacatttgcaagtttattgaaatttccatctggtagagagcatgactctgagacaacaatattacccagattaatgttgtttccacaagtctcagtaactccttgtagcaaagaatcggccattgaatcctctgttgcagcaatgtaggggtatgcagtagagaaattagattttgtaaaggacacctacacaagagtgaagaacatggcatgctagctgttaaagaaattcccttgatatcgaaaaattggcaatagaataaccaaaaacaagtgggcaataatgcttttcttggttaccttgagaaagtccacaaaatctttgtcagcattggtgtttgcaaaaagatcagaagactgtagctgcagaaacgaaagtgaataatatcaacaacaacaacaacaatatacgcatacattgttctgtatccaatttcagcagcagttataaggtttatagattcagcaaacttgaggcccaaagacaatcttggtgatgggtgtattttgaattttggattagtatgtgtaatggacctgcgataaggggtatatatcttctaaattgttgaattatgtaaatgagaaattacacctttagttgttaataatacattgttctgtatctcctagtccataaactaaataagcagttttagtaagcaaaagaaggctttcaaatttcaaagctgaatttagtagatgggttaatagagtattagagagttaataataagatgatgatgataaaggagtaaagatctaatgtacctgtgaaccaacaaagataagagccagatccagagattgcttaacttggtcttctgagcactaaagaaaagaaaagaaaaacttaaaatttgaatcaacaagtggaaatgtcaatgattaaatccaataaactaactaaccagcaagtgtgaccatccaggttgggagaggagggactttgccagatcctttggagaaagagtctgataatttacagatgacgatgatggatgaaccctaagaatgtgacaatagttgaatatacaatacaattgggagaaatataaagagaaagagaaataatgattggattgataaggaaagataccgatgtgaagaccagaggaaagcagggacagttgaggaggatccagatggaatcaaagctgaaagaagtaagagcaacagcactgccataggcgccttcttcatcttcaatttagtgtctgttcaaacccaaatcttcaaatgtaaattaactgaaaccctataagaagaagaagaagaagaagaagaagaagaagagacgtgcttacctttaatcgattgaattgaattgaattgaattgaagaaagccctagaagaagaagaagaagaagatgaagaaaggtgagattttgattttgattttgatttgggaatttggaattagaacataacacaacaaacaacgaacaaaaccaaagaaggaaggagccgagccaatcattcaatcattcatttgggccactttcatgggcccattactagcccacttccctaatcactcattcatttgggccactttcatggacttaaaataatcatgaatatatccttcttttcttgacaaactaagaaatatacacaaattgttttgccttatcgatatataccaatgtcagaatttcttctacttttcacgaattcaacaagtgatttgctgaattcttcaatgcattacttgaagagggttcaatcattttacaacccatcattctctcttcataaaacatatactacttgtttatgtaaatgatgtgattttgacaagtattaataattagcaagagttagaggcattgtataggagaatctattggaaactccactacttacctataattaagttggttattttcaatcaacaaattgagtcattttttaggtattaagtcacatgaaagcaacataaagagttttacagtatgtcaaatcatctcgtggacatggcatttttactatcgtctacatctaaagtaaacctagaagctttcataattagatattgggctgaaaagtaagaagcaacacaatatttaggtcatatgcaaaggcagaatactaaactatggccaacacaatatgtgaggtcaggtaatttggcttctttcaatcctaaaagaactaggaatatctcacaaaggaccggtcctattactaaggctgatcttgagattgggtgaaccttaagaaaataaaaatatttggccatttaattaaaaaagaatactattttttaaaattactgaaaattatgtatatttttttaaaggaaaaatatttttttgagttcttgagataagtgggctttaggcacgggtctagtccgctttaatccaggtgtatattgtgacagtaaggctgctcaacacattaccactaatcctttttattataaaaggacaaaacatattgagattaattgtccgataaaaaagaaagaaagactcatcaaaatagtccatatttcaactacagaacaatttgtagatttactaaccaaatttttgttttcaactctcagttcaagctatttaaagacatgacgggcttacagaactattagggggagtattaagattagtggagtagttaattgagttggtaggttagttatgtaatgtataaagttagttacaattgtattgctttagttactagttagttaccaaagtttgtgtattagctagtctataagttgctaagtgtactatgttattgattcaatgcttgatatcaatgagaaattatctttctctactttcaaatatctctttacaatgtttcaaaaaaaaaatatctctttacaaataaaaaaataagagatatatgaattatttttattgctgcatgcatagataaaaagcaaaattccctctcctctaaaagaataaaaaaaaaagaaaaagaataaaagaataaagagagtaattattaaaaagaaaaagtaataataagaaaagtgcatggcattgcattgcattgctattgggaatgggataaagctgcagaagcatatgtatatatacataaagacaatgaaattaaagacaaataaggagttgt

SEQ ID NO: 193688 - DNA, 1644 bp, Cannabis indica
gcagatgacagattcaaagaaaaaattgaataacataatatatctatatatataacatatacacagagaaagatggagagtattaaatgtaccttttgtttgaagccgtggcaccgtgacagagagctagtccgagggagataaagttgctacctttagcgccagcgccgtcgctgctgcgctgccgtactggtttttgcatcgccgaggaagatggagagattaacgaagccgccaaacggtcgcgagagagggaaagattgaataagtatgctaaattttattttaatagaaatttaaatggatattttgcttagattttattttgtctttggatataatagaaatagcatttatggcacaattttaaaaaaaaataacatacatatttattgtaatagaaatttaaatggatatttttatggaattaatgtgatatattttttgaaaatatttagattagatttaattttgtctttgaattaaaaattataacatttatgaaacaaaacaaaaaacaaaatgaaaatgacgattgtggcccaaaatacattaaaatggcatttctaaaattaaataaattaaaggcaagcccacaaaaagagcccaccatccggcccaagaagacccaataaccggctgtgagtcccactagccacgtgtcgcgcgcaggagcttcacgcgtccttcttgtgtctcacttttcatacgcgcgtgtgaacttcacctcctcacctggttcaagtgtgtgtgcgcgtcatacacaaccccgcaagtgggattgcctttcacgcatggtccaaagcaccacaaaactcactccttttcttctgtacgcgacaagtggcgtcgttgtgtcattgcttcttctttcttctaatgatagattgacacgtgtcagagtgacagcataaataccaattgaatcttgacacatgtcactccagttttaagaatttttgttttttttgacacagttttaagaaattttattcaagaatcaagaccattttaggaggtgcctgcaaagccactatgacaccaaaaccactatgaaagattgccacgtgtcaaagtgacactaaaactaccaatccaaacttgccatgtggcatctagttttgagaatttatttaatttttaagataaatgctaaaggtactagcaccgtgttaataccactattgatccctaaaattaaatttataaattataaagattaaagatatgctgtaaaaattcatattatgctaaaaaaaattaaattacactaataataatataatatttgttatcattcatacacaatttatattaaatttaattacctcctccttataacattaagattttaaatcaaaaaagtttccaacacaaaaatccacaagaaagtttcttaatttgtagttttttataattaattttagagaaatgataaaggatacttgagagggatgcacaagattaaatcaagaaaaatcaaaacattaaaaaaaaaaattgaggcaatagtagtaatccttataagtaataatttcgttagtttaatatcgaatccaacttattttaatttgataaatcgctaattaattataaaagatgatataattaaattagttcttacatgatgcccttccggttgca

SEQ ID NO: 193689 - DNA, 1471 bp, Cannabis indica
tagaaataaaatattactacttaccgaggacgcataaaaaaataaaaaatataagggaagctttctacagttaccgagggtagtttggtgattgaacaatacaccagattggaaggctctcctcggccagctcagaagcgtgggacccacatcccacgtaggtgcgtagaccgggtggattaatacaagcaaaatccccgttccgcttagtctatctgttggtgaatagacggtaatacccctctcgatgaaaacgcagcataaaacggagtcaaagctctcgacacaataaatcgaaaacccacaacagaaattttcactctctcatttctgtcctctctctaaaatagcagcttcgcagtagaagaagaagaagaagaacaagaagaacaagaagacaccagcagtaaaagagttcgagttctttttacattactgattgataaggttagggtttgttctggtttcctttatcactcctcagctttatctccttccttagatttttaatgttacgtaattgtttgtttgcttgatcgtttactttgggggtttgaattttagggaattagtagttatatatgcttatgtatcgtttatttgatgaaaccttacattcgatgatccgattggttgattgttcgaagatccaatggtttttctctttaatttattggtgttaacgagggtttcggacatttgaaatatttgctgggttatgtgtttatctttttcggtttcttggtttattttttaagttttaatcgttgcacttgatgcttacttgtgttgttgttgttatttttattgttattgttactatgttcttgattataaaattcagtttaagtaggtcaatggaatctatgggaatgtggatttcattatctggactttaattgatttttgtagtggcttctgcaatgcaccgtgtgggtagcgcgggaaacacaaccaattccactcggcctcgcaaagagaagagattaacatatgtgttaagtgatgctgatgatacaaaggtgaatccctattgtaactttatcttatttgtttcagtcttatgggatggtgtttgtatggttataatctctccttagacttagaggatatggcactgtaatggaatttaatttgcccattataagggagcgttgtatagatatgtaatagccccacaaatacatattgtgaaaatttccctgtagattactttttgctgattgtaatggcaaggtgggcgatttctattttgatgggaagttcaaaaatttaaaaccgttgcttctcattaacttaatatccttagccccctgtggccaaggaaagacagataactattgtggtatattcagtcagttagatatatctacttctgttttggatacctttctcttttcctttgatcatgtaactgtcattagtctttactatgtttatttactgatgtccactcaatttttttattttt

SEQ ID NO: 193690 - DNA, 2438 bp, Cannabis indica
attggctagtcaatgaataataaaaattattattttatcctctctcctatgctctcttctctctcctctttctgaaagaagtctccatgcatagggggggttcccatggcccttctggccatggctggcaccgaaaccccactggttttgagaagaaaaaaggtcaacaccccactggttttggctggcaaaacttgtctaaacatatagacaatataggactccacaaatactggagttttcaaactaaacataaggtttttatgaccaccttgacgggggacgggggagctgtaagagtgtgtgaacatactagacatttcggtttcgaagtaactgtgaccattgatgcggtggcatggatcttagacacattgcaggaaatgaaagggaagaaaagagtgctgttgactgactttaaaagatcatttaggaacagcacagctagctatttcttggaatgcttttcaaacagaaaaggggagttcctcaaactttcggtgctgagaaataacaagataaaggcagtaatcatcccagaggaggaatcagctacaggatggagtgatcttaggcgatgtctcaatggagttatgggaagaaaatctgagagccaacaggtatctccaaggcaatatgtgaatgagaaagaggtgaggaatgcaacaaaaaaacaaacctgggcaaatgtagtaaagaactcaatgaagaatgttcccaaaaacgaccaacgtaatagagattgtaaggcaatagagcaaggcaactcggaagttaagaagccgatggacaaacaagctggtacattgaggaagttcctttcgaaaccttcaggccgaagaaaagtgatattgaggggctggatctatatccagccataaatcctagctttaaaccaaaaaatccatacccagaaaagagattccagcaaccaaaactctatgaatacatgcgatcgaaagcacaaaagaggaattggaagctggccatcattctcacccgagataacagccatgtttcatggagtgttattttttataatctatccagggagctaggaaggaaattgatggtcagccaactgttcgatgatagatgcattgtctggtgcaaagatgagaaggaaagagatgtattaacccaaattcaacaattgagagttcctggggcacaaacggttgtctctttctctcaatggagttgggaagcacaaatggaaagcattaaagttgaatgcaaggactcttggattggcatatatggcttgcctttgagtctatggaacatgaaaactttcaggagaataggtgagtgttgtggtggacttctggatgtggataaggagtcagccgaagcttccctgctttcacatgtcaggcttcagttgatgggagacgaaaacggcttcgtaccggagtcattgaatctggaacatgaagacagcaaggttgaactgaaactatttaagctgaatgatttaaattatagattccatgggtatttcaggacctgttggtaccaagatttcgaccataactaaatggctggcgtcgaggaaggaacagggttagaagaagggtatgttgcagaagacaggggggtaatcgaagaggtcggaacaagaagggacaaggaagaaataacggtagaggaagacactattgggagcagtgatgtacgggatgatctggtgcgacacaaggaagacagcggaatcagaaacgtcaaaaatccattgattgggctttctcggtcggcggacacagtgccggcggctgcagtcatttttgatgacacggcgatcgaggaatttccaaggaagacatcacgctgcagcagtatacgtgcgatgattgagaacgatcattattccacaaattatggttcggcggcgattgggagttccaacaaaagagtgcgagaatcaagggagtcggttactattcatagtatattcaagagattgtggagagatctaaaggagccacgtgtgcgggctcatttaatgccaattaactttcttaatttaaataatatatggcagccctatgaagaaggaaggataatgggccaagttaaatgggttaggaaaagagatgggcccgtatcaagattgggccgaatgtacaatgggcagtttggggaaaataatgaatggagtcttagtgggccaaactgcttggtgggccacggtttaaatgggatggccagaaattgtgttcagcccgtgggattggaggaggtgagcaggcttttgggccatttaatttataagcacttggggccttacactttggtgctggatcaggggcattggagcaaaaacaacacttcaattaaagtgtttgaaggcattctcaaaccagtaaagcctaagagaagagaagaatttaatattgcggtgatcaattattgggaggaatttaaccctcgtggca

SEQ ID NO: 193691 - DNA, 2527 bp, Cannabis indica
atatataaatatatatttatactcttgtacccatgaatcggtatagaaaaatttaagttcttatgcttaattttgttatttaattaaaaaaaaatctcatttttacattatgcgggctaaggttgttttgtcggctgagaaaaattttaaaaaagttattcagccgaaaaagagataaaaaaaaatatatgggatttcttcatttttatatttaaaagtattttttttgtatttatacagaaatacacagagcaacctaagtcgtgaccaaaatccacattgcaacccacggaacaaccacaagagcaatctaaattgtaaaaataataataaaaaaaatgttaataaatatagtatataggatgattctccaaaatatattgaatttgagttagatatattttatatatatatatatatatattgatataatgttaaaaataaatattttttagtattttttatttaagtaactaaatttagtatagatatttaaaatttccttttattatttatcattaaatcaaaatctaatagtttaagatttttaaaattaatatatatacttcatttttgaatctgtgaattattgagttgaagacagaaattttaattaatataaaatcaattgaagtactcctactcttattcattccttaattaataactcactttcatgtgaacttttacctttttttttttatctatattcaataacaatcaagtcttattgaacttgccttgaaattgaaaacctcatggctcgattctggtggaaaacttcttctagtaaaggacggggcattatctggatgtcatgggaccggatggcagttcacaagcttgatggaggcatgggtttccaaaatcttcatgactttaacattgctatgtcgcgaaacaaggttggagattaatgtgcagcaccgacacacttgctggtaaaggttttaaagccaagtattttcagaaatcagactttctctctgctgagttgggtgtaacccaaattttgtttagcgaagtatctggagttctcaaagcttagtccgtttgggggctagaagaacagttagtacaagtgacagtgtgagtattttacaacattcttggttgcctagttcgcagaacccttatgtgtcaactaatcatcctggcttagaagatcagctcactctttcacgttgacagccgagcttgggatacaaatcttgtccttgacttgttcaacaaccatgaagctgccttaattttgggaattcccctcagtccaaatgctaccagcgacacatggtcctgggtaggagaaaggtcaagtgtgttctctgttaaaagtgcttataatcttcttcaagatcagaagaatacacatgtgaataagagcacatctaatttctggcattgtatatggcatatgcaaatccctccaaaggctaggaattttctatggagagcttcctctaattgtcttcctacatgtctaaacctcactacgaagcacgtggagatctctattctgtgtcatgtgtgtcgtttcaagctgaatccacaagtcacgattttatttcttgtccaattgcccttgcttgttggcgtagactcggggttacttttgtttttgatcctggtgggagttttcgcagctggttggaactgctcttccaatcactttcagaggagattgtgtgtagtgtttccatgacttgttgggcaatatggaaggcaagaaataaaattatttggaagaagaaaagctcatctgttacggaaataattgcatatgtaaacaaaactcttaatcaatggaaaaaagctcaagataaaatcactttcaattccttgtgtcttgaaaacaagggtgatggcgctgagctatggtctaaacctgaagaaaactcaatcaagataaatgtcgatgcaacgaccttcgaacaagagaacaagtgtggctttgacattgttattcgtaatcatcttggcaatcttataacagctctctctggctgttatggaggtaattttacagctgaagtcattgaagtcatggcaatcaaagaggccctcagttgagttaaaggcaaacatttggaacgggtagtaattgagaccgatagcttggtatcggtacaagctttacgcagtcagcaaacaatgttctcaacatttggcttgctagttggggattgcaaagctctactttctacattacataatgtccaattactttttattaaacgatcagcaaattgggtggcacactacattgttaggaactctcgttttaacactagttgtgcatgcatttctatttttcatggttcagaagacttagaaaatcttatgtattcagaatgttaattatttcaatgaaattaatatttcatttcaaaaaaaaaaaatttaaatgaactattaaactataataaatatttctcaatttcatatcttcctttatttacttactagggaactaagccgcgcttcgcgcgggttcgacccaactttaataatattttaaaattttaat

SEQ ID NO: 193692 - DNA, 2880 bp, Cannabis indica
aaaacttgggacccagactagacctggacccgaacccgagacctcgaacccaaacccgaactaagattgaggtttgaacctgaagccagacttggacccagaccccagactcagactaggactcagatcctaaccaagagacaaactcagacccaaatccagacccagaaatggaaccgaaaccagaactggaatgcgaccgggactaggatctggacctgggaccagaaccaaacttgaacccaaacctagactagaacttggacaaggaccagggacctgaacctggaccgagacccaagctcaaaccctgaccaagacttgcacatgggttaagactcagacccatacccggacctgggacccaagaccaagacttggactcgaacaggaacttagactcggacagggacttggactcagacgatgacctagactcagacaaggacctgggcttggataaggacctggactcgaacatggactcaggccgtgaacccgaacctagacccagaccatgacttggagctttattggggacccgaaccaaggactggggccctcgaactgggaccgaacacgggccccagaactgggactcggacacgggcctcaaaactgggaccgagacccggtccttaaaacaaagacctgaccgagacccgggacccaaactgtaaccagaccgagactgaagaccaggatttgaatttggactcggggcttggacctgacccatagtcagtttctggatttgggacccagacctgaacctgaacaaggacctggacctagccatggacccatacccacactgggactgagacccagactcggacttggacctgaagttggaaccgaaacaagaagcagactaggactcgagaacaggactaggactaggagcaggacccagactgagacctggacccaaatccaaacttggaccgagactcaagacacaaaccagaacctagacgtggacttggccctggagccagacctgaaccctggacccaaacttggattggtgaacctagacattaactcagaaccagactcgagacccgtaacttggactaaaacctaaagaccccagtctcagtcccggacctggaccaagactcaggacccaaactgaaaaccagaccgagacctgagactaggattcaaatctcaacccaggacccgagactcaaggcttggacccaaaccattgtcagtttataggatttgggaattggaccacgacccaaaccttgactaggactcggacctagacctggacccgagacccacaactagaactggaactgggacgttggaacaggaccaagactaggacttggacccagacccggaccttgctctagacccatatcgagactggaacccagacctacactaggatcgtcacttgtatccagaccgaaacctagaccgaaacctaaacctggacttgggacctagaacccagacccagatagaacccgaacccagacccaagacacgaactaagggttcgcatccaatgtcgagtctcaaatcccagtcccaatttcggggcctaaatctcagtctcagttcccaatccaaatccagttctttggtcctggtcttggtccaggaccgagtttaagtttgagtcccaatttgagtctaggtcccagtctgggtctgggtccctgttcttgggtcccaatccaggtttgggtccaggtactgggtttcacatctctgtctgggtccaggtccctattcatgttctagtttgagtttgggtttgggtccagttccagttcctgaaccaagtccgtgtcctcatcccgattattgtgcggttcttattctagttctgattctgggtatgggtctgggtcaaggtccgaatcctagttagagtccaagtctgggtttgggttagggtcctaggcctgggtctaggttcgagtgttggtctgggtctatgtcccaatttttgatctcgatatgggtttgggtatgggttcgtgtttgtgttaggatttagggttttgggtttagggtttagggatttagggtttagggtttagggcttagggttttacgggtagagtaaagggtttagggttttgggtttagtgtttagggatttagggtttacggtttagggcttagggttttaggggtagagtaaagggtttagggtttatggtttagggtttaagggtccgcttctagttctggttctaatttcgggtcacggggtacagtttaaggtctgagtataggtttgggtccgggtttaggtctggatctaggtcccagatccaaacaccaacaatcggttgggtccaagccttgggtcaaatctagatcctaggtcctgatctgattcaagttagggtcccaggttccaatccgagtctaagctcgagtctagggtcccactacaggttcccaatataggttcgggtcctaggtaccaattcggttccaggtctggattctggtttgggtctcgaaagtgtccaagtcccagtccaagttcgggtttgggttcaagtccggtccgatctcaggtctcgggtctcaggtcctggtctaggtctgggttcgggtctcggtttgggtctaagtcccgattcaagtccaagtcacgagttctaggtcccagtctgggtccaggtccaggtcccagtgtaggtcctggtccgggtttaggtttgcatttggttctttttctagtcccaagtcttggtccttgtttggtttcgattttggttataattctaggtttggattcgggtcggggtgtcagtctgggtccgtgtctgggtatgggtccagatcccagtctgcgtttaggtctcgggtctgggtcaaggttcgagtctgggt

SEQ ID NO: 193693 - DNA, 4914 bp, Cannabis indica
ctttgctttttgtgcttctctctatctgaagtaaacatgcatgtcaagcagttgaacacacttatcttatctgaccatttgcagattgtgacgcttaacacatttttgacttttttaggataattcttctagaaagtaatataatatcgttgacaaagtcattgattttctttgttgtggtttgtgctctggacaatcccaactgtagaagatttggatttagctttcacatttgcaaaattcccatcattttatgtgagactcatgaatatattatgcagagaatttccatgcctgagataaggaatcatgagtggtttctaaagaacctccctgcagacttaatggatgagaggggcagccagttcgaagagcctgatcaacccatgcagagccttgatgcaatcatgcagataattgctgaggccacaattccagcagctggaactctcggtcttaaccattatatgacagacagcctggacatggacgacgacatggatgacttagactccgattctgagctagatgttgacagcagtggtgaaataatctatgccatttgattaccggacacagctgctggtaatttcaaaggaaaatttctgatgaaagcacgctggctttttttttttttttctttttttcgagttatggctttgcctgaagaaccagcgatgggaatgtgtatgatagtctttgataggttagaataggtaaattgttacttggagtcatatgagtaatgtttataagaacatgcagttttataccttatgttttatggaggcatttgagcttagtgttttatgagaggtgtggtaaagtggaatgaaccagaagtatgtgtgataatccccacaccctcattcctcatccccttccattgaacctatttttatttatcattgcttttcgtttggttctgtacgtgtactttcttttcactctggtggtttatttggtcataaaatatgtgtttgtatactttgtaacaatagctgtcacaacagattttatatgaaattcggtagatcagccatcattattattatgccttgtgacaatttgtatgcctaatttcatattccaatttatgttgttgattagaatagaaagtgggtttagcaataaaatgaaaatgctcagattgttaccaataaaagaattaattgttttatcacaacaataatgtcaatagatgaaaaaaacataataaaggttaaagaatgaaagccctttgaaagaaaacaaagttccataaatgactatcaattaacttacaaaccaatctatgtgttaaacatgaactgaaagtggagacattgcattggatgatggacttgccatacaatacaggccaatcttcatcacaaatggttagcctagttctcaaattgatggttctcaagccaatttaagttaacaccatccttggcaaccttaatctctgtttttgagtcaggaagcagatgaaattcccatagttcttttaactcctcatcacacacaacattctccaatcgttttaagtccagaactgacgaaggcaaccccgctaatctggagcagttgttcatattcagctttgttaaatggcacaactgacctatgttttcaggcaagttccgaaggctataacagttggacatgtcaacaaatgtaagctttgagagcttgcagatggattctggtaagttttccaaatcgatacatgatctaaacctcaacactagtagattaatcaagttcccgatttcttcaggcagtttcgatagattgtgacaatgtgttatgctcagcttctttagcttgatcagatcacatagtccagcaggaagttcctccaaatcatcacaatagtcaatgtttatttcttctagatttggaaatacttctgatatcttcaccgaactgaaagctttaccgatttcacacataaacagagacaacttccgcactttcttcagtacaatgtgagtttctttcagagaaggaattgaaatgcgctctagtcttattcttgtaagattggtcaaagaattaagcagctgaaagtcacttaattcagctgggaagaaagcataatttgtgattaggagaacctttaggttgctcatgttcttcacaaacttgggcaaggcatacttcttcattctaaagtttagaactagaaccttagctttcggtagttggatgtcaaacaattctgatgagaatgattcatctgcaaaaatgaaaggaaatcaatttgattaggtccaatccagctgatattctatagtatatttggatttagtcactttagttgagagtggaggaccgaggtgagagaagcaccagtcgagataactactaaggcggcattgaaaggctgcgccttttcttcattccaccacgtgggaagatcatttccagttaattctacaatcaatctttccctctgttcttctggaacctgtctgctctggtggatagcaagctctctaagcatatcatgctgagtaacgaagtgttcactgtagtagtcatcgacttcgttctcatcttttctgctctatcaaaaaaataagttgcttagaactttattcttaatgaatgaagctattttatgtatgttaagttaaagcttaagaggtattaggcatgagctatgcagtgtggcagaaatgaattaaaattttttttgaccattgaaaatagagtttatattatccaaagacaattaagatgtaagacattttcatacattagactatttctatcaaattgctataacatgatataaaattgcagcatcaacttgaaacttttagctaagtgaaaactaaaacaaaggaactcataccttgtgaccacaagatttgccaggttccggatgttaagatcgtcaaggttagtaatggcatggttttctttgactccatacaattctgtcattatatcaatgagggcagttgcagggattctctggtcttccgggaacaaaccaagatccatgaaacaattcttaagaacaacttgcttctcatccaagacatctaagatggtttgtaaacaagaaagaagttcactctcagaattgagaatagaagagtctgtagaccaactttccaattctctctcccagattctttggtgctgtccccttagcgatgaaccaattagtttaagggcaagaggaactttcttacagtgatccactacctgcaattcaacacacaaagaaaaatcaattattatttagatggttcctgaaatgaaatcactttatcttatctgtgcctaaaaaacaatagcagcatagtagcaatgtaccttcttcacaagaatatctggaatgtctacatccccatcttctattgatgcataatgcttgaaaatagccattgcatgttcatcacgcaacggttttaattcatatggaggtccgaatcttgtaagctgaaaacgggacgtcaccaaaatcttgtactctaagtctggtatttggaaaacaaacttctcaacgagtgactctgatccggaccaaacatcatcaaggaccaacaatataggttgcttatcaattgtgtcgaaaagttgttccaatttgattactgcatcgttgctgtccttgaaagcaggcacacaacaacctttgtgttcataaagttcttgaacaataagattcaagttgggactctttgaaacagtcacaaacaagatattgctcttgaatttgtctatacaaaatacaaaagaaaaaaaatcttagtgaaagatgctctaaatagaatcataagcagataaatacaccaaaatataaaactacccaaatttagcaattgaaaataaactaaagaggcaaataaaaacacatattatcaacagaaacaaaaggggctatgactaatgtttagatatgaaatgggtgccttaatttaacacattatcaacagaaacaaaaaggattgttttccatttcaagatatgaaaagggtacctctgatttgatcatccttgcaaatctttctggctaatgtggtcttcccacatcctggtggagcagtaactacaattggtactgttgactcattgacccttaaaagcttcatcttcaactcctcaaggggcttattcaatcccactataaaggagggtggttcaggaacatagcagcaaccctttagctcattttgactagaaaacacatcactacttgactggattcttctagttagaatgtcatgactttccttggtcaaaagaagagtttcattcatacttcttaaaatctgaaaatctataatcttcagccaacgctcaagatccttatcaaatttctgaagcttggtggtgaatttaggccttttgtaaaagtaccaccaattactatacttgatacacttatgaactagctttgttccctccaagaatgtatctttaataccttccaactctgattctggccgatctaaagccaaattggatttatctatctcctcgatcaagggtttcagagattttacagttgacttgatgttcttgagctcaccagaaaataatagaaccttctgtaatggaattttgaccacaatatcaaacaacatttggaatgggggtcctagagctgctccaccaactaatgattccatgctatccttcatgggtattcaaaactagaacggaaaaaatcaaatgggtgtgtttcagaacccaagaaaatggtgaaacaagaaaaacccagatcaaactaatcttcttttagacaaaagaaaaaaccattcctttttgcacaatctagaaaaaaaaaaaaaaaaaaaaaccaaacaaacaaacaaacccactatcaaagacagagagagaaaatagtgtatgtagtctcagtgttcgtagtaaggaaaataggagggaagtaagtagaaataactg

SEQ ID NO: 193694 - DNA, 1362 bp, Cannabis indica
tttagtttttttttttcaatatttgagtaggtattcttcttatcttgtttgtgttccaataatgtatagaagtaattatttggatacatgattcatcattctttcatttctatattttatggctccaattggcatcaatttatgcaatttactctatttgaattattttgaaataaatttccaaatgattatcaatgaggaatttattttttaaaaaattaaataataaataaaactattgaaactccaataatttcttcatttaaaagttaaaataaaaaaaatatattaggtggcaatataataaatttaaaatctatttttatttatcttaaaaaaaattaaataataaataaaactattgaactccaataatttcttcatttaaaaattaaaataaataaaatttgaatttcaaaaaaattgattaggtggcaaaatactgttgcgagtcgctgtaatataattgctttccgtttgatacacgattacacatataaacatcccaaccaatcatattccgccacgtcatcctccctttgcttcacggaacaaggggtaattcggtaaaggaaatgaccaaacacaccctacgccggttgccacgtggcgatggttctcctctcctagaatatggcggaaacaatccaattttagaatgccacgtggaagcgcgtccgcatctggctacagtagtcggtgtcacagttgatttttttgaaatatggaatattggaatgtaaaaattggagggcgcctgctgcgcgtccctttcacgctccataaagtgtgtgtacgcgtcaatatcaaaaaagacagtcaaattgaattttaataaattgtgtttttttttgtaattttaattttaaataataataataataattttattaaatcattgaagacgtcgtcaattttactcatcaaaagacaaaaatgtcttttacgagatgaccacattggtaactttgttggattttgctaatatacccttatgcttctcctaattttttacttggccacttcatgtatttttagtcaaatgatattaagtgaaatttttacacatgtaacatgcttttgaaaaattgtttagtcaaatgtagaattttgtagttaatttttatgtttgaaattatatatcgggatattttttttcatagcagtatttgttatagttacattattatctttgtaaatttttgaaaaaatctgaatagtttacaatgccaaaaacagagttcctgatattcgagcttaccgcgcgcgttcaaaaaaacttcaaacgtatttttagcactataaactattcaaaaaatttttaaaaattacatgaataatgttgtaaacataacaaacacc

SEQ ID NO: 193695 - DNA, 981 bp, Cannabis indica
atatatatataaagaaaacattcattattatttcaaaaccatagaaacagagcataaagcttttattaaacaatcgatattttacaagcatcactagttaacttactagaattacatgagaaccttgtagctaaacaacacaaatgggcaaactacaacaccaactctcaaagatcatatactctaaacacaattgctaaagctaaacaggtaggtactcatcaaagatgtatgaactggatgtgcaagcattatatcttggaccaaaaactgctacacttctaagttctcaccactttagcttagcagggaagtactgcaacagtagcaatgtataacataagaggtcaatttaattagctaaaaaaaaatatagaccaatggtgtgtggcaattacctttttgatgagggagagataatatggtttcactttctccacatcaacccgaactttactcttgctgtatagatcatacttgctacaaagatgagaaaaaatgaaaatagtattagttagtaattggactagctgagaaaatcttgtacaaattactgaaatggtaattacttgaatacgtgtagccacttcaagttttcaaaatcctcttcattcattaagtgtctgtattcccctgaactgtgtaatgctgcaatcaccagatactattttaatatggaaatggtaacattttttatggcaaatctaatctattttacaagtaaatttccatttctttacttaccataaaatgagtggtatctgatgataaaaagagcagcagaaggtagagtgctatgattctctttggcaacctgaaaatgacaccccaaatttcagcttctctgttttgtctatcccttttcttttatatatgaattcataagtgttttatgccctttgaataagtttataaaggatgtaccaagtacatgtagtcatcatgaccccatgacatcagcacattttctagtccacatct

SEQ ID NO: 193696 - DNA, 4425 bp, Cannabis indica
tgcaggatttctatttcttaacatgccctctcaaacgaaagggtgattgtctgatcccgagtttgctgattagaaattgaaatcgtgaatgaggtaatcctttagtgagacaatctgcgatttgatcgtgggatggtatgtagttgacttccagttgcttttgaagcactttgtctctaacataatgcacatctatctcgatatgcttagtccgagcgtggaaaactggattggcagccagtgctcctgcacttttgttatcacaccatgtcacagatgtcatgagaagaggaaaattcaattctttgagcagagactcgatccaggatatttcggctgcaacgtgagcaagagcacggtactcggattcagtgcttgatctcgacaccactgcttgctttttggatgaccaggacacaagagtttcaccaagaaaaacgcaataacctgccactgattttctgtcatcttgactgcatgcccaatcggcatcggagaatcctgtaatatgaagtctgttggagcatgtgatgtgtaagccaaagtctattgagccttttagatatctaagaattctttttgcactgctccaatgaccggttgtggggaattgaagaaattggctcagtttattaacggcataggctatatccggtcttgtgtggcaaagatattggagagctccaatcagacttctgtaaatagtaggattttgaagtggttcaccatcaagagcagagattggttttcctgcagctatcggagttggacagggctttaaattgttcatatcaaatcttcttagtaattcttcaatatacctggtttgagtcaagtagataccagtttcatccctgaaaacctctatcccgagaaaataattcaaaggtcccatgtccttcagagtgaatttcttgttcagctgtgttatgaactctttaatggtactgggagtgttgcctgtgatgattatgtcatcgacataaatcagcacaaggattatttctttggttgtcttgagaaagaacaatgatgaatctgctttggagttcttgaacccccaacttaacaaagtatttttcagctgttcgaaccatgctctaggagcttgtttgagtccgtataaggatttgttgagcttgcaaacatagtgttcctttcccttttcctcaaagccttgaggttgagtcatgtaaacctcctcttctaaaacccatttaagaatgcattgtttatgtcgagctgtcaaatccactcctggcctttggtgaaatcccttggcgacgagtctggctttatatctttgatgagagccatctgagttgaatttttcccgatacacccacttgtttccaacaaggttgtaatgttcagatggtggtacaagtacccatgttttgttgttcttcaaggcaacaatttcagcattcatagccttgttccaattctcatcttgtaaagcttcttccacacttgctggttcagaaaagaaaggttggaattttgattgagcgagaaaggttcttggcttgaaaattcctgccttgcctctagtaatcatggtgtgtgttggtgcaagaggagctgtgacagtggctcgagtttcaacttcagtacctggtatttcaacactttcaacaggaacatcaagcaatgttgcagatcgattatatggactgatattgccagaatttgcaaaattttctcctacagaacctgattgaagtgtgccaacagcttctgaagtgtgagtgtcaggcgtttgttgtgatgtaggactgtcaggttccaaggatgatgttgctccaggagttacttcagttgaggctgtggcatcggcttcagtatgtgaaacaaagggtgtaggtaaggctgaccatgttgagctatgtacgatcacaggtgtctcagattgataattgtttagaaatccttgtttaaagggaaactcaagttcattgaataccacatttctagaaatgtagattctaccagttggactaaggcatttatatcctttatgagcatcgctatagccaagattaacacactttacagagtggaattgaaacttatgggagtgatatggtctgagacacgggaagctagctacaccaaaggtttttaaaaaggcataatcgggcttctttccaaacaagacttcatatggcgattttagagacaagactggagtagggagtctattaatcaaatagacagcggtgtgaaaagcatcacaccagaacttgagtggcataccggcttgagctaaaagcgttagcccggtttccacgatgtgacgatgctttctctctgctctaccgttttgagcagaggtatgaggacatgggtgattaaattctatgccatttgcttgaacaagatcagtgaaggaacggaattctcctcctcaatctgttcttaagcttttgatctttctttcaaacttgttttcggccaaagccttaaactaaagaaaggcgtccagtgcatcatttttaaatttcagtgggtatatccaagtgtacctactgaaatcatcgacaaaatgaatatagtatctataattgatgttggatgcaactggtgccggtccccacacgtcagtgtggatgagatcaagaacatttttagcacgattttgtgaaagtttaaagggcaaagagtgagattttccatattggcaagcatcacaaaaggatttaacttcatttgctgaaacttttacattagtagaatttaaaacatgactcaagactctagaggatggatggcctaacctcctatgccaaacatcacttttggaaatagaaagaggatcagttctagactgatttacacaaggactctgagtaacagcaataccagtaaacatggctggtttgagaactcttgattgaaaggaaaaactagactcggactgagatattttgggctgagagagttggtagaggccatctttaagaactccttggagcagcaccctccttgttgccttgtccttaatcaaacaaacattaggatagaactcaattagtatcgggttatcagcagtaagctttgacacactaatcaaattttttgcaatatcaggaacatgtaagacttctttgagacataaggttttaccacaattggttttaagcatgccactgccaacatgtgctattttaagtttatttccattacctacagcaacaaattccttaccaacatactcctgttttgtgttcatggctgatgcatctgaggtaatatggttgcttgcaccactgtctgcgaaccaggcatcgctgttgactatttcaggagtagcaatgaaggcgtttggtggttgtttgatctggttttggttttgttcaggtcccgtgcaattttcatcgtatctgctgtaacaaatagcagcagagtggccatatttgccacagatctgacagctgggtttggtgccgttgttatttgaccttcctcttcctctgaaacggccaccattgctgcctcttccaccagaaaaacgcccaccaatgtttggattagagtaagatccacggcctctaccagatggctgagactttgatgcgatatttgcttggggattggaggtcgagccaaggattttgttgctgttggtaagtgtttgaagtcgttcgatcttgctatcaaagctgagaagggtgtcttgtagttcctgccacgttgttttaactcttgcttcgatttgaacaacaatcgatatgtactctgtatcaagcccagagagcacattagcaacgagatgcgcttctgggtaaggatcaccagcaagcgcaagtgtgtcggcccaattctttttctgcctgagatactcagtcataggagtcgaacccttccttgtagtctgtatgagagtcctgatttcgtccattttagctcttgagtaagctccatagaggctctctaaagccttccacagttcagctgctgtagtggctcccatgacttctgtggctatcgattccgtcatggagctgtacaaccaacccattagcagctggtcatttattatccattgatcaaagtctggattgacctgaatccctgtctcaggtcctgtttctccatcagctggtgcagccgtgatggactcgtttggacagatacgagtcccattgagaaatccatcaagcctgtgtcctctcacgatggtggagaccattgtcttccacagagtatagttatttcggtctagttttagggaaaagggttggttgagtgtgctaaaatgttgaggataatggtttggaaactgagatgaggggttatcatttctacttgctgcttggcccaaaacagcagagctattggcaggggaactagctgtttggtgtgcagcaggggtttgatcaccatctccattggttggagtagccataggcgtaggcctta

SEQ ID NO: 193697 - DNA, 1636 bp, Cannabis indica
agtatttgcacaatagtttcgtgaagaactgtcgtgtcgaagaaatcccgcaactgttttctgcaaatgacaagcttgcaaaactattcaaggaaatcttcaattgttgatcaaacatgatacccttaacatttctaaaattgcaaagttgctaaagcaaataggtgccttcgaattttgcttagcaagttatgctacattaaactggcaaattacacatgcctctctcactatataatattttatatatatagggcatgattatagcagggacaccaataagggcatctatctttttggtatttgaagaaattataacttaatttttttatatgatggtcttcattatggttatagtaagaatctcacccgttttttcaaaaattctaaatagtttacgatattgaaaacatgttcaaacactctgttgcaaacgtgttttgtttctttgcagctgaatgtttgaaccatgtttttttaacactataaagtattctaaattgagtaatttgtggtataaatacataagtttaactctcagttgcaaataaatacttaagtataattttttatggtaataatacctgttataattctagaacttttgtaagtactaaactgttaagagtcaagtaaactgccacgtggcaatccctgattggtttaggtcattaaatttttattttttatttaaaaattaatttaaatataccaataagaaaatgatacgtggataataacttgacacttaacgatcaagtacttacagaaatttcaaaaatataacttaaatatattttatttttttgatcaagaagaagaaaacttcattaatctactcaccaaatacaaccaagatcacttaaatattattaccgtaaaaaattaaacgtaagtatttaaatgccaccgagagttaaacttaggtatttacaccgcaaattactcttctaaaattttcgaaaaataggtagaatatttgttataactacaatatacataatcatataaaaaaattgaattataatttctccaagtgcttaaaaatagagacgtcgctaccaataggcacaaaagtaatgtccatgcagtagaattttcctatatatataaagataagaaattcaacacatctaaccacaagattatgagaacaaccttaccctttgataacatctgttactgctgcctgcatatttgaaatcaatgcagataggccattagtagaaagaaaatcagcacaagccagaaacttctgttggtcatccctgtcaatgagatcaccatcatcctgtaaacagaaataatatcgaaaaaattattcaatgctgaagagaataagcatatttaatgcaactgttaccgaacataagccataccaatcatcaaccactagagttgaagctataataagcacaagtgtgtggtaacacaggattcatttttctttttcagttaccaaaagaaaataaaatgataggaaggtaacaaaaaatttcataacatgctcgaaagcagtgttgctagaaagcagcagcaatgaaatataagcaagtctgcattggatgaaatctaaattgttctacattcgtctatttgcagaaaccgtaactctaattagccacctctaacccga

SEQ ID NO: 193698 - DNA, 1299 bp, Cannabis indica
caagtactctctctagtattatatttgtgtgtgtatatataatttggggtttgttcgggctgaagttaatatttttatttgaaccaacaggaaaaagaccgaccaacaggaattcatatgtgtcaccatgtcagtgctcattttctacttcctcatatgatgtttcaaaagaaacgaagcaattttttcagtatgagggaaggagggccttaattggttctctcctagccacaggttacttttcaactcctttagcttgtaaatgtacataaaattgatcttttcttccccaattatgtacttgcatttttttctgggttttttctcaatagtaaaattgcagtaaatgtgattgttttgtatcaagtgagctttgaaaatctgggattgtttctcctccttccaacgcaccttagccaaaaatttgtattttcttatgttaatttttttgcaatggatcagctgctggaatgtatctttgtgatgtggctgaggcagttagcacaagtagaagagcagtgagttgctcatttttcattatctagtttttagctatgatttgtactgacctcttaaattaccaaaaatggttggaaaagttcaagcaagataatttatagcttttgataaatttgtaaacatcttcctctgctctgcagcttagaggagctaaagtacctgaagaggaatttacaacacttcccaatggtttgaagttagtagtcactaacttaatacatctcctctattttggttttctctatatgttttcttcatgattggttagacttggacatatggtaaaactttattctcaaattttgatggtgtcattcaccataaccacttggggctagctcaagtggccataggtgagtgtgtgagtgttggaggttctgggttcgagtcccaggtaaaacatgttgtaatatataaacgcttaaatcaaaaaaatggtgtcattcaccatagaattttctatactttatttatacatctaaagtcaagataaaatcaccttttagaaagattgtcatattttttttacataaaagtgttcagactttgtcatgtttctactttggtttgggtaacataaacataatactgtcataggttccaagtgaaataactactctttattgtatgtgctaatttgttcattgaataatttattttcactaaattaattgagaggtaatgtccttcaggtactatgatttgaaggtcgggggtggaacaaaggcggagaaaggatcccgggttgcagtacggttgtagtccagttaaatttcatta

SEQ ID NO: 193699 - DNA, 1839 bp, Cannabis indica
ttttttaatctcaaaaatccacgaagctctccttgcaaatcagaatttgggttgggtccaaaccttgcaatatttgattcacaagtatagctagttaactttttcagctagctgttatcctaattgtacctcatatcagaaaagatttagcaccctcagctagaacagccaaaacatgggcgaccccttcagctggaaatggcccagctcaatagttaggtgaaaagagaggcaggcaaaggggaaaaaaagaactttgaaagtagagagggatttacatatggcttagcaattctaaaaaccgagttttgtttgtttacagacttaactaggaattagtgttctttttagttattttaaaagaacacccattccaagttaccatcttttatatcaacaaaagccgaaagagtttctgttttttatcaagatgagaagtggcaaggaaatgattaagatgctcccaataacaagagagtaagacatgagctgcataatctttccaattctttccctagtgccctatgacactaatcaagtaatgaaacctactgatttatgggatattcaaacatttcaagaataaaaaacaaaaatcgcatcctcatctgaaagttggatttcaacatacaaatcagtgactgtaagagaacacaaacatatactattttctttattaccaaaataagatttcatctcatgatatgattatttgtcagtcaaattcaaaatctaaaaatttataaattcaacatataagtcaatgactgcaagagagcatgaagttatgaacaaatattcttttctttgttaccaaaatttgatttcatctctttctcaaagaaaaaatgatttcatctcaacctcatgatgattatttgtcagtcaagttcaaaacctaaaaattataaattattgatcaacttacaggggatgacagaggagaaggaagaagaaacatggagtaggttgaatcaaggtcctattctatacaatgaatatctctattatagtcttagaatatacaaaaacaacatcaaaccataaagaaacccataattgtatagataactcagcataattgaaaatcatgaatttttaaggaccatagtttcaatcaaacaaattacatttccatcctcatttaggtctagccactcaaacaaaagtataaagtcaataatttctaagtctttgtccttgaacaatgttttagtattataccaaatcatattattaacccaatgaaattaaaaacccaatacaaaatttcaactccctaactttcatctcaaaaagctcaaacccaaacatttcatacatatttgttcttaaaatattcctctctatctctattctaaaatcctctaaattcctaattcaacacacaaccctaataaaaaccacgaaaattaaaactaaagatacaatttttaacgtacctgaagaggtagattcgcagagatcgatagcgggcattgagattgaaactgaagaacatgggaaaatgaaattgactgttgtaaatcgcataaaggcagagaagaaaccaattgtaacgcataaaaaactgttatagaaaggagtaaacgggagaccgccatagtcgaaggaagaagaagaagagggtattacagggaaattagaagggatcagaaggggtaaaatgggaaaaacagaaaattgtacagataaagatagagaattgaaattgggttatcgtgaattgaagatgatgatgatgatgatgatggtgatgaagattgactgaagggatgggttggtgactttggttattggatttggttgtgagcttctaagatcctaccaccaattttt

SEQ ID NO: 193700 - DNA, 2643 bp, Cannabis indica
tgatgaaagaatcgcattaaaggtggagagctgtcctctctctttctctctgtctctgtgtcgtggaatggaaacccttcaaaatataatgaatttaaatattaattttgtcttttagttttttttgactgaacccaaccggacgactggcaacagcaggtgatcaattacaactgcatatatacatagatacatacaatacaccccgtaaatgaaagaaacacattaaattaatatgaataactttttcctatttcctttactattattctcgaaattttaaattctagttttcttttatcttttatgtttgtttatttgtggagtgtatttggtgctttgggttttgttttcttaatttgtttgcacttaaatcgaataccgttttggataatcttaattttggaagataatgtgagtgtagtaaaactgccattattggcgttaatgtatttctctctcataattgaaaatgctcttaaaattgtcttttggcactataaatttgaagagaaatatagctagggtttcttcaaagtgtgttgaaaacaaaggtcttctctctctctctctctctctcttgaggagaatattgggttgaaaagggaattcaatttgtcggaaaacaacagttcaaatctatatatactggccaaagctccaaatattaccctctcaaagaaacttgtctatctatattcaaaaacctctctctttccaagccttttttttattattagttttcttttttgctgttgttcgtgtttctttcttatatatagatctttctctgcgtgaaggataagggtgagaggaatgttgtctggctcgaggtcatagagtttcatgaatttctacatcatacattaatatatgggatgagaacctaaatgattctcggaccaggcttcattcccctcaaaaaaattcccttgaaaaatatataatgccattcgtcagatcaagatgttatacacacccagatctaattactaggttagatctttgagcagttaattagttttgtttttgtctcatataatttctgggttaattaattgatcagattttattttattttatatatttaacaaaatatttgttctttgtgttgggaaggccggttctgcaggcagctagattctcggatcttgtttgtagtgtaattatgatcaacttcagtgagttcaactttgtttaagtactgagtgtaagtttttcttgtatatatatatatatgtctctcttttatttgttggttgcgtgaagatgtaatttttccaaatggtttggtgaacagttttattcttgttaagtacgttaccaaggacatccatgtgtatgattgtattttgaagtgttaaccacattcatatatgcatatctatcttcgtattaattaattaaaccaaaggaaactattgttcacgtacgtatttcaactaaacaagaaagtgtacactgtttaacctatcacatgtgtgtagctcttgtctgcgattcataggccgactttgtagtagctacatatatagagttaatttgcttaattaccctgtatatgcgtcatctttttttttttcttctattattattattattttccaaacaaaatattattatattttgggtttaatgttatttcctttctatagaatccaaattatgacctagagataaaatactgaagaatagaatactaaggagcatatgtggtagccaaccactttatttagcatacgttttctaataatttattatatcaaatcttatttatcttttaatttgaagaataataatatatacatgatgagagacatattatttaattgcagtgttgtgtaccctaggtgccttgtaagagtttcttaaaaataaggtacaaattattaatgtaacatgatatattattagaaattgtaccccaaatatggctaataggtggaaagtatattggctaatatatgtggaaaatattaataatcgctaacatgatgagaagtagtttaggtagaattatcggactgctcatgactttttgttttattggttatattttaattattgtaaaaatatttcctctaaaacagtaatatataattgatagatgatgagctctagctaacattttaaagttattattagtgttatcatatgtattttcatatatatatatataaatatttgaatgaattaaattcatttatatatatatttttgatttcagttccgtacaaaaagtggggcatatgtaattcagacattattaattgctacttgtcgatagaactgttaagtacatgtcatataataaagtttctttatatttggttgttctgagtttaattacgaatgaacatatatatatatatataaaaattggtaagctttccatggatttgtaagatgtgacaaattattggataaaatggatatggatactccatattttaatttaataaatattttattaaaccgttaactaattataaattactttaatgcgccaaagaacattcttactaatattaaatatgaatgatatcccataaacacagatatgaaagactttattaacgagccagtaacaagtaatttctgaggaaaaccaaattaattacggcaatgtatacatttatatct

SEQ ID NO: 193701 - DNA, 1718 bp, Cannabis indica
ggtgagattcgttctattaaccccttatatagttaaggagtttctcggttcgatgaatatttcattccgatcaaaaactttatcttgtaaaaaggatttaacttttttcctctcaataaaaattcgagaaaaaatatacaattctcgtaatttgtatccaagaattaaactgtgattcgttctattaaccccttatatagttaaggggtccttcagtttgattaatattctattttaatcaaaaactctatgtcgtaaaaaaaaattaacccgttttgtcttaataaaaaattcgaaaaaaaaatatacattcttgtgatttgtatccaagagttaatcataaattaaaaaattagattgtgaaattacgaaacataatttttaaaaaattgaatcaatacttcaaattcaataagtacgagtaaggaatagattctcttgtcttggttcatatttagaatggatgatattgaattagatcggaaaatgattcagggcctcagaacccaaccaaatgttctctgaaaagtaactatcaggtttagactcaaagtagacaatatcatatcagtgtagagtggagatagaaatataatattttaaatttccgccttttaaatatttttcttaactttcgcccgagtttgcagactttttcggtatgcaagaccatatgaataaactgatattggttgcctttgatctattttcaggaaaactaataacacagagcttgtatagaaacaaagaatcatctttccagggaagagggtacaaaagcatatcgaaaagagtagtgtttaccattcccaaatgttcttcaaactccaacaacaatcaaaatgactcctctaataaggcaaaggcatgtatgagacaaacttgtaactcttcaactttaattacatactttctcatttctgcatcacattgcttataatttttcctataaactatttttctttcaatatcactaatgaaagtggtaccaagatgctttttctctagtatgatagagccaatataagatgtttccttctatgttgatattttgtgctatagcattatctcaagtttataatatacatcaggaacagatatgacatgaccttattgtatctacttcaacttttccaagctttttcttgtcataaatacacttaaatggagtccataaaataagtgttttagttcgatagaaatgcacttgatctgtaaaagtcactctagtgcattcctatcgaactaagactttgttcggttaaaccttctcgtattcccttagttttagttcaattgcagttcgatagaaatgcactcgatctgtaaaactaaggaaggttttaaccgaaccccagataaaaatatgagttgctaaattcatttacagttgaactagggtgttgtaaggaaggacatataaatatgtgttcttattgtatcacattctcttgctttcataacagacacctttcggatactctagaaaagatgttctattgattggggttggagtaactgctcttggcattggcttgaaaagcggtttagaggtatgttattattttaagggatatttgcagcataactacctaatatttcgagtttgtaatcagcgggaattacccaatgttccttaaagttaatttcgtccaattatgatcttgtgtaagaaaacaaactcacaaacaaaatctgttgggacgaaattacgcttt

SEQ ID NO: 193702 - DNA, 1762 bp, Cannabis indica
tccgttgacaaattacctcttctcatatatacaactaattttggcgggagatgtacttcttcttcttcacctcccaacttccacgtccttttttgttttcctcttcagtaaaagaaacaagtgttgaattccttagtcaaaatgacgcaaacaacggagccatacatgtgggaacttcagtcagattggttctcacctactcgccttcgtagcaatcccaacaccccatacgattttccggtttaaactatcttgccttaattcttgtgacacttctttctttttccttctttacaagtttggttactgattttattttccttcttgattgcatttcttcaacaactaaaaaaaaaagggagatcggtttataccaaataggagtttgatggatcttgatcaagcccacagtttgttgacaaacaggaccaaaccccatcacaattcgaaattcagtgtacattttaaaatggacttttgtgtgtttgatcgaatttcattgaagggtttttgagttcttttgggtttatgtcatggggagtctgattttcttggtgaatgtattttcaggaatcataccggcaaaaagtagaggacaatctgactttggattcacaaggtaatccgtttaggatgttggttttcagagggagtccaaaatctaaccgaagatcgattagatgcgtcgatgagatgcggcgagatgaggaagaggaacagcatagtcataacaagaagtttcatattcgaagtttgccaaaggtgtagggaagaagcaagttcacctaaagaacacaactactgtttttatatttttgtttagctttggttttttgtgtggattattagattactttattaagttttagtctgcgtgtgtagggagaaaccaggattttagatgcaccaagaattgtaaatgacttctatatgaatatcatggattgggggaagaataacgttcttgcagtggcattgggatcagaattatacctctgggactccaagactctgaaagtagagaagctatttcaagatgttgagaatgatcttcctacaagtctagcctggtctaatgatgccaaacttttggcagttggatatatgagctccaaaacttcaactctgggatcatgagacttctaaacttgtaaagttcttgaccattaccattagaagtttttcttttacttagaaaactcgttgttgaagctgttattctttgacaggttagaagcttggattatcatacagataggatatcaactgttgcatggaatggtcacattcttacatctggaagtcaagacaagtccatcattaaccatgatggtgattcttgttcatctatcttcagctactttgatctggtttttaatggattttgttgattgaactttttcacaattgtatattctgaaatcattttaattatttgcagtaagggtagcaaacaaactggtttcccgattagaggcacacaaagaagaagtttgcggtttgaaatggtcagaaggcggcaaaatgttggcgagtggtggcaatgaaaatctcatacacatatgggaatcttctaaaatgatctcatcacagttcttgcaccgtttcaaagaccattgtgctgcagtgaaggctcttgcgtggtgtccgtatcagtctgaattgcttgcatcaggaggaggcaccaatgatggaactattaagctatggaatacgcaaaacggcacctgcatcaagagcatagagacctatgctcaggtaa

SEQ ID NO: 193703 - DNA, 1689 bp, Cannabis indica
tatgcaaccacacctacaaaaaatagaaacaaagaggaaaaagcattctctaaactataagctaaataaataaaacatttgaaataatgttcaaaatgaaaatcctaccgcactaattttctggtcaattcaaatattatcttaataatcatcattttactgattatacagcttttatgtttgaagataaaataaaagacagtgcttggattataagcagacagatacttccgcagagccgaatgttttacttttattcaattaaagaactataacagcaagatttctttaaacaaaccttatctggacgaagaatcgcatccatggtgatatacaccagagccgaatcaccagcccattcaatgtacgatgtcgtaccagtcagattctttcccaccaaagctccagtctcagcatcaataacgtgcactgtatatatctcatctcctttcgtatcttccgcataagcaaccaatttgtgattgggactaaccttaaaagcaccaatggagtaatattcgtgttcttgagccttaacattctcatctaagattacatgttcaagactatcgtccccagtaggcatcacatcgttgaccgaaggaggaacctgagcttgagaatgtggcagaggccgacgacaatgctgaacgtactccttcccttctgaggtcctctcgtaatagtagtatggcccctttcgcagtggcgccgtcacatcgtcttccttgatccgtgccctaatttccgcaaacagctccgactccaaatttttcgtacctactcaaaccaatcaatgaatcaaccacgcattatggtaaaattcgagtatatattaaagagttaaaattttaccagacattacggattccgtgtaagaattttcttgccggaggtaggagagaacttcaggattggaacgagaatcatctcgaagccagtaatagttgtcgattcgaacatcgccgaacaactccattttgtgctccaccttcttggccgcgggaggagttggcatcgccggtgccgccatggatgatcggaatgaggttgctccgactagaaaaggtcgaaatgaggaggaagagaatagaagcgggaagtgaagtaaacttacaagtctaatgccgtgattgaaacttactgttgttgaaagcatcttcttcttatttttagttttagctaaaatagaaggaattaacaataaaatttgtatatggtataaaatgtacaatgtacatttttttgatgagaaagtatacatattcccttaaatattattattacaatgtgtaaatttacataatattcaataccacttgtaaattgtaatgattatttcttcgttcaatttgacatgtatattatgatcttgaagtaacaaatgacaatgaactatttttttctcttttttatgtttgaacaattcatttctctattataacataagcatgaacattttccttttggtttggaaagaaatgtaacaatggttgatgaatgataacgatatgaattctatccattttgtaatgatgaacggtttgtattattatgtagccatttcccaaccatacaaaataaatacaaagttcaataatgcattgagagtaattaataatttaataccactcacaaacaatgggccaagccgaataaatattgtattagatatttttaatgtagtat

SEQ ID NO: 193704 - DNA, 2741 bp, Cannabis indica
cctagcagttacagaagccttggcgctggtgctgctgctggtggtggtggttcgattaccgttgattcttctgatgagcagcatcatgaatcaacatcagcggccagattcatgatgatgagatcttctaattcttcgggaggcgttggtggcggtagtggtggattattgggtagtagtagtggtggagtgagctgtcaagattgtggtaaccaagctaagaaagattgtgttcatatgaggtgtagaacttgttgtaaaagccgtggttatgactgtcaaactcatgtgaagagtacttgggtcccagcttctaaacgccgtgaaagacagcaacatcagcaacaactctcttcacttcaacaacaacagcctaaacgactcagagatagtaataataatgccttgatcatttcatccaattcttctcgattacaaaccacccattcaggtaagtaagggtttttagttctcctgtttgtgttattaccaatgttgtttataaattgtttagtgtttttaaatttaatccatgtgggacttttaaattataggagggttagaagttgggaattttccatcggaagtgaattcacaagcggtatttcgatgcgttaaagtgagttcaatggaagataatgatgatcagtatgcatatcaaacggctgttaatataggaggacacgtgttcaagggaattctgtacgatcatggacttgaaacgaattacaacaatatggttggagaaacttcatcgggcggtggtggagggaataatcaatcagttcagccgttggatcttataaccgttgctgcaactgccacaactgccgaagcttctccttcagttggagcttttgatccttcttctctataccaacaacaacaacaacaacaacaacaacaacaacctttaaatacttacatagctggtacgcaattcttcctacctccaagatcttgatcttttaatcatcatcatcatcataatcatttaatggtgatgatattgatgattatgtatgatcataattctcttcatcttattaattagccctagctataaatatatatagctactcattcttgttatctttcttcctcttattattataattattattactattatataaagttcattttgattaatgtagtcctactgaaacatttgacaaatttaagcaaaagtatatgatgatgagagaagagttaattaattactattttaatttagttctagctaggatatatatacatttatatatgtatatgaatcatgatcatgattattattaagaagagtactaatgatatatatatatcacatgataatcttttgttttaattcattaatttttgtttacaaaaaaattaagatcttggatcgaagtggttataatgttaattattattaaatatacgattttattatatatatatgatcttggaatgaaatgaaatggaatggtttatttttcttctttaaatatttttacatatatatctctaatttttgagttgatttcatttaattattagtgtttttctttaattgattttgaatttcgaagctgcttctattttttattttccctccctgtttacctgtatgcatgtttgctggttttgaaattaatggaattattagtacaacttggagtttcgtcttttatattggcaaactattaccacgcaaaattaaattaaaaatataattcaaaagaaattattgttattattccctcttggtatgggcatgtatatatatatgtactccagtactccagccatgcattacagttaataatgtacaaaatctctctctcactctatctatatatttataaatatttcaaatcaatatataataaaaaaactttggtatgtaattgatgtgacttgttatgtgttaaaatgggaaatattgcttttatttcatctggtgatgtgcttgaagaacctgcaggaaattaagtgtacattcgtctttaaatgctaatatatactacattatttgagtatatatacatatatgtatgtatagatgaaatgattatatatagtaacgtttatcaatcatgagtaaaaatatagaaatgtggattcaaaacagaaaattgaaaggtttccttatgtctacgaatcatttcatctcatctgaccatgacatgttatcttattttacatagttttatttttcagtaagtattcccaggccagcattaataaaaatcgtttcttattattttttttttttacttttaatttctacagctatatatatatgtatagctcgttttcttaggtaaattattatctcattaattgcttatcgtgctattctcaatctctttatagtggttggtttagggtagattcgtagggagtaatatttttctaactccataatgatccccctattccttcaccctcttgtatctatataattttattattaaatggaaatcaattaatggttttattctagccatttattatatatatataagaaatcaaattttgaagatttactttgttaccactagttaaaatttggtagctagtagtgatgtgactaaagtttttgtttgtataattaatacaatgtttgttgaaaattcatgtatatgaataagttggattttctatatagtgcattgtcgtaggaagaaagggaatttggaaaattttactaaagactcatttagctgattatatatataatatatattatataa

SEQ ID NO: 193705 - DNA, 2046 bp, Cannabis indica
tatatatatatacatatattctcaaataattatatatatatttggcctcttccaccatgcaatcgcataatatattttccatgggggccatccccgattcccgttttgctagctaattaatttcaaaagcaattataaataatataggtatgtatagatatatacatgcatggtatatatataatattgtaccaataatttttcaaatatgttaattgccgtcttcttttaataaatatagatttaaaaaagatcacctgatatttattggatcataatataatatatgatcctagaatagtatgttaatgcttcacaattatatcatatatattgtgattattatttaatttcaaattttcttacatataataacaatgagatctatagatcaaattatactaaaaataaatagagaaaaatctaataaaggaaaatgacaaggtagggagatgaagagcaggttatgcagggatattagattgttttgttgtgatgattaatatatatatatatatatatataaatatatatataagctgcacacatgtgaatatatgtgggtacgtacgtgatgcttaatttgtttctcaccaatacagacaattaatacgtttctgcaccaattatatatatcaatatatgatattattatttctcataataatcaaatcaaacaatatactatatatatgcacgtacgtacgcactatataactaaaacatatacatatattatacactaaataacctaattagctatttatctatatctatttttatatagcttatcatcatatatatatatatataatataatatcttacaaattcttgtgtacgtatatcacaatgtttgaaatgtgagtagtcatcatcacgtgaggagagagagagagaatataacttaaagaaggaaggtcaataggtcatatatatatttgttcaataattaatataatatatagttattattagaagcgttgttaggctatatatatagtgaaacgacgtttgtatagtgtgtacgtgcatgtatagatatatttatagagagagagagaagaaagggaaatctacacgtgaggaggagagagagagagagagagagagaatgggaggtaggagagagagaggcatctcgatagctgagagggaagcgtcaaaggttgtttagctgtcaatccctccaaaatctcctcctcacgggggcctctcttcttccacaaactactctctctctctctcatgcaaactcacctagctagctaatataccatctcttttttacaattataccctctcgccccagaaggatgtactaacggagcgggatcggagatcacacttttatcgagactcgagaaatacaaaaagacattaatcatatctaataccactaaatgaagtgttatattgttatttaatattaggtcatacttattttattttaataagagaaatactaaaaaatactattggtatttactattttttttcggtgttatactgttattgatgtatataattaagtatcaaatctcatataacttaataaaaaaaatgaatcaatcataaaattgtgcccaataacaatattcctttaataataactataaaaaatggctcacaattaccgagagagcaccatctcatgatagtgctagctagcaccatagtgtacttaataacaatgttatgcatactctataatagtttttcttaaattatatatactaaataattagtatgtctctcttatattattaaatatgactatttgacagaaattgttggcttaattttttttctttttattattctattaaagttaatgatgaaaactaatgcttagagttaatttaattgtattaatagtgtaattttattattattatttaaattatttttttatgtaatagtaactttaaaaaaactctaaataaacatgcatgcattaaatgttactaattcttaatttattaatataaaataataaaacaaattaatgataagaaacataataataatacctatatataaaatg

SEQ ID NO: 193706 - DNA, 1930 bp, Cannabis indica
acagatgagcccaaagttgagacgcgttgtatagtgagtcttcttacccttttcaccaacccaccgtcataatcatattcgaatccgcgttaaggcaactaactaaggtgtatagtcagtcacatgtgagcagaattgtgccaaacaaaaagaaaatcttagttacctctctatggattttagtcctaaagttatatgatgaccaaaaatatcagatatcattatatcttactctcatcattctgattggactcttttaacaaaaaagaaaaattagaaaaaaaaaaaaaattcttgaaacttaagtgttgtttctatatggaccacatgaatagtaagagaagaaaatttcactactttatttcttcttttctttcattagcttaattggtttctcttttactaataatatataattaaatatgaggtgataaggcgcactagaagtaatgatataaatatgttgaaagtgctagtaatagtagtaaaaagattagaatattaaggctttgtttggatcttcattttccttaaacaacatttttattaaacttatggtatctaagaagagatttctcaattttttgtttaaatccaaacaagagaaattgaaattctactttctttttgtttttccctctcaaaatccaggattcaaacacaagctaaagaggattatttttatcttttagttttattttttaaattaaaaaagaagaatatatacccaagtagtttgtagcaaatgtcatctcaattttgtcttcagagtattccagtgtttgagagaaaatcccagcattatttctgtacaaaaataatggaataggtataattaataaaaacttaatatatatatcctattgtaatgataacaatggtactatagtaattagtaatgataaactcacatgagaatattgagtggtaatcctagagcaaggaagtcagagcaaaatctcttcacagaagcaaaagagctaagatcaatctccaaaactataacctcagcctttggattctctctttcaattccctctttcacttcagctgccctaatcaaatccctggctggaatcactactctcactcctctctttgccaaaactctagctgtctcagctccaataccagatgtcccacctttaattaagtaattaataatgattagtacaattatttaattaactactaattattttcatagcaaattaattactgaaaatcttgttcaaaaggggtattattgatcatcaattttgtttgtcttttattgagttaatttagatagacaggagtagtagcaattcatgtgatctatactctggaccaataaattaaagaatgtaattcagtgatatgtatattatgatatatatcaaaagagacaaaataatatcttactactgccaaaaagagccactgaattaatatatataaataatgtaactagatatatatatatatagacagaatatatcacaataataagtgcaggtagcctttgaagaaaaacaaaataactatactatatattaatagttgtccccagaaatgcctttatgaattaaaaaaataatatatattatgaaaaagtcctggaacaaacttggttggaaataaagaatcgaaacatctatttatgttatcctgattcctcagcatatatttatattccacagaatatataataatccgaaaattcagggaaattcaccactaatatttgttgagagagagagagaaaaagcaagaagaagagagaacagtgatatgaagaaaaaaaaaaaaagtaaatcagtttgaagcgttatcattttatgttatatatataatctaacaacaatcctaaacagccaaacatagaaaaactcgcttgatgatcagaagaaaaaaagggtatataattttatagagacaatattctcat

SEQ ID NO: 193707 - DNA, 2332 bp, Cannabis indica
attacaagattccctaaataccacactcaccgttttattttctagaagaaaatctccaattcaagtaatcaatcacaactaactaccctatgaggaatgggtataatcgtaaattcacattctcacgcaaactcaaactccctcccctctaactatttaacaccaatacttttatccttaattattcttttttgactattattattattattattaacagaagaaaaattttcagtttttcacgcgcatttaatagaaagaagaacatcagcacgtacatcatcctctaaattacccgatttcacccttcacttaggactcgccacgtcatcaacagtagaagcttaattccacgtgtttatatattattggttgaaagatatagccgaatacttccttaccaagtatattgctgcgtataaatagtctgaaaactctcaacttccctttcctcccaaactaccggaccagactgatacaattctctttcgccatgagagacgaagaagattttcaacgccgtgaaattcctgatctgagtcttgaccgacttaaggttctctccgctctcggccgaggagccaagggcgttgtgttcttagtcaaagataaagaccgcgacgagtttcttgctctcaaggttatttccaaggcactgatcgagaagaaaggaaaagcagcggcaacagcagaaggagatgagtaccggagagtctccttcgagaaaggagtcctcggccttcttcgtcacccgctttttccgagattacgcggagttttggatactgataagcttgttggttacgccattgattattgtcctggacgcgatcttaatgtccttaggaaaaaacagagtgagaaaatgttctccgatgatatcattaggtgagttgatctatcaatcaatcaatcaatagatttgaaggttttattgttgattattttgactgaattgaatttgatttgatttgattttattcttgttagattttacgcagcggaactgattcttgcattggagtatttacacaaattaggaatagcttacagagatttgaagccagataacgtaatggttcaagaaaacggtcacattatgatgattgatttcgacctctcaacaagactctccccaaagtcgactcctgcatcgtcaccgagttcatcaaactcagtagcaacatcgcgtaactcagtaagcatcaagaaacgacaatcgccgttttaccgactctgcaactcaggaatttcgccagaagactcggtctcacagaacggacacagcgaaaactcagtacgagccgaatccgactcaacagaaaaatcaaactcattcgtcggaacagaggaatacgtagcaccagagatcatctcaggcgaaggacacggtttctcggtggattggtggtcactaggtgtagtcctatacgaaatgctatacggaacgacaccgtttaaaggttcgaatcggaaagagacattttaccggattctgacaaagacgccggagttgtacggagaagcaacgccgcttagagacttgataaagaagcttctggaaaaagatccgaaacagagaatcgagttggaggaaatcaagggccacgatttcttcaagggattgaattgggaatcggtggttcagatttcgaggccaccttttattccggagaataatatcgattattatgatatcgaaaagaataataataataataacaacaatacgaatattgacgtggaatcagttgtacaaggcatattccaaaacgacgacgttgaaaaaaatcagaacaaaactgatcaaaaacaagtctgggatggagcttttaatcatcaccccactcaaacagaaaattttcttgttttttgtattttttttttttaaattttaattagaaaatattctttatttgtttatataaatatttgtacgacttagatatatagaatatcaaagaataattatatttaggttttgatcatttacttagctcaaacttttgcaacctcaatttttggttgaattatatatgtataaagttttaatatgcataattgtattataaatttatacttattataagttacaagtaagtagtctttggctgggatgggaccaatttcaaattttcaattcaaaaatgaaaaatagagttggttaagtttttgctttcataataaatatagcacatgattcttaaatattatagtgtaaataaataatatattattacataataatttttagtcggtaccgccgataatacattatgagcctcaaatttgtgaaattaatattggaccactagtactactatattattat

SEQ ID NO: 193708 - DNA, 788 bp, Cannabis indica
aatttttataaaacacaaagtttaaaaaagtattaaccttttattttttttttttcttttttattttttgaaaaaaagattgtaatatgataatcaaatcaattattataagagtactaaaaaatctccaacaacatccgttcatgtttttttttttatcaaattaagatttttactttttttgttttgcaatttatctcttgagttttatattttaatttttacaagcaattgtttggttattatttagtggctattaaatgtcaaatttagaataatttgtagcaaacatcattgagttgaaacttgaaattcatcgactcccaaattgagttgagtggttgactaatattatgacatgaagcctaccaaaaaaaccaatatagccttatatgtgtttatattgaaaaatatatatcacaaaccaaactttttcttgatgcttttgatatatgaagttcttgaccaaatatttcaagactttccatcaattaagtgatattaggctttataagtcaagcaattcggcactttatcatttttttttaaatatttttataaaatatatacacaaaatgagatcataaacattatttgagaagaaattttagatgaattggtcaatactttaaatcactcaatgaccaatgacctagggtacaaggaagatgatattgtcttcaaaactgtacaaatttttccaattatgataattaagggatgccgattaaaagaaaaccttcaatttttttttttttttagtttttgttagaaaaagttaagtaaac

SEQ ID NO: 193709 - DNA, 2210 bp, Cannabis indica
caatagacattataattggaattgatgcattaggtgtgtgtgagagagagagtgtgaaatatagtacaaattatatatattaaaggcctttgttattttccttttttttgttttttttttttttttaaatcaaggccttgttatttaaactaataatttttttttaagctaattagaatttttttcattcgaattttgaaatatattaaattatgtctcttgaatttttttgggattaaaaattctttctattgagattgttatatttaaagacttttgtctaatttaattcaatttactgtttcattgattgtttatgtactaaaccatgctcccaaactttgatatttaccaaatcatgtccctcaaattttgatatatattaaattatacctctgaacttttatctatgttagaatttttttacaagaattagataaaagtccttaaatttaacagtctcaataatttaagaggaataacaaaaaaaatttaaagatataatttggtacatgtcaaaattgagaaagaaaaattttaattaacttgtttttagggaacaaaccaataaaattaatgccttatcattcaaattattataataataataataaataatactaattataatagtttgacactaatgtccttctcattatattaggaaattaggaatgataacgtacaatttctttatttatttctttttttcaaatattaatttatgggggtaattaattaaaaagttgtaaactttcgagagaaaaaagaaaaagggaaaaggaaaaaaaaattgagagtgtgggaccattgcattagggtttcacaccatgttatatgtttgaataaaaaaaagaagaagaaataatgagagtatatattgctcttgacaaaaaaaaaaaggagtatatattgctgtgtcatcagtataattatacagtatatatagagctatatacgaccatatatgaagctgttgacaattactctttggtgaagtagatctgaaatctaccactctcctctaaagacagattacagagagagaagaggaagatagatagagatagacagagagagagagaaagagtgagggactcacaggtttttaacactagaaaaacctactgatactgattgttttgaaggtctttcgttgaagaaggaagtgaaaaagagggactactcatccttttgctctcccttaagtggagagtagtagtaattgtagcaacaaacccaagaaaaaaccatggcttcttatgaagctacgaatgttattttcaccaaggtcaagaatttagacccagagaatgcttcgaaaatcattgggtacattctcattcaagaccttgcagagaaagatttggtgcgactggctttcggaccggataaccttttgcactcgttggttgtaagggctaaaatccagttgggactttgctcgaacacttcgtcttcaccttcttcaacgccttcttctccttcacctcttaaccccatagccaggccatctaatattagctgtaacagtaacccattttcgcaatcttctccgagactcccaaacggctttgacttcaagaacccttcttctccatcctcaaattcttggccgctttctgggttttcaaacaaccccattagtagtccgaagtctagtcccttgctctcatacgacaatattcggtctgggtcgtttccactcccgcttcaccactacaaggatggtggcgaggctgctgttgctgctagtgctgacctcattgacgagcatcagctcagtgagtacctctcttttatgaacgactcgtcgtctaggggtgaggatttagtcgatctgcggctcgaattgggtcacggtgctcatgattggggtcattccgtcaacaatggagatgcccatttccacagaaggagctactcggctagtgaggtatctttcgggactgaagattcaggcttgggtattggatttaagccttgcctttacttcgctagagggttttgcaagaacggaagcaactgcaagttcgtgcatggcggcttcggagatgtagtggaaccttctggtgccattgtgggttcgccgagtaagttcgagggcttcgaacatgatgaaatgatgagatggaaggctgcccagcagcagcaaaggttagctgctgcatctcagttcatggctggagtctcaccatctgttaacaagt

SEQ ID NO: 193710 - DNA, 1246 bp, Cannabis indica
gaagtcttttgattcatagagtcgaattcccagtatagcttcttctccttcgaagaagatttcatcaaactcatttttctaaacaaagtattgccttttttttgttatgaatcttggtttcttgaataggttacaattgactatgattaagttgataagcatacttaggcttattcatactccaactcagttaccatgtgagtatgctattttacactgtcacacttagaaaaacaatgagatacaattacagtttatcaaaacactagttatttacttgtctctaattggtcttaaaatggaatctcatgattcttaacgattactttgttttctaacattataaagatagcatgttgatataaatgaatcaaatttcaacataatgtgtaggatatatgcagtggtgcctgttgtgtgacagctgtgattgaagaaggtgatgaggttatagtttcaaacgtgggagattgcagggctgttctttgtaggggtggagtagctgaagctcttacaaaagatcacacagtggaaaaagaagaagaacgaaatagaatagaagccaaggtacttctcagttctcacaacattaacttcatttgattagttgtcaagtttacttgaaaagctaagattagtgacatatttgattcagggaggatatgtggagattcatagaggagcatggagagttcatggggtacttactgtttctagaagcattggagatgctcatctcaaggattgggtgctagctgagcctgaaaccaagattctgaagctcacaccagacatggactttcttattttggcctccgatgggttgtgggaaaaggtgagtggtactagtagtagtagtagtggaagttaagaccatgtttgatctttattttgttttcaaatgtgttttaaaaaaatttatcaaaaaaataatttttcgaagtttttaaaacacaagttgcgtttaactaatattttctaaaaacaatttttacttttattttatttattaaaaacacttcaatactttgagatcctgatatgaacaagatccgatcaggattcggacttggatcttagactaggacttgaacccggcctcggacccatatccagacaaaagaaaaagggctttggactcgaattcaaaccttgatgagagagaaaataaaaagagaaaaataatatgagaaaataatgagaaagtgacaagaaaaaaaataaatgagagagaaagtgaagatag

SEQ ID NO: 193711 - DNA, 548 bp, Cannabis indica
tatatatatatataaatacatatgtggacaattccacataattattaggcggcacatatcgaaataagtcattttaaaacatggcacgagtagccctaatgaggttaaacgccattaagtattaaaagttattatctcgtccattagcttctagtactaatagtattacacgatcaagactcactataattaaacaaattctttaataccgaaagactgtcctaacacgtggacgaccaggatgaattgaagtcagactttgatccctttgattggggtgacaaatcacttcaatatataatataataataatttaaagttgtctatatttgttgtaatcgatcagaacaatattattagtggggttttgaattattatggcacggcacgtaaatttggagtaagtatgagtgtttttttggcaatttagtagtgctgctgacccctcatctttattgctctccttataaaagaaatggatgtagcatagatagaggtgtcaaagttgagtacaataaatttttaaaaccgtttccaaaaaaaaaaaa

SEQ ID NO: 193712 - DNA, 1916 bp, Cannabis indica
tatgagctatatagattactttcaagactgatgaatataaggatttctggtcttctatttgatccattgttctttacactacttatgctaaagctttcacatttctattgcaggagtcatgaattgatggaacgtttgctaaaagtttatatatacaaggaaggagaaaagcccggattccatcaaccttatctgagaggaatttacgcctcagaaggatggtttttgaaactgatggagagaagtaaaaagttcgttgtgcgggacgctaagaacatttattttatttacccttcagctcaaaaatgctaaggataacattttctgaacaaaaatctgggggcaagaaggaccttgagaaatatctaacaagctatgtgagtttaatctcaagaaaatatcgattttggaacagaactggaggagcagatcactttcttgttgcttgtcatgattgggtaagctgcttttcccatcatttttatattctattttatagctcgccagtatcaagtatggctgtttttaatcttcaaattgaaataattgggagcttacatattacaagtttcttgtaccttgtaaaattgataaggtaagctgattactgttcaaatggtagtatacttatgtctcataatacacctttccaaaagtattatcagtggcaaggcgacaacctataatagtaccacttacaactattgtgcatatgaaatttcaggccccttatattacagaaaagtgcatgaagaattgcatccgggctctttgtaatgccaatgttggtaaagacttcaaaattggcaaggacagtagtctacctgttacttatattcgcgctggagaagcccctttgaaggacgttggaggaaaaaccggcttcagagagatctatcttggctttctttgcaggtggaatgcacggctatctccggccaattctgttgcactactggcagaacaaagaaccagacatgaaggtttttggcccaatgccacgtgatatcgaaggcaaaactctttacagggagtacatgaagagcagcaagtattgcatatgcgccaggggttatgaggttcacacaccaagagttattgaggccatcttttatgagtgtgtgcctgttattatatcagataactatgtccctcctttctttgaggttttaaactgggaggcgttttcagtcttcgttcaagagaaggatgttcataacttgcgaaatattctactctcaatcccgaatgagaagtacaaagcaatgcaattaggagttaagatggttcagaagcatttcttttggcacaaaacacctgtgaagtatgacttatttcacatgacacttcactcggtttggaacaatagaattcttcaggtaaaacccatatgaatatgacatgagaggggcatagttggccttgacaagtctgatggtgctgttttttttcatgccattattaacaatagagaggcaattttggttggcatcgccttgaagttgaagaaaaattatttgagccaggccaagaatacaaatttctcaaatgaaatgccattttggggttgctctttttcccattcttgaatgggaattgcaaaataagctacttagtcattggatacgtgtataaatttttgtaaattgtaaattaaataatgaaaaattcaatgtagagcctacataattgagagttttggctttggcacaccattcaccaatatacgatcctccaaatgtagtttgtataataaaggagcagtttcataaaataaataaatacagagatgatcaaacttcttaattttctgtctaaaagttgggaaaaatcaaattaaattgcaatttttttagttaaattgtaaatttctttattaattttagtatagaagaaaaatataacaatggatttat

SEQ ID NO: 193713 - DNA, 2253 bp, Cannabis indica
tttctttttttttttaagaaaatcagaaaattgtttccatccaaacaacttttatatataactctacagcactccttttgtgtagacttgaaaagcatctgtacttttgtatttgaatgtgtatctttataaaactatgatctctcaaactatttcatatttttcttacaaaatttttaggctttacatataaaatctctaattactttatgggactagagcatttcatttcttgccttcctaacatgatataccaaagaagcaaaaccagtcgagaagcaaagtttttgaaatttgttcaattttactctaaagatccatcgaattagttgctgaagaaaacttgttattacattctaattcagccaagaaataaaattttaaaaataatatatatttttttaataaatgaaagtaaaacctttttcgatacaaaaaataaaaatcatcagtttagtaaactcaacttttactcaacttatcaaaccaatcactatcttcaatttctctctttaaaatgagaaaatcaatcacaaatttctctcttaattgtaaaggaatagtaaaaccaattgccatgtcatctgctgaatcataccctattcctgaatattcggagctcacctaatcattggcacaattcaacacattttcattacagtacaagattcaccagctgtccctatctttcaggaaatctttccgttattctttatgcaattgtatactgccatctgtaatctttgtattggctcttgcctcttgccctgtaattgactctttctataaatgaaatgctctgcctcagtctctattgagctgagtttattatacctgatatatacctagaatttcacttggtatcagagccaacgacggcctccgccgatgtcgacaccagaacaaggtgactccccagcaactccagtcatgagctctgctggtaataactctgccgccacaggaaactccactgcgagttcatctcagctcccaaacacctaccctcaacatttcagcaccttaaaccatccattctccctaaaactcgaccgaaacaacttcaccttgtggaaaactatggtttccaccatagtcgggggccataggctcgatggttttctcagtggaaccaaaccccgccctcttgaatttttacttgcaggaacaaatgcagaaggagtcgagattataagtgtcaacccagaattcgaacattggatcatcaatgaccagtttctcatgggatggctatatagctctatgacggagacgattgctactgaagtcatggaaacttctgcagctgctgaattatggcgtgcacttgagaacctgtatggcgcttattcaaaggcaaagatggacgacactcgcactctaatccaaactcacagaaagggatcttcaactatagcagagtatttacgacagaaaaagtgctgggctgattctctcgcactcgcaggtgacccttacccaaaatctcatcttatttctaatgtattgtctggtttaggcgcagaataccttaccatcattgtacagatcaaagctagatcaaaaactacttggcaggagctacaagatttgctcctcagcttcgacagaaaaatagagagaatgcaaagtctcgaagggcctaaaactacacctccaccagttgcttctcaagcaaacatggcagccaaaacagcgtctcaaggaagaggaagaggcttctattctcagaatcaaaccaataataatggtggaaaaggaagtcgtggcagatccaaaggaagagggcgttataataacaactcaagacccacctgccaagtttgtggcaagtttggtcattcgacaaccgtttgttacaatcgttatgatgaaaacttcacgggacacggtcctaatgctcaaaaccagcaaaaacaaggtcacaatgcctttattgccacaccgaagatgctggatagtgatgcttggtttgccgacagtggcgccagcaaccacatcacttgggacactaactctatgagccagaaaaatgaatatggtggtaaggaaactctcaccgttggtgatggcagtaagctcactatctctcacattggtactggttttttaaaggctaattctggtaagtttcttatgttaaaacaaatgctacatgtgcctaaaatagcaaaaaatctgattagtgtgtcaaaactcaccactgacaataatgttctgattgaattctattctgatgtttgtttggtgaag

SEQ ID NO: 193714 - DNA, 2223 bp, Cannabis indica
tgaatgaatttcaggtttcttctcttttccatgatggtttcatagtgtcttattaatttttctgagttttacatttatttatttacctaaatattgtgcagattaaatgctttaacgcccctttacaacctgctgagattgtgggtgttaaaagggttgttcaagaaaaacaaccaggcggagtcaatcaacttggtcttactcttactggtttcctttttcttcatgctctttttatagaaaaagggcgtcttgagacaacttgggctgtcctgaggaagtttggatacgatgatgatttgaaactcagagatgatattcttcctgttccttctaaacatgctcctgatcaggttattgtctcacactacatttgattattatatttgtagccaaatataagatagaaatacaatgataatactatgaaattcaatgaataattgaagagatacatgctaatttttagaatatctgattaggactattaatcctttattttagatacatgatttatgcattatattttagtttggatgataaagtggaaatttctaaatgtatgctgaacaccaaatctgtctttttgaaagtaacccagcatgcttgattacagtcataagtgcactatgaatcaactcaaaggatgtagacctatgttctgatgaaaaaataagtattgatgttctgcaagttgacaaatttcacattgaaaatggtctttattatgaaaaaagttggggaactaatttcaagtatgtacttgaaactattttttttcccgaatttctctagacgtagaaaaagatgtactgcaagtggtttgagcttgttcagtcacatagacgtccagtaatgaactcccccatgttacctagtattaccaatcctctttgaacttaaatcctgaaattacaaacaaaagctgtaaattgtagaacacaaatgagatttcgagcaaatttgataactgaaaggagattacaggaaagttttgattttagatcagtgtgtgggctaagttttatggtactcattccagcaacttatgaaaataagtattgagcaaactggcaccactagtcatgttatcattgtcatgaagttgatattccaggagtatgtgtgggacaagtgttagcaatttaaaactgtttttgttttactatgctgagcatgagatcatcactggtctctcaaaattccaagttttgttctaaattgactggaaatcttctaataagagtgattcataaaactatgtaatgatctcttttgttgttctttcacaaatctaagaaatggcaagtgaaagtataatctttttatcttttcgtcatcaatatattttttttaataaatcatcaacaacatcattattattattattattattattattattattattattattattattatcatcatcaatatcattatcattattattattattattattattattattattagtatttttctctctttggcttttctaaaaagatttcttaatatatttttttgtagaccatggaactaacaagtgaagcagtggagtttctgaaggggatcttccgattatttgatactgataatgtatgttttaattcatggaaaattcttattttgtacttgtgtgttagtttaatgctgtgaatgttgacatgcatctaatgtagatttttatatatgtgctttggcaacattcaggatggaaatctaaaaccttctgaactagatgagttattttgtactgctccagacaggtgacttgagctattaggttttctttcttagtaaatgttgtgcttacattttgtgaatgtttattgtgttttcttaaaattttattgagtagtgctgtcttaatattttcaaattttaaatttcaggccttggaacgaagctccttatgaggatgctgcagagagaaccgctctgggtaatttatctcttaatgggtttctgtctgaggtctcgtatgcctatatagcctattcattctcatacttcgcacagcataactggttttgactttttcatatttattgtgtttcttatatgattatcatccatgagtttccatccccaaacaaacttaggaaaaccatgatgaaacagcacattctatgtcaaaattatagtaatatctctaaaccattattaatacacaaccccctataaatagtcaaatttaacaaaaatttcacctttgtc

SEQ ID NO: 193715 - DNA, 1422 bp, Cannabis indica
aaaaaaaaaaaaagttaagaaataaacaagaaaaaaaacaaaatgtaccaaaacgttaaaaaaaaattaaaaagatagaatgccactcactttaccttatctaacatcaaaattaattaatatatagatatagattagagagataaaaagtgaacaaaaaaacaaacaaacaaaagtatataatattaataaaatacaaaaatatatagaaaccaaatcacatcttcaaaagtaatttagacacttttataaatttgtaagtcatgttacatagatatatagcatagatttgaaatggtggaaatctaaagaaatttgtggaagaaagatagaaatggtgggaaaatgtccctataataagagtgtataatatatgtatatgtatacatataccattgtggcatggcatgtgcatatatatatatatgtgttatatatatctactaagagggttatatgacctaattttccaactatacaaaaaaatgttgaattgattataacacttctcacattctcttcatcatcatcgtcccactaagctagtatatatatccgtatctcaacacatgaagacaaatgatttttacacgtatatatatatgccacctatgtataatttattataaatatatttatgagggagagaggtattaataggaaaaagggtatttttaaaatgaaaagaaaagtaaaagtgattttgaaagtgggggaagattagattggattggattcatataaaggtactatagattttgtactaatatatatatatatatatgtatatacatatagtatttgatgtgtcccaaggcacatgggtggtaaaacatgttatgcttataagttatatatttgtaaataatatatatatatatatatattttttttgattattaatttatttgtattaatactgataaagataccatgacacatgcatcaaagattgggcaacaaaattgggtcccttttgggtaaataagacaacttagacccaattaatgggtgtcaatgggtcgggtacagcagtactgcccatggtcctatctcatgggcccaataatgatgtttttgtgggcccaaactaaggccttttctctgacaaaataaaaattattcagaataaaaacactcatttttcttcaaaactacaaagtcaaatgatgctcaatgatgttacacttttattaaatgttttctttacatgtttattattaattaaaatttattatgaactaagtagtaatcctgaattggctgttaattatatatctgataaaaataatacactatctaaaatgaaaaatcgatttaatgtgttaaatataattatatttctcatctcacatcctttagaataattgttcaaacgtacataataatgtaattagtaaaaattaagaatatgtctattgc

SEQ ID NO: 193716 - DNA, 1246 bp, Cannabis indica
agaagaagctttgtatctccttcctttactccaaatagtaagaaactagaaagaaaagagagatagtgtgttaagttaaccatggttaaataaaaaggtgttaggtgaggtttactttgactagtctggtttggtaggcgttggtttggtctcaaaatcacctcacacgctcctcacgcgcgctcacccatacaccaacacacactatctttctctctctctctcccttctacctctcaccaccccaattattatttttatttattaattaattaatttattgagtatatatataaacacctctcttatttctcgtccattcttcagtttctggctctctctctctagctttctctctcttcaactacctcacccaccttcctcaaggagagagaaactctctctcagctcaaaattcgccatcaccaaattctcaacctctacagattgatcgctgtgttgattttattttgccggtgaacggaatctggaatattcttttctcttgtaagtatcgaattgttttggattttaggtaaaagtttgggggtgtaggagtaatggagccttcgtcttcaactaactcgatgaagctgtcgccgttggatctgatgactgcgattatcaaaggtgtaaaggttgacccgtcgaatatgtcgtcggattccactgttgctgaggttgctacgttgataatggagaatcgtgaactcgtcacgatcttgactacttctgttgctgtacttattggatgttttgttgttcttatgtggcggagatccagtggtcagaaagtcaaggttttggaacctcctaagccgttggttgttagggagcctgaacttgaagttgatgatggtaagaggaaggttaccatcttttttggtacgcagactggaactgctgaaggttttgctaaggtttgatactcttaattatgttaaactttgtaggtgtaactgttaagggcgtgtttttttttttttttggttttctgtaaattcatttgattggaatgttttgtgaattatataggctttggcggaggaggcaaaagctcggtatgaaaaggccgtgtttagagttgtggatatggtactgttgactttcttccaaagactgacttttgattgggtttgattcgctttgttctttttaacttaatttgaagttttgacttttgtttttattctacatgggattggactatttttcaggtatgattatgcggctgatgacgaagaat

SEQ ID NO: 193717 - DNA, 1657 bp, Cannabis indica
gttacaattttggtatcagatccaccgggtttgtctatcgaagattgtgaagacatgtgaaagtttcatcagagaaaagcttggctcacagttagtaagcctttacttgtgtagtaatgtatttgataagtaaagcatgttaggaagaatagtagtttataattgtctattttaatgcattgccttaaaaaccataagtgcggtagtaagattgcaaattgggccattgcctcactagactgacttaggaattgacaggtttatcctatagaatggatacatggtgcaatatggagagtcagtataatgtggttagggctagtaactgatatagagaatggaatccaagttttccccgtaattgaggtgaaagccattggaaggtttctggcgagagtgatgattattcaccacaggctcaattagatttggagcaaaggtttacagagatggaagctatcattcaacgacatgaagagaaaatttagaggttgagataacaaagatcgcctgtagtacctttacttcatatgccaaaagttttcaatctggtattaccagcagggcagagtatggctagtaaacaagtggaactattgcatggtgaaaattggatgcaagaatttcaagtccttcaacgagattcaaaggtgaaggacgccctttgaactgggagccctaatgaatttgttttggagcgtcgggaggttatgatagaaggttgagttatcactccccttattcccatttatggtggaagtgctaggagctccatggctgagcagaagaggaaacctgcatcgacagtggtcggtttaagacaaaacaagtggctccgagggaatcaaggcagacctggatgccaaggttattctcaccctagttgtccatgttccagtgtggcatgattgggaattttatgaaagatttccctcaggcagagaaagaagagcaggagtaggaagcaaaactcgtacctactcgagtgtttgatattactcaagtcgatgctgcactcagccttttcgtggtgtcaggtcagcttctcattaacaactcctatttcacagtgttatttgactctggggctacacattcatatgtggcatcaagggcaattaatcaattgggtaggccttgtgactttattgaaaaagggtttggaaccttattgccaagcgacgagttggttatctccaaaagtcaaattatgacagatgtcctcttagaagttaatgacttgttggatttaggtggagataatctaagactgaagtaccacgcaggccttggctatatccttctccttcgtggccttggctgaggcttcttaaagggagcatacggtcccctcaacctcttggtcagttttggctttgtgatctaagcacatctgccgatatttggcgttcaacttctcctcctaaactgctaccttagcctccaaatattcctagatcttttagttgctggaggccacttgggtctcgatctactcaactttagctcgtaaggccctattttcgatggtcaaggactgaactttggcccagagctagtttagttctatggtcatcttccatacttctacaaacaatgccatctggaggaaggaaagtaaagagaaattattaggcataattgttgggttttatgc

SEQ ID NO: 193718 - DNA, 929 bp, Cannabis indica
aacgctggcccatctgaccaccctgttcggagttgtctaactccatgcctttacacattatacatatcaaaattaaattaaattaaattaaataaataatgtaataagatagatgcatggtgaactaataattgatctatagtaactaaatattcggattatatgtaaggtagtcttttctattctactagtttatgttatattaattcatacaagtgttataattatgatgttacaaccatttttgttttggtaagtttttgggttaaaaaatcctgaaaactagagtttaaataaaaattctgaaaatatcttactgtacacggcaaaaaataaattgaaaaactgtttcgaatacaagtgtataaatttctcaaaatagtgcaacagagttaactatgactacaatatatatgcgtgtatgtatatgtgttaggtgttacgtacgtaccagtggatgctaacgttatatttgacgtgattaacgaccctgacaagaacattgtcatcttctctagcgtacagtgtggggccagggaatttcccattaacggtcacgatttgttttgatgaacatagtctactggtgttcctcattaccacctgaaatatatcatgatcacataacataaatatacttaataataataataataataatatgaagtttgacaaaagaaaagagaagttggtgattggcataaaatttcattgcatatcattacgaatacacgttgagacgtgcttttttggtttttatatatggtgtacctgcctgttactatacctagtttcaaattttaacaataatcatgatatctgtaatcatactcatatctcaacaagaaaaaacgctcaaatttatttcctcaaaaaaaaaaaaaaacggaaacgtacttactatgatgtcttggtaagtcttttgtaag

SEQ ID NO: 193719 - DNA, 2108 bp, Cannabis indica
tttttacggattggatgtttatatataatttatcaaaaataataatatgaatataacataacataacatcatggcatggaggaagatcatgagatctctctttctctcacagcttaattgatcatacctttccttcaaatttttcatagaagcagcatttatttatcaaaactcacagagggagagagaaaaagcaacttaacttattctttgttttgagtcttttggtaaattggtatacccttttgcccccctcatcaaatatcatttcctaggttcactgcttcaaactatagcctctttcactcttattatcatttttttctccaactaccactgcattttttcttttcttttcaataaatagtaccctaaaaacacactcttctttgccggcaattcttttggaaataaacctcattccttttcaaatctcaatatacatataaattaatttacatttttcatttatgacagccattatagtagttcagtcaatctctctataacctggtcaagtctttggttaaaagacttgaccattactcactcacagcgcttagtctttactcatctctctccaatttcctttactttatttcttccttggaaagaagaaaataaatagtttacattaagtcttttagcaaatgttccataacttagatttgaaagttgaaacaaactactttttctctttagcgttgttttgaatcaacaaaaattagttttatacatataagaagaacataaacaaggattttttgtttaagtatttggttattgtgtaagaggaaaaaccttaaagctaattatgatcaagttgtgctggtgcagtagtctaattataacaagaagagagtagtttttatgtgttagtaattattgtcataacaaatttcttacctgccataccattaaatacagtgttgtagagaaagaaaaaaaaaaacaatcatcataatttttggcatgcttgagtaattaaggaaaagattcttcttgctacttctgtactgtggaccaacgtacgtacacattctttccatgccctatacttattttctcttctcatatacacattacccaaaaaaaactccaaaaattctctaactcattattattaattaatgcctctaatagagactacttcgacctaaacaatgtgacaaaatgcttacttactttataaacaatggtataaatagacaaaactatatgtagagtttttatttatcaaagataattttagccttttcagattttaactatacttgtcaagttatatatgtgattaatctaagataatcatattagcaaaaacaaaacaaaaaaaaaaaagaaaaagaaaaaaagaagaggagaaatatatttgtacaataaattataattaatacggttcaaatccacaaagtacaacctcacctaccctatatattctcgtattaattcttacttgcactggtataatgtatatacataaaacaggggcagacctatacccctgcaacttgcatgcttgactgggatttttattttaaaattctaaacttaattactaaatattatttatctgtttatataatataaatagttatgtgttgtcgaaagataaatgataaagagaatcatgtgttgaacatcatagggtgcttatagctatgcacttgtcggaattattttttttttctttttttctataatggtattcgttatagttataatatcatttctgtaaatttttaaaaaatcttaatattttacaataccaaaaatagagtttctgatattctagtttaccactcatgtttaaaaaacttcaaatctattttcggcactggaaactattcgaaattttttaaaaatttgcagaaatgatgctataattatgacaaatacaatcaataaaaaaaattaaaaaaaataattccgaaattaattttcaggcacagagattgactaagaggttgtaataggaagttgacggtagcactcctctaaaagaaatttaataagaatagcatcatgttaaaccatctccaatgtaaatatttaaaatttttgttgtctaattttggtacacaaaaaataaatttagtattatattt

SEQ ID NO: 193720 - DNA, 1525 bp, Cannabis indica
gtccgggttaaactcggacccgaacacatgtaagaactccacccaaacaggcccgttcattgtgactaggttcagccccacccgcttgttttatacggttttttttttcaatggtcaggttgtacgagccgagtctgggtggtttggtcaggtctagcacctagggcttccaattcccatggtcgagcgcttagtctccaagacgtggccgagtgacacactctcgaggtggaaccgagtgcctacttcaagctcaatatatgaaagcaagactcaacatctaaaagccaaacttcgaagcaccaaagattggaaaccttttggacattctccatactctttgaagaatcatctttcctctcaaaagagaagaaaaaaaaaagtaggattgtattgaagggctcacaatccttacaactattcaaaagaaattgagtgattaagaaatgcccataaaaaatcaataaaataaaataaaataataaattttgggttaaaatgacaagacatagacaacaaaattttggtattttgtattatgtttgttaggaattttgttattttttgtttattgctaaattagactaattatgaagatcattattaggccctcattcctctcatctcattttggtgtttctttttgcttaactcatcaaatattcattttatgttgttgtagcaaaaatagatacagttttttctcacattgagatttattataacaaaagtctgatatgcttccttctggtcctttccttttctttctctttctctaatctaaatcctatatccccagaaatttcatcttcatcaaacttttattaatcatttttttttctacaatcgttggattggaagagaggatatatagagctttttagctgtggagagattggtgaaaccatatgcaaaggtatttgaaatttggtttatgatatatatgtttttttgtcttttttttgctattgggtaaattcataatcatgttcattcatatatttatatttaataaaagtaaaaaaaattacctccttttataaaattgtaattatttagtaataagcaaggtattggaacaattttctaacctttagatatagaatgtaaatcaacgtaagaaaatatactctataagagagggattgagaaagtgggcctatcgaaaataatatataaattttggtagaaatgctaagacggagacaacaagtttttgatgtttagttgtgtagagatttaagagcctatgtacagagatatgtggcattttatttctgatatgtttttcttgagctcccattttcttagctttctcaattttgataagaatttatatgaatttcttttttaaaaattattaaaactatcaacttgattgtcaatatttagaaaataataaaagaaagtttcatttttatttttcattttcaacttttcattctccttattactttaattactatattatgtttattgggttgtgtttgtaattttctttggttttcctcagatgagtaattag

SEQ ID NO: 193721 - DNA, 900 bp, Cannabis indica
aaggaaagagagggaatggagccaaggtatccacttattgtgggttaaagaaatagatttcccatcccccaccttccaaatgagaccacgcttaaggagctcacgcccctagagaaggcttttccaggtctgagaaggacaatggccagtaggagcattgatgaaatcagtgtttttgaaatatttggctttgagaagggagtgaaggagggaggaagggtgagtctagattctccaggcctgcttggaaataagagcttagttatggtgaatgtaggatctaaaaccaaggcctccaaaatatttggaagtgcagatagtagaccagctcttccaatgaattttactgttgctgatgcaagaaccccaccaaaatttagagatgaggcgctggatagagtgacaagtggttttagggagtttgatatgacatggcaaaagaaggaatagcctggacgaccgccttagtaagagtttccttaccagcttttgagaaaaactttgcattccaaatgttcattttagaagcaactttttggaccaagtaatgaaattgctcactgagtctaccagtgtcgtgaggaaccccaagatatttactcataaagccctcactaaaaatgcccaaagaattcttaaagtggattttggcatcagtattagtgttagggggagcattatggaagatttggtcaggttaaccgtttgcccagtcgccttcttgtagagatcaaagatatcagtgatggtagcagtggagttcttagacacggtagaaaaaagaatattgtcatcagcaaaaaggagatgtgaaatgataggggcattatgatagatcctaagcccagcaaagtgatttctctgttctttgacctgaatggcagcagagagaccttcagc

SEQ ID NO: 193722 - DNA, 830 bp, Cannabis indica
ttactctctttctctctctaaaaggaaaccctaactttctccatcgtagattttttcttaaatcttctttcttcccacgattcgtgggtttctaggggtttcaaggctgtcaatggtctgaattttgtgtctgaggtctgagattgataaggatctgtagttggagagacgaaacagagctataatggcttcgtctgataaagatcttgaagtacaactgctggaatctgggaataggcttgtggaacctccgtcatccgttgatgaactccttcctcttctcgacgtaagccccaatttttttttctcaatgaattttgaagtgcgatgaagtttgttttgctgtgttttcagctttgttgatgcgtttttccatggaaaagtgtttgttttttgagcaattgtttgcttggtcactgtgaatgaaagcctctgactatgagctttggatagggtttttatttatttattttttaaaatgttttttgttcgatctgttctaactattgattgttttagcgttgtgttacacactgtttaacttgttttatcttctcgtgttcttagttttattactcttcgttgttctacggcttcataattagttagggtttatacatgcacttgctaaagcataagtattaacgccttttattttgcttcatcgtatcgaaatctatagcactgtaaattgctgtcctttcctttaatgcatctcatttttgccagtttttctcctcctccgtcacttaaccgcaagtacaaagttggtgtcttggcggaatgttttcatcaattatttaaccaattaaatactattacatgccaaa

SEQ ID NO: 193723 - DNA, 1402 bp, Cannabis indica
aaaaactattttatatataaataatctactacaaaaaataattgaaattggagatagaaaaaaaaaaaggttacaaaggctgaatgtaagcctctatattataatcacgtgaatcctacacatgcatgcctttattaatcaaacaaattattttttaatatttttctatggctgtgaatcaaggacatgtgcaatagaagagaacacaccaattttttaaaaaagtgaaaatatgtataattttttaaaaaaatatatgttacataaaattatttttatttttcattttttttaaattgttaaaatttggaaaaaaaaaaaagttactcttaaaatttattcaaacaattttttttaattatagcccggaccccatacctcatacctcgctctcgatctaagctcgaacctccgtctcgacccagaccagactcggacctcaacctcgacgcgactttaggcccaaaccttaacccaaaacttggcctcagtctcggcccccatctcgacttggacctcggtctgaacccaggccaaactagactcagacacgggcctcaacctcaactcaaccccgactcctggccctggttttagacctagaccccatccccgacccgtaccccgaccccgacctataaagaagatcccaaccccggatccaaacacttgcctaacctagaccacggactcaaatcagtgttggacctcagtttcaacctgtacccaacccctggaccccaaatagtggctctaaggtatagtacctggaccgttggaccttgaccttagccccaacccaaatcttgacctcgagctcttttctagacccaaactccaaatctagctcccgacttgaacatagacccttggaccttgacttggcccccaaagctcgtcccttgacgtgaatccaaagtcaagacctcaaatctccagcccactttccctcacttcactttctactcttcacttaaatagtaaaaataaataaataaataaatttacaaactacatttttacttttctttttctctttaattaaaatcaaaattcaaaacaattatggaacccattttttttttcaaaaatttaaaattttattattattttgtgatttaaaaaattaaaaaataaaatattacataaccctcaatttaattatattattttgttaattgaatgcatattatataaatatatcatttaaagaaaaattatataaaaatataataagacaaactaattatgtaattttattaacacttattataaaaatagaggatgttttaatagctgcatcaaatatgtaactatgatgattatatttatttttaaccattaattattgatagactgtgattaatttaaaaattaactaaaaataattaataaattaccc

SEQ ID NO: 193724 - DNA, 1055 bp, Cannabis indica
attcaaatctaattagataatcttagatctacaacaataataatctcagtaatctcaacccaaaaataacaatctcaataatctaaattatgatccaaaattaaatcaaataatctccacaacgtccagatctactccatatgttttagctttggcaatctcctaacaatggaggaacaatgacgaaaaagagagagaaagtcaaggttgacgttttctggagtggtgaacatcatgtggaggtccattgggacctaggatggcgggaacaaggtcgggtggtctggccatgatggtgtgatagcgaaagacaaaaatggacaaagacacgtagagagaggtgagttgccagactagatagagaaagggaagggctgccgaacttggcagagagaggggggactgtccgactaggcaaagagagggatgggccaccaaactttgtatcatgggcatagatatgttttttttagaggcaggtgtgaaggagtacgattttgaagtttatactttataatatatagtaagttggacatgttagaaaatgaaaaaaggtaatcaatacatatatgtcaagaattccaggcggtttgaaattgccaggaattctctgtttaaaaataccatatttcaatttagtaattattttaaatcattagaatactaaatgacagtttaaaactactaaaaatagtcaactatagccgacagttttaaacactcatgacttacttttattagcgatagtccttgaaaaaaattgatttgaggaccgacaggaataatagtttttgtagtagtaaataacatataaaagattaagaatccttacatagatgaatgcagaaataaatgactctttccattcaattacttcaacatttggttccctttctatagcagggtattgccaagtatgaacttggatcgctttctcgaattgacaaatacctttctacatagtcttccataataatttgagtaccaccttgaataaagtgggctgatactcaatcactaataagactgaaactactgagagagagagagagaga

SEQ ID NO: 193725 - DNA, 2335 bp, Cannabis indica
ggtaaaccgacttggacatcctctctctctctctccgtaactgtgatgcttagtcactttttagctatgtctgttgttgcattttttcactcgaagtgcactgttttttcaggatactgcggtagtggctgttcagctattgctgattctggaacttctctgttggctggtccaacggtatgtatttttgtctatttttttttcatcttattttttgcttcactaataatattataagttcgaagtgaaattaagaatgaaaacagaaactcttatcaacttatctttgaagaatagattaaaagttatgtgtatatgcttaggcttcatactgacataatttctctatgttaacttgtagagtgtgattaccatgatcaaccatgccattggcgcctctggagttgttagtaaggagtgcaaagctgtggttcaacagtatggacaaaacattatagatttgcttttggcacaggttataacaacctctgttttattttaagatgtaacttcatccacataactatttcaataggctatgtagattattagagttagtgtagtttagctatgtactatttttgtcttactctattgtcttgacaggtgggatctaagaaggtctgctcccaaattggattgtgcacctttgatggtactaaaggtgtaaggtcagtattaaattgcgtaatgttttcatatgtttttaatttccgtttttcataattaaatttgaatatatacatcaatagctgtgctttgtagttctacttacgtaacacactatcccgacataaggcggtgtacttactagttactgtcattgtgttaatatagtgttggcattgagagtgtggtggatgagaagaatggcaagttttccagcggtcttggtgatgcctcgtgctctgtttgtgagatggcagttgtgtggatgcaaaaccagttaatgcaaaatcagacacaagagcgcatactgaactatgtcgatgaggtgaagtgaattctatgatcactctttcaatgttttgttataaacatcacttgtggctgactcaaattttgttttactatcccagctctgtgacagaatgccaagtgctaatggagaatcagctgttgactgtggacgcctgtcttccatgcccaaaatttcttttaccattggtggtaaagtctttgacctgctaccagaacaggtatggcagcttctcctcctgttatggtgaaatatgtttcccattcattattagagaagtggatgtatttaggagagtttcaaacttactttaatatggttatgtttcatttcaactgtattttgtttctacttctaacttgttagttgtactaacttgtttgaattaaatatgaacttttgttttgtttttccctggatggtataaatcagtacatactgaaggtgggtgagggtgctcaagctcagtgcatcagcggcttcaccggtttggatgttcctcctcctcgtggacctctttggtattgttatatttctcatcactgaataatccccatgttaaagtttggtggttaatttgtttttatgattctcatttcatttttttgacccgatgtaggattttgggagatatcttcatgggtcggtatcacaccgtctttgattatggcaaattaagagttgggtttgcagaggcagcataagaaatcctttttttttttccaatgaataataacctttgtttagtatcccttgtgtacctctgaaaacatgattgatgaggttgatgggtggagtgtttaagatgtttggtctttggatgaatatagtgcctgtaaatatgtatgtttggagtttggttgtctctttttatcaatacatatttaaaagatggagtttgaatggaggtaccttaagctgtgcattatattctactctattatgaattctctctctctctctcacacacacacacacacatcacctgtaaaaggtagacatttcctatcaaacccaaaagattgcttgataatgaagatgcattgatttgtcttcaattcttattacagacactcataccaatttcaactttttaattagctcaatgaataatagccagtcttgtcttatgtattgacacgattaaacaatgtatactcaataatatattcgaggcaatatatatatgatttggattattgagtggatgaatagaattaataaatgatggtatcaaataatgatgttatccggaagtggttacgtgaaaagactattcgatgcttaagatatacagtgttctcattatcacaacaatacaatcaatttttttgttataagaaaaaacaaaaaaaa

SEQ ID NO: 193726 - DNA, 2337 bp, Cannabis indica
taagtaatttagtaatgtaataactattaagagtattgctttatatttgacccaagtctaatcttgatttaaggttaagggtgtcagttatcagcccccagggactcaacacagccttctaaatgaagttaacttttcacttccggagaaaaggtacacaatgctacctgctgatatgtatttgtttatgggttttggctcgagaaatgctaaaaggtaccagtagtagctagcaccacataaggtgttgttcattattagtgttattaagtatcgaaccccatttaatttaattcaatagctattatagaatatcactaactattacttgtgcctcgtagcaatgctcttttggcttttgatatgaaagtgaaattcatcatttatgtgacagttacagcaagctttgcaatcatagatcattatccttgtttaatgtttgcagttttggcttaatctttggaaggagtggtagtgggaaaactactctcttgcaggtctaatatttttcattggtccatttgttttagttcttttttgtgtgtttctgatgctcttttatttcttccagcttcttgcaggactaagtaaaccgacttctggttccatttgcatccaaagatatggaaatgacgaccatcctagtcaacctccagaacctttaccttcagaaagagttggcattgtctttcagtttcctgagaggtaatagatatgaatttttcagtattggttacaatctttgttcttttaggttgttgtatcaggatatgaatattggaattattacacaattttgcacttgtagtgtctgagttctataatgttgaaattgtatgtgtattttgattttggagcacacttttttttatccaagccattattttttcattgttcagattacctaactaaaccaagattcaatgaaattgtttctagctcggacttctgtctaattaaattagtaatgctactccatgtgtttttctgatatagtacaacaattttgagattccatatataaaattaggggctgagtcaaataacaagaggggaaaaaacacaactgattaaggtgggtgaaggcactaataatttactagttgaggtggttgacccttccattacttatttttgattaaattcaataatcagaactattacttttgtggtactcagttatgtgcaaaaggtttaatttatatgattaattgttacttaatctttttgatttgtttgcataattacaagattgtgttcttatatattgtgtgtttgttgtgtctataactcatgcagtactaacattattgttttcaatctactgatctaggtatttcgtggcagataatgtgtttgatgaagttacctttggatggccgagacaaaaggctgatcttcaagtgaaggaacatcttgctttgcgacttcaacaagcaattaattgggtatatgttccagctagtgtataaaaaacagaatctgatcaaatatttttcccaattataaaataagttattgttaagatatcatatgtgatttcaattcaagtatgacctcagttccaatttttaatatgtgactataggttggtttaaatgggatcttattagataaagatcctcagtctcttagtggtggctacaaacgccgactcgcactggcaattcaattagtaaggaccataatttaaactctctatgttggtatgcactataaaaatatcaaagaaacttgatcacatgttttatataattgattagtgtattttctaaattattttcaggtgcaaataccagatttattgatattggatgaacctcttgctggtctaggtatgaagctattttttcatgtatcattatttcaccatttttttccccttaccaattgctttcttcatgtgagttgtcctctttataataaacaagtctgcaatttgacatttgggatctctcctatactctgtttggaaaggctctcacctttttgtccagaaatcatgttcaataattgtaatcattggaaacaactttgatttaagaatgataaagttgaagtttgctacttatactgttgtacaggattcgttttttttttttgaaagttatttcaattattttgatttctcttacatattttccatttttctttccctgtccaaattgatttattgtttctaaactttttcagtgctgttttattgatcagattggaaagcacgtgcagatgttgtcaaacttttaaagcatctgaagaaagaattaaccatacttgttgtcagccatgacctcaagtctgctcttactatctctatctttctttttctttttcttt

SEQ ID NO: 193727 - DNA, 621 bp, Cannabis indica
ccaaatagtttctcttacgattattttgagctgtgcctcattcattttttatcaacttatttaaattaagtccttatttttctttagtatttattttaaactagcctgattaaaatctcatgagtaaaacgagtaagacatacctcatgatagaaaaaagtgtcccaaaaaaatcattaatcaataaatatcagctgcaaagaggtgctaatataactgaggtagcgaagctaccaaccaaaataatcatctgaaaaaagtgctaattttgtccttgagtgggcaacaataatcctaagacaataagcaaaagagaaatcacagttataataaattaaagtaattttaataattaatacaatataaatatgaatgattcacctaataattttttagagcaatttataaaatggccacaggcttcagctattagaagagtcaacacacaaggctatgtgaccattgttaagctagttttagtctgttttttaagtattttaatatgcgttttttgaacagaattatacttatttttgttgatttcaggtttatacactcattttagataacagaagtgaaaaagcaagagttggtactaaattggagttgaaagcgcatttt

SEQ ID NO: 193728 - DNA, 561 bp, Cannabis indica
tttcttccgcggtagttttgtcttttccataattaattacacactgcataaaatcagaagttgaatggttgaagctatgtactgtactatgttcaaattgaatacattattatcatagaccttttgaaagctcactttcatatctcataaagccacctgcaataacgtcttcttccttgtaaatgccagcctgtattaattcaataaccatcttttctttcctgttttctccaactcaaaaaatgggtccttttctctactattttattattattatttatttttggaagaaaatattgcacaatgacccacacccacattcgattaattcatgagacaccctttattctttaaaatagtctcattgatcaaatcacttaacaaaaagcataaataaacaaatagatgagctaaaaagaagtaaagggcagacctttgagagtgataatgacttaaatcgggcaataataaagttaaaccacaaacaagggaaaagaatctaatccaaaagtttaaagcacaggtacattttagtaaattcatttgagcaataaataattg

SEQ ID NO: 193729 - DNA, 1231 bp, Cannabis indica
ggcagcatgaatgcaaatctaaagttcaaggttctaccatagatcggattaataatatataaaagaaaaggaatattcctttggtatttttgtaagggcatctgactactaataaaagtatcaatttttaggaaatatcaattatatgttggtagtttctcattataagtatccgtctattttaaattaattattatgtataaaaggactattgttttctgattaaaaatataaagctgacccaagccaccatgtcaagtgtatgtttttttttttgaaaaagtgtgacttgtatgttgaaggaggaaaaatagatagaaggggtaatttttatatatgaacttattttttaaagagtaggatgatcttcacttcagcaacataataagccctatgaaatctatcaaagtaccaccgaatttgaggaaagaagtaaagagaactagtttgccagtctccaaaaaccaccaaaaaactggattacttgtctaactagaacaatcctaaaaccagccttgtatcaaaatggaaaattttacaaattagatatagtaattgctgcgtaaataaattgataaatacgtatctaaaacagtatagcttccatgaaggccaaaaaaaaagtgtcacagttaatggctacaaaagaaaaccccaccatttataatgatgtttaccgactttataggcttttgaatgtgcaacagacactaaaaattctgctgagatgatttttagagggcagttcagacaatgatcttttattttttttttcttttcctttcaaaaaaatgtcatgaaaaggcttgtctacgcttaaaagtattacatttagtttttaaggctgctcctccaagaatcaacctagttccgttttttttaagaatctattaatttggtaacttgtgttttgatgaaatgcaactttggtaacctatattttttgttatagtgatgactgatgatcattattagtgaatataggatacaaaaacttactttgttaaaacacaagctagcaaatcaaatggatacctgccttttctttatgcatattaataaataggtcaactacttgggttccagcatgtgtaattaaggtgtgattattagaacataacataaggattagatataggcaaaaagacaaagtgggcctaactaggttagatacccttagtggacaaaaaagccactaaagtgggaatgcattccataatgatgagcaaag

SEQ ID NO: 193730 - DNA, 1226 bp, Cannabis indica
ttttttttttctttgaacccttttctgtttttgttgttaattatttcaagttaaggcagcaaaaccaccacctttcatcatttgtttaaactctttaaaattgacttttccatcaccatcaacatccactttctttatcattctcgtacaatcttctattgttctaccttgcttgagtcccaaggaagacaaaaccgacctcaattcctcaacggttatgaacccatctccattttgatcaaacacattgaaagcttccctcatgtcttcctcctcgtctctctcgtccattatcgtttgatacaacgccccaaactcgtcgatatccacgtacccatcgccattcacgtcgattttatcaatcatttggatcaagtccttatcagggatgaagattcccaagttttctaacgaatcactcaactcctttttcgtgattcggccatcgccatttttgtcgaacatttgaaaaacccgctttagctcggctggatccattttatcgaacacttggtgtgcacaaataaaaaaaattaataaaattatgtaataagttaagagaaagaaattattatgtattgggttttatgataatgaatgaaatatgatgttgaactttgggaaaaatgaattatgggaattgtgttggagaaaaagaggttgttaataagaacaaagatattaaggaatatatgtggtgagtattgttcgaattggttaaggataagagaaattaattaattagtatttggtgtctttatatataaaggttttcgtaaaaaacgttggatcgtttgttttggtagttataaaaaaaaagtttgttaagaaacacgatttcgagtggtttgaaattgaattaggtataacacgtttttgcagtctttgttggattgtgtgttttaaataaggagaatatgaccattgaaattattgattgttgttgaaaataaaatcttaatgccgtcacattattttaaaatggaagtttgatttaggaagagaaccatattttaagggtggtagagaatgaagagtttgacattttcaagtgttttctcacaatatagtcaattataaatatactttgatatataacgttattttcagttatatggttgatttataagtcgtttaattttagttttatattattaggtctagaagggtgacattggattagggatagaaattgggtgggtagtgagtgtgtaatgcacgttcaa

SEQ ID NO: 193731 - DNA, 2953 bp, Cannabis indica
caatccaccgtgtgagcttcatataacagatgtgtgaggcattccatctcaaccaatctttttgctttcgaaggcagtgttgggagaagaacacaagaaaaaaagatgttcacaagtttcttcctgcacattgcatagcaaacatccaggatcatttatgatcccgaatctatacaatctttctcttgtccgcaatctatcctgtacaacaatccacataataaaactacatttgggaatattaaatctctcccatacttccttgttccaatgcactctgtgttgtggagggacaagtaatgtgtaatctctaccacttttttccagtaccagcttccctgggtgggggcattgtagccccaccaatcttcattctgaatgtatacactatgtatctacctaacacacaagttatcttctttattagaaattgcccacacatatttgaacattgctgctctattccattcagctaccttcttaaagccaatacctccctcttatttagcttgacatacaaactcccaagctattaggcccaatccattgagaacgttttggtctttccatagtaggctctacaaatagcttcaatctcatcaactatcttcttaggcaagatcattctttgactccaatataatatgaatgaataatcattagtattgagttcacaagaactgccctgcctccaaaagaaagatttcctggtactccaagtcttaatttgagaggtcattttctcagctagctccttacattcttgacccgagattcttttgacacaaatcgacactcccaaatatactaaagggaacatcttgcctaccaaaactaggcatatatatctagtattcttattggatctctctgtcttgcataccaactaaaatagacaactaatttttggtagggttaggattaggatccaaacctgaggtgcaaaagaatagcttcaggccctgcaacataagatagacacttatgaaatcccatgctaaacaagaggacatcatctacgaagctcaagtgatttagcttaattcctccgcatctttcatggaactggaaatctttcttggagccaattctttgcataattgtggatagatattccatgcctagaacaaataataatgaggacatagggtctccttatcgcaatcttcttcttgaatagttatattttttaataaacaatagtaaaaatacaaaatatggcattataaaaaaataattttggaactttttttgttaaaagattttttagacgtaagtgtgtgctttcgccctttgggtgtggcccctgctgcctcaccattcagcccaccctattcgtctttcgaggggtaatttgctcatatcttccttttgaattgtatgcagctggtggagggtttgtttcttgataaaaaaaataaaaaaaaaaaaattagtgtctaacgtaagaataaacaaatacctaaaccaatacaaacttcttgatagaaaatactatggcttaaagagcaaatgcataatatatgcccaataatactaaattacacatttaacccttaccaatatatttatttacttaaaaaaatgacattaaataattatttctctcgctaaaatttgtaccatccgcttatgaaattcggttttaccaaagttatttctactatagcttttgatggatctcaaacctcaaagtgaaatgaggttttacataagtcctcaatatttattattatatataatattgggtaagtttatagtacatactctttaagagttgtttcggtagattttttatttatttcgacacttacctaattttttatatgatcgcatatatatcttatagttatttaagactacttgtaaaatttttaaaattttgagtaattcaatcccattttagaacttttctttggcacatgagaaggagaagagttcagctatgattgttttatttttttttttaaaaaaaaaactgaaaagaaattgaaaataataaaaaaaaaaagaagagaaaaagagaaggaaatgatgtaaggtatgattgatataagtcatcaatggaggttacaagatattttaaaaaaaaaactgaaaaagaaataaaaaatcaaaggaaaaaatgaaaaaagaaagaaaagtgattgatgattgattgaagagggatgggggagatgcacgtgtcatatgcatgaggggagtgtgcatgtgatatatatgtaataaaataaagagaaaaggtaaaaatatttaggtaaccgtgtgtaagtatatatgtaataaaaattccattttgtatttttggtgtaaaaatttctaattgtatttagtgaacctcttacaagaattggaaaatgtaattttttacttctttctctcactaattcactctctcttatatctttattatttttatttatttatctttattttgaggattgatgaaacttagtgatgtctatatttttattttgttaaaatattttttttttctagttagttaataaaaattatcttctctgaaataaaatagctaaaaattcattgtttggaaagttgtaaagttagtagtaaatggccagctgccatcaaaatgctttagtgttactcttgtagtcttgtttcatatcaataaagattgaacttcttctacttgtgtcaaagttttggttgttcaaagactgtgattaattatatactgaatttttattattttgtaaataattttactgtattgactcaaactagttagactaaaacatgttataaattttattttgtttgtctttaaatttctctctactgcacaactatatgtatatactaatagcttgtataacttataacattttatattaattatgaaatcttactcaaaataattagattattttatattaatttgttggtgtaacttataaataggagtgctcattggatcacatctaat

SEQ ID NO: 193732 - DNA, 690 bp, Cannabis indica
taataatattaacaacaacaacagcagcaatgttattagcaataataattataattataactataactataataacaataatattaatgttaatgttaatggtgaaaatggttgccgtaaaagaataggagggattcgagatggtgtcagaaaggttaatcaggtgtgttttctttcccagaaactcaaactttttctttcttaatttccatatttaatttcatttttcttaatttgatcttgttaattcttatttattcgcttaattatttgtttttattttgagtgcataatcttcttctaaaaaatattgaattgaatgaattattacttgcttaattaattacttgggggataaaattaagctgcagaaaataaataataaaactttctatcaatttaaaatatggccaaaattattctagtcacttaaaattcaacttttcatttatataattaaggcaaatagtagttatattacaatattgaatattcccaagtgaagcttttaataaattaaactttttagaacttacttaggaatatgcctaaattaaacaacggttcgattaattaattaaataattcacgttgaccttgtattcacctattgaaacccgtactgattatatatatatatatatatgagatttactaaaacatattaattagtgtttagtattttttttt

SEQ ID NO: 193733 - DNA, 2387 bp, Cannabis indica
gattgatctttttatgaccgagaggctattattatttgaataatcatttttttagtagttaatgatcttgatgggtgttattggaaggatgagagtttggagttttattttgtaagatctttttatagaatggtatagggggagattgcgacgaacaagggaggttgctaattttttagtttggaatttttttcggatgttaaaagtaccgcctaaagtgaagaatctgatctggagggctgcttctaattttcttccaacttatcataaactatgaatgaagaaggtggaccttcctgctacgtgtccttattatcaagttagaattgaaatcgtttttcactgtctggtgttttctcacttgctaggggagtttgggaatgcttgggatttgcacatttaatgggagatgatatgagtttctttgattggctctattttgtttggaggaattaagagtttgatcgatgtgattttatatctatggtttgttgggcgttatggatagcgagaaatgatttagtgtgacagaagaaaaattcttcggtggaagagattgctatgtcaacttaactctttcttgatcaatggttgtgtgctcaaaataattcactggatccgtggctgagttttatgactcttcaagacgaaggggggcattggactagacctattgagaatatgatcaaggtaaatgttgatgaggaccgtgattgttatagtttttattgtgtcactcataatggggtctcgttgttaataactgctatttctagttctcattgtggactactacaaccagaattggaagaggctattggagttaaggaagctttgagttgaattaaagctaatgcttggggtaatctagtggttgaaataactttttttttattgtgattcaaactatctgtcgtaatatggccatgcattcttattcttgttgggttgttgaagattatcagagtttgttactcgaattgaggtcttgttcctagttttattaaccattctgctaataaagtagctcattatcttgctagagcttcttatttgcctgcgaattattcttttttctgagctttctatttgctcttctttttcaagatgtattgttgaatgatattatctaataaaatatatctttaattgaaaaaaagttattttttgtcttgtgagcgactttgtaagtgttactttatgtcttatgggtatctgatttttttgagtgtttctaagtcatggcgattgaggaatatcttttggatgatttgatttcaaaagttatcaagctttcagaggatagtgaagaacaatgtgttgaagtgtgatgagtcaaatgaaaaagcatgggttatggacttttaaaactcgaacaactttgggaaaaacaatctgttgttggaaggactttttctaaaagaaattgtaatagaaagttcatcaaaataatatttgaaagaatgtggaaattttctacgagctggtcggtgaaggtattaaagagggaagaacataatatttttgtagaatttacttttgaaagtggtaaggaggctcacaaggtgacaaagaacaataattgcatctataatggtaattttatgcttgttgaagtttggtcaagttctggtgattagaaggatgcacatatggatgatgttccatgttaggtcagggtttatggattcccgacaaatgctttaaaccaaagcaatatcaaaagagttgttcttatggctaggaagattatggatcttccatggaacaataatgatcaaatagtcttaaatggatatgctagagtaaagattaaatttcatatggatcaaaagattgtctcttgtcgttttatcactattaatggcaggaaagaatggattcaattccaatctgaagaaattttgttgctatgttatagatgtggcaggtggggacatgatgagaaggagtctaaacaaccaatggtataaactaaagagattcatggaactcttattaagatgtttggaccttggctaaaaatgcaacgtgattatagcaattgcttcgatgctagagtttataatttgtcgaaaaatggagttacttgaaacaaggtttcgattaaaaagagattatgagtttgaggccaaaaaaatgtgcaaccaatcaagaattctgaggtagccttctttggagggaaagaaagcgagaaactccggggagagtcgtttgaactctccaacattgcatggtcttttgaatatgacttgttattcccaagttgcacaagtagtacatgccaaaaaatataataaaacaaaaagaataaaaataagatttttaatctttgagagtaatacaacaaaaaacaaaagaaaaaattcaaagtggtaaatgtaaat

SEQ ID NO: 193734 - DNA, 1830 bp, Cannabis indica
gatcaaagtatatatcatgtgggtatttcattaatcaataattctatatatctaaataacgcaccatataaagatcatgaaatatatattaaacgttctttattattattattattatttaattaatctctggtgtgggtcgtttattttactctaaaccacgcaacttattaggagggaagaccatattaattaattcatcatttcgctttttgattagttattaaagatgatcatatgtgtggatatatatgaacgtgcattatttaggtatattctctcatatgggtagtttttttttttatatatatatatatttcataaagcaaattgacatagaagattatggaaagtctaagtatcacgaataaattaattatgaccacaattattaggtaaataataatgcatagtctttactttttcgttggaagagaataagtcgtcttcctattataagccatgtgatcatgactaagtgttggttgaacactgatatataattctttggccccagttgcgcgcaagtgaataatgtgtggaaaactaatatagatatccagctctaaatttcgatagaataagatttatatataggaaacagagttaagaaaatctcagatatatacatattaacatatgtattgtagtttaacgaattgaaaattgagtttctaaaatatatagttcgttatcaaggaactacattgatctattggtatgaattttgtattgattaattgccaaactaattaaccactcggattccattattttaccgtttgcttattagattcctcagctgtcatttttattagatatatatatattaaaatgtaaatattaataaactctgtaatacaggtcaaaactaataagttgtgctaaattaaataacttaagcccttggtggtatgttggagctaccaattcattaattagtttaacagcataaaattatatagttatactttaagtggccgttggagtagtccggtagttaccgtgcaacacgtggattacatcgaaaactgtgaatatcaagtctgtcaagattccaagtgtctcaagcaaaaccatcaaataacgagacgcccacgtgtcattaattcaccggttgcatgcctcgctctagggtgcaaacgtagttattaggactcgttttttctttttcccatttatataataaactattcaaaagcagcctgcaaatttatatatatgtttatattttatataattaatgtgcacgaatggtatattccatctcttgtctcatatatgctcatctcatctggatctaccggcttttgcctcgtcgttgtgactaaagggtgtcaacgcggcactcgtacgtgcatggcaacttttaaatattaaagcttaatatgcaaaatatatagatgtttaaccccaacaaatgcatgggagagatatatatgctacactgctactgcatgctgctgatatattttacttaaatataatatatataagatccggacttggtggtactgtgtggattaacaatattataccaaaatgtttggatcaaaatcaagtcatattatatactttttgagttctgataacgatgatgaaatcatatcatcatcctttcttatatatatatatgcagacctgcattcaatagctcgtatcaagtttgttggataagtctccacgtaaactatttatctgacttaactaatacatggtaaaagggctttgacccatttctagctcattcaacacaagtattacagacgactcaacgttcagttatggaataacaataacagcctcggctcttaactaccacaacaaaaa

SEQ ID NO: 193735 - DNA, 1185 bp, Cannabis indica
aaagttgataaaaaagaaaaaaatcaaagcttaaataaataaaaatatcacaaagtttgtgatggtaagcaagtttagagcaatttcaaccactatcaatgtgagtggtggtgaattgaaatctgaaacaagcttaaacttttggtaaagacacatccctttcatcaaaattgggacttataaatttcaaattacagactcaatatttacataaaataatttattattattattataaaaagaaaagagagagagagagagaagagcagcagacaaggggtccccaaaggtgtcgagaaagaattggacatgaagtgaggtgtttttgtgacaaaaggcagaaaaggagagtgagttgaagcctattggtcccctctaatgtcttctttaaaagacaataactcattgcaagagaatccaaactctcattaatgctcttttaatccattgatgaagaatgttcttacttcttacccaaccaaaacaaaacacatttcctagctcatatatattattcttgaggtaactaattaattaattagtgtcagtacttagtactagtacttcaaatttaattatttattattattttattttagtgtactatgcaatcactgatggctaattaagatgatggagaaaaaaaaaataagtacatgtttggtattataattaaaaattattttttatttttaaaaataaaatttattttttgaaaacaatttagtttgtttaaccttatttttttaaaacacttttcagaaaataaagttatataaaacaagaattttgaaaatattgttttttgttttaaaaaccaattcacttttggttaatattatttttaaaaacactaaccaaatatgatttgtgttttaaaaacttcaaaaactattttttgttctcatttctaaaaataattttttaaaaataaaaacaaaaaataataccaaacatgctctaaaatttttctcacttgtgttgtgtttagtgaatagtgatgattgatgagagaaaaaggagtaagtaggagtaaggagtaagtaggagtaacttgcttttattttaagtattataatatcaacaattattagattttttttttgattgattttatatatatttatctaattattagatttgttgattaactcttattatttattttagtaataaataagattt

SEQ ID NO: 193736 - DNA, 2936 bp, Cannabis indica
tatacaatataagatattaacattggtgtggcatgtagccgttttatttaatatttttgctgactttgatgctttttgacttgggttgggtgcatgttttaagaagttttatttattatattagagttaattaattaatgacaatattggttaaataaaattgaatggtttggaagatttactgccgtgaatacagtgattagtacagctacgtgtcacatttgtaacgtaaaagagtagtgattcactagtgggtccgtcaccgccagtgtctttatcttattgtatgtctttctctatctctatatatatagttataatctctagatattgaaatgaaatatataactgcctacactagtttattaagacgtacattttagagtttgattcaactttgaccacaaatacatgtaaattaatcagatgcaccatttttcattaaaataatgaacccaaaaaaaaataaatcaatggtttattttttaattttgagatattttgagttaatcttaattatatggagaaatgagaatctatgtaagaaaaagttaaccagatcgatcatttgcttccatcaacttctttaaatatccatttcaaagaaaaaaaaaaactctaattaagtaaaatatacatatttatgtcaaactaatacaacctgctgattaatgtatagtatctatcattgatgtatattaatgtatatatgaaaaatgaagtttaaaaagataaagataaaaaaaaactgctgactgtggagtggtctaaatacatatactcaaacttaaccctaattagattatcattatgttcaaatgtaattattatatatgcaattgaatagaattactacttaagttagattaaaaatgctaaaatgtattaatggtatctaacattctccttgttatcatattttattgaagtaattaaatatcaaattacatatataatttaatataataatatttaaaaaaatatcgttaactaattatgggcatcatctctaaaaaatattaatcactactgatatacaagaaaaatagtaaaaaagaagatgatgattaatgaattttagtttgaaattggaccatattataaaatgtcattacttaatttagagcattggtattaaatatagtattgcttagtactttttacatatgtcgtcttacgattggttagagatattttttaaaaattattatatcaaattatataagacatagtactagttgaatcaagagtgatattcacaaataaaaaatactagatactattaatatattttattattaagtttattataaaactcccactattaaaataaccattaatagttgaggggtggcacatactcaatttcaactagcaattaattaatatgactatatctttcccctatgaaaaataataaaatatgaccttatatgtacattctaaatatataatacatattcttatttttcaatgacgtgaatctcaagataaatagcttgatttcaacgtaaaatccattttaaaatagatatctcacatgtgttaattctcaccaacgattaatataacattagtcatcaaagcatgctcttcactctattaatttaagttttctgcattatttccttccccactattttgaataaattttatttactcttttcatttttagctacatttggactgttatggtaaaatctccttggaattcgagtttattttaaattattactaattaatggtttctcatgcagcaatctctctttgtcaattattttaaactttacctatatatttttataagatttaaaaaacgtatatattttattttgtccattctccctaaatttagtaagaataatttcttcatttcaaatttaacaaacataaacgatttacttgaattctaaaattgatgagaaaaaaataaaaagtaccaaaattaggcactatataccttttaatcactttcgcaggcctgtacactgcattattggtagtaataattaataatttaactaattaattaattatttaggaaaaatgtaagaggtaggaccaaaccaagaaacgtagggaaagataactacctaaatattaataacgacataattgtaactgtttttaagttcattaatatatgagaaaatgttaaaaggtattaagtgcttaatacctatttacgtgtcactattgattccattaaatattaaatctcatatagtttaatgtacgtaataactttttgaaagtattactacccaatcgtaaaataatatgttaaaagttaaagcactgatccaataacaatactctcaatatatactacattaaaatatcacccctaaaatctctttataaattcaccacatttcatataaagctcaatagtaattataaaagccaaactttttcatataaggtggcacatttttgtagtatactaaaaagtaaatttagttaataagctatttgataacttcttatattttactgtaatttattaaatttattaaaaataataataatgtcaaatattgtcaattgatatcttatatttcattattttatatataaaaaaataccaatcaatattcaacatcgctagtaactaaaatgttacagttaaaacgtaaaaaatgaaatttttaataaaaacctttttaattgtcaaaataaattatttttgaaactttgttttttggtttttctttttttttttttttgtgagtgttttgcactaaattctctcaatgattattttacttgcatttaattctctaaatttaaaattttgatggtaaaaccttccaaattagtgaactgttaacttaaagtgtcatttatttttcacagtaaataccaacatgaattgcactcttgtacacgtgccacatttatatttgtatgattaatattattatttaaaaatt

SEQ ID NO: 193737 - DNA, 2284 bp, Cannabis indica
aacacaaatatgtcaaacaaaatgtaggtatttatattaatttatgattgattaaaatatataaatatacaaacatggatgtataggagaaaatggtggaagaatccaaaattcaggtggcattgggttgcaaccaatccattcaaagactcctaacatctacaaagaaagaaaaaggttattaaaaaaataattaataatttatcatcttatttaacatattaatgtaacgtttgcataccgaaagccaagtctttccccaagagagtattttcgttacactgccatgatcgaggatccattttcttgctcttgcacaagcgttatcttcttcaccatttttaggtaattcttccccgagaattcgtagacaaatatagttaaaagttgtaccgaacattgaactatggccccctacatgtaatccccatccaccatcttcattctaaatgtcacaaaataatgttccttaataaatgaatgtgtacagtaataaaagtgtccttttgagatggatatcgtaaccaaattagttaaaatacttttacctggtggttatacatatgacgaaaaatttccttacgatgttcactagtaaaaatagtattaaggtgacctgtaatgtataaacacataacctgcaatcaaacaaacaaaatgttttatatgttaatgtatttatataacgtaaagagaatatacttatttggtaacgaaatatagttaagtatcctatgttctcattaacagttattgagtactctataacttgaatcgtgcatactttggtaatgtttgtattcttaaatgtaagttatcttgtaatttgaagataggtgtaaaaggcactctatcacccacgaaaacatacatatttggtaccttgtagcttgtgaccaaatttaaacctaaagtactaatgtatgtttatttgaattcaaattgcaaagtactcgatattataaattataactttgtattttatggaactaaaggatatcaaataagtatattctttaaattaaaaactataaattatttatatttaagaaagataaaatatactaacaaatggcggtaaaaaatacgatggaccactattttctgcaggccaatgtccatcgctagcttgtaaggcggacaagtagtgggcactccttcttattgcacatgttatcttttcatggctgatcacttcatcatcttcaatatgaacggcgggaatcgtttgtttgaaacttttttctctcaaaaactacaaaatatttcaaaaattgaattaaactaagatatttttcatattatcctattatgaaataaaatataaaaaaaatcaattaggtctttactatagttactaaattgtaatctttttgtatagataaacacttttagtgtctctctcatacttttagtcataatattaattttctttctcttagtcagaacctcactgggcttggtcggggttctgcctgggagggttcggagacaatttaataacatatattgtgtgaaattaaacttagaatttatctatttaattttcttaaaattgtcaataggttgaaaattcaatattagtacaaactttgtatatgatcaaacaacaaatttatttgatatgtatgtctaagtatacaaatataataatcacgatttacaataatatgattataaacaaaaattagaaagaaaaaaaaaataagaagagctgaaatattattattattattattttttaaaaataagaatataatttaaataattagtaaaagtaacatttaagagggcttaagctaaccctaaactcatgtaacactatccatatgtatacatatatgtatacctgcattcgccaaagagaatcaacagaagtcgtaacttgagaacgacggttgtagaagttggagcgagcggcttcaacctccgctcgctcttcagccgtgccggcctcagcatcaaactcccatatttgtcttcccacgaactcatttgtgctataaatgtttggatcatttcctcgctctcctatcttaagcctccacataatttctccttttcatttttcgattcgtaaatacattgttaatttgtattatgtattatgtgatagtaaaaacttgtgagaaaagattattctatctttgttcaaaattaataatattaatattgtatgataaattacaatagaaaatatatatcgtagcacatatttgtagttcacatgtatagataagttagaatttcatagtaaaaaatttaaataatttcagttgttaaa

SEQ ID NO: 193738 - DNA, 2022 bp, Cannabis indica
accagcctgcaaaattcattataataattaagaattttgttacttcaatcttaattcttatagtaaaatggactcagtgataattattgttgtggcacatacttgtgtgacaaaaataccatctggggttagtcttggtttgacaattaactcatagaaagattttgtatagagtttataacaggggcctccttctattgggtctgccaggtcaccaacaatcacatcatactgtttttctctgtgttctagctcagccctttagtaccaccacaagaagagtaagtaacattaatgtgggttattagtaaatgaatttttattattaacaagaaaattattaattagtgaagattaagaattgaaaccttgcatcattgatgaccagctctagtcttggatcagagaatgcttctctatttacaaccaagtgtgatttgcagaactgcaccacttcctgttccatgtcacattatttaagattttgatacaaaaacattatactatattcatacatttttttttcactataaatgtaagacaaaagaacctttaccaaaagtagctgttgacaaaaacataaacattgaataatatatatgagacaagtttaagttacactttcaacaaaaaaaattaaaatcttgatttattataataacacaagaatgaaaattaatgtacctcatcaatgtcacacatgataaccttctcaacagccttgtgcctaagaagttccctggcagtggacccttcaccccctcccatgataaaaattgtctttggactagaaaatatattaataaaaaaattaatgctagaatcaataatctctatttttttttcacattttaaaaaatatgcatgtaaatttatttacttgggatgatgaagaagagcaggatgaacaagacattcatggtagatgaactcatcagtctctgcactctgaagttttccatcaatgaccagggcctgattaaaaaattagaataatccttattatcaagctgagaaatgtgtataaaattttatttatttttcaatttcatattctattttttaacaaaaaaaattacaaaccttgccgaagggctttgtgtccaacaatgcaatatcttgaaactgtgaatgtcctgtatgtaaaatgctgcataccaaaaaatataaagagtattatattgaaattaatggtaataatgcgctcttaactatatatgtttgtatttgagtaactttcattactaactttaatttgtctatgagtttgtccaacttctccaagaccattatgattacaatattggtgggcaaaaagagtttgtttttacttttaattgatactaggattataactcaaaggcttctctttcccttccataaaatacatgtgtatatatataaaaatatataaatgcatacatatatatttatactatggcagacagctagaccatacttttttattgttgtttcacccaaaattgaaaaggaatgtttatctgcacgcgccagactcacttatcacccaaacaataaaaatataaatagaaaaaacacaaaaaaaaaaaaagaaaaggcccaaatgtccgaagaggaacatgagataagcatatataaatataaatatctttatgagaaaaattgtaaagaacagagtataacctagccatgtaatagtttggactaaattttatacctgaacattaaacaataagaatatatatatgtatagtaatgtatacctattgagagcaaagcaccatctcaaatcttcttcaatttcttcttcataccaacaactcttcctataaccattgagagcatagctttttccatcaactccattcccattcccattcccattcttagttccatttgagcaagaaatagtattgttatccattttcctagaccccaaacacttaacaaagcgatcaaggaaataacagaaagctgcaaagagagaaagtgagaagagagagaaaacgagagagagagagagagaggttagagtaagtg

SEQ ID NO: 193739 - DNA, 1567 bp, Cannabis indica
gtttgtctgaagtggcagaagtggaaggtgtcgttgatgttgatgtcgtagttgcagctgttctggaagagaaactaatgcaagaagtgaacgaagaaaaggagcaagaagaagaagaagacgaaagattaaaagagttgttcttattgagtgagttggggaatttaaggtttttagaggggtttaggagtggagtatggatttagaggtttgaccaataaatgtttgggtaaaaggagagaggtagaagagttaggcaggacttccatggctgtcttgtcttgagttttctatggtttcatttcatggagagctttaacagaacagaaatgaacaccaaagccaatcggcttacttgttatcattcaaagcagagaaacgacaatacattcaacaaacgacatatattagaaacgacaataaacaacagctcacgactcacgagatagaaaaaataattattaagacaatatactgtcatatattgattgttgcaattgaataactgattttatatatgtatttaaaacatgtaagatcccatacttaaattctatcaatagtaaatattattcatagtaagattatacatattttaataggcatatcatagttcactgccaagttttacttaaaaaagttgacattttatacttataatatagtaaataagcacatttaaaaaaaaaaaagtatatacaaataagcatagtaatgcaaaaatgattcattttatttttggtggaggtgatcatgtaggaattgaaaaaatgtggtcattgtcgttgacagtgtttgaaagaaacaatttagtcttagatcagacaagttaatataattgcattgcatgtggttgtagctccacatagattagaggtgcatgctcttttagacagttgagattaaacaacttttcttattgtctttgatgcttaattttttgatttttaggttgtatatattcattgtttaaaaaaaaaaactaattgcatgtggtttggttgatttggaattttttttttatccacattacatttgttataagataaactatttattaattaagggatttatatttcacccgaaaaaaaaatatataacatcccattttctatagagataaagcttctaaaaaaaatgatatatatattttttttctctctatcgatataaaaattacactttcgaaggagaaaaagaaaagagaagaagagccaaaactcatttgcactaatatacaacacatatcattacaaaattctgaggtatgtcattatattcacaaacatccctctaagaacattatatttttctttttctttttctttttctttatttttactcaaccctcacttaagttagaaggggtctttcaatgtcatcctctgattcatggcttgacattttttcagtttctatcagacaagcataacagaatgatattacctgaaaaaaaaatagcataaaaaaataagaattaacattagaaaagcaaaagaaaatgagagagcattaacttatgaggagaaagaagagtttagtattattaccatgcaaatggatgcaa

SEQ ID NO: 193740 - DNA, 794 bp, Cannabis indica
ttctttccttgtatatatatatatatatatagatagatagatagatattggaaaccgtatgtattggccctttttatttatcggttcagtagctatataggcattgtcctagttaacgaatttattagtaatatatatattttaatagttattacgtaatatacgtctaaaaataagtacgtgattattatcaattgtgtagtactcttatcatgtattattccgtgtgtcaaggcccgctacatgggggtcatatgttttcgctaatttatcatgagataattaaatgatataacattttagctagctagctatagctaaaacattttctcttatatgtatccattactatgagattggaaaaatgaaatggcatgccataaaaaaaaatctagggtttattattagtactagctagtaaatttattgaaataaaacagatattataatattggaataatatttcaaaatgaaaaaacacacgtttaatgatcgtagttcacattactaattccaaaaacaataagtattgtaaatatgtttacaatttgaataaaagatcgacaataaattagaattgtacaacgaataatataaagggaaaacgtatgctctagatgaagacaaaattggtcaagatcagagattaatttaattgtaataaagaattttataatgtattttataatgtatcatttatccaaggtgatagtccaatttaacttagacttaccatggtaataagaactttttacttcaccaaatatatacataaggtatttatggttatcttt

SEQ ID NO: 193741 - DNA, 1777 bp, Cannabis indica
caatcaaaaaaagaagaagaagaagaagatattttgcttcattttcaaagtgccacgaatgattttgtgtccgagatcaaaaagtgttactaaggcaggtaactctcaaaactccattgcatttacgacacatttgaagtgacggtaatgtataatcaaatttgtcaaagtttttaataaataatgacaattgtttgaattttgtttttaactactgtaaataatttagaatttttttaaaaaattttaacagctgatcatctaaaataactacaacaacatgtacgataatgaacactgttagatttaaaaactctcttgaataccgaaacaaataaaggatatactaaaacacttacacatttttcctatattgctttagaatgtggaacaagactgctaatatatatggatagatatgatgagtagtagtagtgcatgcatgtatgtagatgtagatgtagtgttggtgacatgtgaaacacttttgtgatatagtaaacgttggtacagtctacacatataattcccatacttctttctcatcttgtcagctcacatatatattcaaaaaagccacttacttacaccaacgtctctgcctgtttatacccaacccatactcatcttcactattacacacatacacatacacaaattaataattaatatatatctactataattaattgtaaaggtaaaatgatgaaccatttatttagaactgattttcttttaactattcaaactgaaatgataattaagattttttttttcacaatgaaacataattggaataatttaagatagtgagaacaaattaatgattttacctaattatattagtttttggtagctttaattttgtttaatgccttaattgatgatcaagataggaagtaataacaataataattaatgtagatgtttaattaataattcggtaactacatcttcctcatcaaagttaccattaatccatacaaaatactcagagataatattttcagaatatataatatgaagaaaaaaaaaagagtcaaataagaaaattgaaaatagcattaaaaaaacactaaacaaattatgttactcaatcataataaaaccctttttttattattattattttaaagcctcaaagacaaatcaagctgagcaatctcttcctgaacatgatgatgatgatgtagatgatgattaggtcttgaagaccaattagaactaatcatgtcatgatcatgatggtcacaattaccatattgacccgagtaaaatccatggtgttggtgatcaagtacgggccagttcccatggtgcggtgggtggagactttgcctaggctgagctgagccacttctagtgctacttgaccgagcgggtccatggttgaagcctgcagaggaagaaccgttgtgatgagccctagttaaagccgatgttagctctcggcttttcttagccaaagttctctctagcttgtgagcgttttggtgaccacctagggcttgggaactgtaaaattttctctggcaatagttgcatgagaacacctttggaggatctgaaggacttagtgaagaggaggaagaagatgatgatgagtgatcaagaacaagatttaggttaacttgatgatgatcataatgatcattattatttatattgttataattattgttgttgttgttgttgttaagattgtaaggtaggcttagatgaagagaagtattaggttgaaactccatatttttgattatatgagagagagagagag

SEQ ID NO: 193742 - DNA, 2008 bp, Cannabis indica
aatcatggaacaagcagtattttccctatatggtcgctgctttccatgagtctgtgagcctctgctgcttcagataaagggtaagatttgtagatgacaggtttcaccttaccagccccaattgcaggccaaacattcttctccacttcactaacaatagctgctttgttttctagagtccttgttcgcaagccagccgctgcgccgtggtcatacacaatcagcaaatgataaaagaggtaaagcatattcaacggaacagtaataccaaaactagaacatgatcatttgcttctgtattcaataagaaaaaagaggagacaagaggaaaaaaaaatgtaatacgttgagctgaagagaccaactcaaagaaagaaaaaaaatcaatgagcatatggaaccaaatctcaatagagatggtaataccttgcactgtgaggcgcttgggggaacgaaagcacggagatctaattctgtaacagctccccccactgaacccaactaatgaaaaagccttccatcataattcaagctctcaagatttttcttgaaataggatgctccaatgctatccagaataacatcaacacctacagtttcccaagtgttaactatgttttctcaatcacaacatagaaaatagaggcccagaattttcactaatatgtaactgctacaaagtaaagtacctttaccaccagtttcttcttttactctggaaacaaagtcctctgttttgtagtttatacaaacatcagcaccaaggttcttgcagaaagctagtttttcctcgctgcctggtaaggaagatccaagtatgtgaatacagcagaaacagcagatatgtcataagataaacaagtatggtcagacctgctgtgacaaatactctcgctcctatgtatttagcaatctgaatggcaaatgttccaatgccactagagcctccatgaacctgtattttgaacatgttacatgtggaaaagttgttgaaattgcatctaccctaatacttaccaacatcccaattaaccaatttacttcaattttgaaagaaaaaaatgtcaagctcccaacgcaattggatcaccataattatagagttgtatcaaataactaaataatcatgtacaatattgtaaccatgcggaacataatagttgaaatcaataaaatcacatccaatcaatcttgcaaacacacagatttagatgtttcaataccaaaataaataatctcctattaattattagtttgatataaaaccagtgccatcccaaatcacagttgagctgttggaccatcctaccatatactaaacaacaaggaatcaaatgaaagaagaaaagtttaccaaaagtgattccccagcagtgaggcgactggtcatgaaaacagtggaccaaacagtgcaagccacttcaggaaaagcagtagcatccttcaaggaaacaccaggcggcaatggaagaacttgtccagcaggcacagccaccttctcagcatacccacctccactaaggagacaacaaacctgtaaatgtaaaccatgaattttttctttttcataaattgtcttagtttcagctttaatttaggagaagaaatgatattaattgtggtaaagaacctgatcgccaactttccagcgggaaacgtcttttcctacggcttcaacggttccagaacattcaagtcccagataaggactggtaccctttggtggagggtactggccctttctttgaagggtatcggctcggttgagcgctgtggcttcgatcttgacaaggacctcatcggcgttgagctcggggtcttcaacgtcttgaaatttgagtacttctgggcctccgggagtggttatcactatcgccttcatctcttggcccccaaatctgtgtacatgtacaggtctactactatactactacttcaatcccctccctccctcctctttaacgtcgtcggtttcttttttgttttgttttgtcgtttgtgtttctac

SEQ ID NO: 193743 - DNA, 1782 bp, Cannabis indica
agcaatctaaatcgtaatcgaaaatcgtatagcaacccacacagggccggccctgggcataggcgggctaggcctgtgcctagggcccgcctagtccaggagcccaaaaaaattttccccttttaaaattacacaattttttttgctgattttgaaaaataccattttttttcgtaaataagggctcaaaaataattttttttttctatagcccactaaatttcagggccggccctgaattcacatagaaactactagagaaactattttaaaaacccaaaccataaatttaaaaaaaaaatgaaataaatagtatataacataattcccctaaatttaattaatatacaaatgcactattttttagcaattatacatctactttttctcctccatgaaaaatagagttcttctcttttcctttttctcttgttttctttctcaccattttcagttacctttctcttagtctttcacaacaacttttaccattttcaccatttagattattgacagagattaaatttagcaatagaacgtataaatgaaataaaaaaagttaataaagtaatatttatatgtaaataaaattttatagaattgaaaattataaaaagaaaaaagtaaaaacagtatagaattaacaaagttacatatataatggtaaatacccttttaaaaatagttatgaatattagtatgaacaatagaatttaaatccttgaataattatttgaaaaatatatgttaaattgatttaatacatattttattttattaaattatttttaaaattttaaattatttgttagtagtataatatagttatatgataaattagttattaattttattaatgtaaataatataaatgtagaatattttaagtaaaatatatttatttagtaaaatatttagtttgaattattaaaattatttcaccaaaattaaaatattctattggtcttaagcatagaaaattaattcaaacacatataatttcaattgatgtaataaacagtattcattttcattattatatgttttattaatttagaaagaaatacaaggttatcgatcttataattaaattaaacaacttttataattaggaaaacattacaaacaattggatgtcatatataatatcatcgtacaattattacacactcacacatagagaggaagagaaaaactactgatgaattaataaggtagcggtggacctggtggagccactgccactggtggtggaaggtagtgaataagaaaattggagtgtggcggtggcggtggggaagctctccggcgaagtaatctgcggggtcgagcaaccgacgaggatgaagaagaagggttgagtggtatggctatggccgtatagttactaggattttgtgatagaagcactactacatacatcagcaccacaccaaccaagtacaattttccacccattttgtttttgttaatatttcttagtttttctcttaattcacttgtataatcgttgttggtcatgtcatatattcatctttatatattgatgattaagaatacaaaaaatatagtttagatctactcaaaattaaaataatagcaaattgtggttggttggtttttactacaccattttgaagttccaacaaggaagcttcacatgcccaaggaagataatagttataatgctatgctctcagttatatttcaatactagtcgaagaggtcaggtgcttagcacataccgaagaacgtggctcgaattcgaatagttgaactcgc

SEQ ID NO: 193744 - DNA, 1265 bp, Cannabis indica
agagaagaaataactgaatacgacatcgtatcgctgtaaatcgaaatctgcaaaacccaatgctatttattaaattattgtttattaatgtaacataataaaagaaagtccgagaataaagcacacgtagctgacccagagatagaaaagagtaacgggaagtctacgtggcaaacaagggctaagctttataattgttttcattaattactttttaaatttgaaatactaaattaataatattctttttgaataaaataaataggtcgaacgtttgtagtggagagtggagacgctattattctagtttgcctctaatcagtaatcacatgggtttcggtgggtcccacgtaaaatcctctgcccatcccttctttgttttctcctctactagtgtgtgtgaccgacttaagtttcttaaaccaaatatctaaaatacccttctctagaagccgatttgagcaaatatcgtccaaagtttaaaaatatatattaattattttgttgtgatatgaaatatttaaaataactgaaaaagatgggataaaatgcactcattggagcacgttgattggtaagaaatcacgagtagagtagaaaaaatggggtccaaagggacttttactttaatttgaatatttttgaaatttgattctttagtttggaacaacgtctttttcaaaaaaagaaatatagatattgtacaattaaatatgtttagttatatgattatgataatgtgtttttgttttgtttgtgaagtgtgattgggtgcttcttcttcgtaaagttaaatgggccacaaatgaacccccacccgcccaccaaattttgctggggcgcagatagaacatgcacaaacgttttgctgctctttgttgtagatttaaggcatgactcctttttttagctgagaaacatggaaaattacattaagcaaaagatagaagtctggtgagcacatgggactcacctcccaagaattaagaggaccattacaacttacaaaagtcatccagcctccacttaatcaaagtatgaactgaatcattaaggtctctcgaaatccaaacaacattacaattaaaataagaaaccaaatctaacagcttaaaatagccaactcccattgagtagggatggacctacgtagaaacgagacgagacagtcactcctagaaaaaaaaaaaaaaaaaaaaccaagaaatatatatatactaggtgaatgtacgtgtcgagccacgtattgatagttttatttaaga

SEQ ID NO: 193745 - DNA, 4776 bp, Cannabis indica
aaattgtaccactcgaataaatttcccaatttgggaaattactcttcataccgtctagtttattctccttgattttggtcttaaaaagagtaccaaaaccaactttattttctttacaaacctctagaatatagctttttttctctcttttatgcatacccctaacattctaccctatcacattaaagttctccatcagataagataagaggagttgtcaccactgccttcgccattccgaagagcctcataaccattacttaatttaacttctgtttttttctttccttttgtagtatcatttctcagttgtttctttttaggagtaatccactcctaatctgtcaattgcgtctcctttggccgagaaggatccactacctcttttatttcagctgcattttcttctttagcagcagtctcctctcccattatctcatttttcaagtggctgcttagttgtttcagctagtttagattcccccgactgttttgtgccttttgtatctcctttgccatcttttttcctccaaacaaatcatttttctttgttacaattagccacaatgtgaccaagattttcacaagctgcacatttggatggaagccattcatattctatcaattgttcaaccaattgtttcttctcattaatgaaggaaatacacataggaggatcttgttgaatctccatgtctacaagcactctagcatacttcacaatcgatctagattgggtgactttgtcaaccattatctgtctacctacagtgctaacaagagcacttaggttctcttttccccaatattgtagacccaaaccattaagtctcagccaaacaggaattgaccgaaccatacttgctgcatccatatccattgaccaaggcctcaacacaactggtttgctgtcaaagtgaaccacaccagtttccaatattataaccctagtttcttcatccctaaaacagaccaaagtaaaactggaatgcatccttaccactttctcaataccgagttttccctaaattcgcttgacgaaaccttcgaacacgcggaatggaggattcgctccaagtactatacaaacaattgaatttttccatagctctgccttagcttcagcttcatccaagtcaattctagctacaatttgatctcccacttttatgggttcagtgtattcaagacggaatagaggagtacaaacgtgattagtgttaaatttgctccatacatccttggctgccgattgaaaatcagtggtttcaacctccactgctcagcttactggttctggagaagaagccagaccttccccatcacctaggtcaagcacttcagtttccagcacttcgcacgggtcaaggaacgatttcacctctgctactggaatctcctcttggatcgaagggagatcggtgggttgattgatgtcggagatcacatccaccggctttgatacagtcttcttcttccgagccatgggaagagggagagagtatcgtacgccccaacctaattcttctttttcttttttcttgttctgaaatatgtataataattatttttttagaaaaatattatattttgtacaattaaattttgatgtcatatatataaatttatcttcttttttttcacatatttataaatgattatatttattatttaatatatataatacagatcaggattttcgaagaaagaggtaccatttcaatacttaggtattcctatttgtgccaaacgaatttctggtaaagagtgtgctgtgttagctgaaaaaattacagcaacaattaaaatatggagttcaaggaacttgttcttagcaggtatagcagtgttagtaaactctgttttgatgtctatccattcttattggagtcaaattatgatccttcccaagaagatcataaaagacattgagcagatttgtagagcctacctttggagaggtcatcatacaacaacagggcctggactaataacttgggagagtgtatgtcaaccgaaggcagcaggaggcattgggcttaaaaagatagcagaatggaacatggctgccttgacaaaatacgtttgggcaattgcgaacaaggaagacaatttgtggattaagtggatacattgtgtatacataaaaggggaggattggtgggactaccaagccccacaacaagcgagttggtattggaaaaaactggtatatgtcaaagaacaaatcaagggaaaaatgagtaagcagcagtttacaagctcaacctatacaatctctaatggttacaatttattttgcccccctcaaaggaaggtaaattggagtcatggagtttggaataggaaaaacattccaaggcaaagctttatattgtggactgttgttcaagaccgactccgaactagatcaagattgaagaacatgaatgtcatctcagatgactgctgccttttctgcagtagccaatctgagacaacaggccacttatttttctcttgtacatttgcggctgagtgtttattgcagattaaaacagttgcattggaagattgaatcggtggacctggatgcaattttgaggtgcattgaaagatcaaaagcaggcaggtttcgaaagagtatctggtataccgtaattgcttcagcagtgtaccaaatctggaaggcaaggaacttactgttgtgggattccaaggagccgagagtcattgaggtgactaggaatattaaagaagaagttaagagtagatttacttatgtatggccttaaaaagtttctacatatgacactcaatggtttttagagattgtacaacaatagtaaatgggaaagggaagggtatcatgtaatattgggatgtaaagtgtaattagaagttgactcacacatagaatataggtcttctattttgaagatgctaatagcttgtaaaaattgtgttgagaaaaaaaaatatatatataatacaattttagtaggcttaccaaacgagccgaaaagagtaaacaaaaacacgataccaacaaccgcccaaagctaataataatattaaaaaaaaaaagcatttatataacccaccatgaacgatcattccatgccaatcaccttcgccagagtttgatgatcccatgaatgttatgaagattatatacaaaaccacacgaacaacatttttaaaagaacatcacgaacatccaacaatatccattattacaataatcacgaaatatcaacaacaccacacacaaaaacctaatgaccaaatactactaataatcatgagcatatatatatcaccaatgataatgaactctcggcacaattcataacatgttgttcacacgtgcacaaaacagtacaatttcatcatcaacgatatattatacgaaagaaaaacaggccacttatcatagcacatgcatgcagctctctctatctgctgaaagaatgacgaggagatgagaatagacggcgtggagagaacatccccaaataactaggcgaagctatgccatcaatggtccgatattcaggcatgaacgcttctccatcatgactgtgacgatggcgactaccagcaccactactactactagtcttctgagatcgtccgttaaaagtcccatacttaacaagtcgcccaacccaagaagatttcttactcttagacccattactggcaccaccattgttcattctatcgctcatgtactccttcaccgcatgcagcccttgctcgaacacttccatgggtggcgacaccagcgggttgccatcaacacagagtgtctggagcttgcgtaggcagccgatggagtcgggcaaggaggtgatcttgttatagctgatgtcgagctcaactagtgagaggaggaggccaaccgagtaaggtagggtttccaagtactgaaagttctggctgacgttaagggtttcgaggttgattaggttttctaggtcttccggtaaggagcgaagacagtttaggcgggcatcgaggatacggaggttggtaaggtggcttatggagtagggaaggaagacgagcttgttggagttcactgagagcttctttaggtttgttaactcgaatcctatggtgtccgggagctttctcagttggttgaagttggcattcagatcttctaggcttctgcgttgataaaatggtaatttacattaacattacttacttaatagagaatctgccactataaatggcatattattgagcaaaatttgcacacacaataattcatgaatagagcaatatgaagatcgagtgctaaattagttaaaaaaaaataatagctagttaatgttttcgtctttttgtggtgaaaattgtaagtataatcgttaaaatataaaatacaattaccttaattcgttactatttatttgcagtacttattagcagttcttttaccatttatatctctcgtgtaggaataacgtcctgggctcatcttatatatatactgaaacgttattgacgtgcctgagagcgtgagtcaacatcaagaataattggcaccattatggtatatatagatatttatttaaagaaaatgtatatgtgattatgtgaacatttttcaacatataatatataaggccaacaaaaatcttaatacatttagagagccaatatgtatgtgtgtgaatggctgaatataatgattagtacggttgagactatctccacgaaaagtttgactaaagaattaaaaatataaagttattaaattcgtaagtcgtatttatataa

SEQ ID NO: 193746 - DNA, 586 bp, Cannabis indica
acacttatagtatcgggattatgtgggataatttgttatgaccattttatccctaagtttaaagattacttaaaaataaagtaagggtataattgtatttttctacgtaagtttattctaaaaaatctttgtggaattattagtgtaagttaaagtttatattggaaaattactttggtttaatcaagagaaataaaaattagataaacataaaataaaacctaaccttctctctccttatctctctcggctccaaagataacccaagaaacccaaccttaatttcttagtgagcttaacaatgataattttcatttcaaggtatttttggttgttatttgatgaattatatttagtatgtaattgagatgttctggaagatatgagtaggtttgggtttcaattgaggacgaaaattcaagtttggtgatttctacacaaaaacggttaaccgttgattgtttttgtagaagccttgaaccgtttcacctgacagaaccccagtaaacggttactatttgggcatcccgataaccagttggggtgatttttaggtacctcaatttttttattttctcgatattta

SEQ ID NO: 193747 - DNA, 1420 bp, Cannabis indica
caaaaaaaaaggtgcatgacaaaaaccaaccaaatgtttaaaaacaattaaaaaaagacaaaggtcggttgaggctacacccaatatcgataataagcaattaataatttgaatttttgattttattttatgcagtaattaattaagctcacgtaaatgttcttcatccataaaatatttatttcttattattctaaattcatatacaaaaagaaaatgacaaccaaccacaacaaaaccaacctactccaatattattatgtgtatatacatataacattaagggtttgtaatatatatataataatgacaatgttgacgaggaccctaattaaattaattattaataatttagagagataaacactattatataactgataaagttaatcacttatgacaattaatatttatatatatatatatatttatatatatggttggtatcgtagatcaagtctctatctgattatattattatatatatttgcgaagagccatttcgtttcgtaagagaacaccaagaataagttaaagtaaataaattttgagtcagtactagacattattagacaattaattttttattgtattgtaaacccaaaataagaagaagataatattagtaaaattaattaagtagatttgttcacgacgacaaacaaagcaaactcagctcttacgtcaaattttgtgtcagagtcagaccctaacccacacaattatatacaatatcaatatatatagagagaaaaggaatagcacagaatcaacctaataattattatttttatattttgtaatgtcattaatattcaaagtgggaaaaaatgacatcttaatgataatatattataaaatgtataaagacaaaataattatgagaatgcaaattaaggcaaatctttaaaagggtaggtagaagatttctttggagcaaaatgtttacatagtttcagcaaaatgttatgttgtatatatatagattagatacataatacattgtaatcacacgaaattattaaatagtgtaacatatatatatataagatatcagattcagaacacctttttagtttattatatttattataatatagaaaaaatatatatcggtacatattctctgcacgtaaatattatatataatattgattcatctttaaaaacagttgattggtttagcttaaattcaacattagtgtacgtgtattttttaaatcaaatttattttttttttttttagattttaagtcgtttattatatttacaacatgttttacctgggactcgaacccaggacctccaacactcacacaccacctactggccacttgagctagcccaagtgtagtattttaatcaattaggctcgttgaaagccgtattagtcgtattgtattgtattgtattatatttg

SEQ ID NO: 193748 - DNA, 2265 bp, Cannabis indica
caacaagtcattccattagaatgacattattctaatactttaatatacaaccaaacaaagaaaatgagatgaaaattatttcttttaattctattcaatttcattacctctaaccaaacgacatcttaatattcatgtacatgtagaagtttcataaatatatttaaatattagaggaattatctcatatactatttttttttttaaatttacggtttgagtttctaaaatagttgcagcagtagttgcaataagagtttctatacgattttttgttacaatttaagttgtagcgctagttgcaatagggatttctatgaagaattttgtaaaaatgtaaaaaaaaatttatttttaagtataaaaatgaaaaaatccttaattattattattattattatttaaaattaaactaaaatatttaggtgaaattttttctttaattatcaactttttgcaaacgaatcttttattattattgttattattattattattattttttttaaaacgaatcttttactatttgaaaaccatcactatatatatgatcaaagtcacccaccgtttttgtacatatgtatgaatataataagcacgtgataatatttaacatcatgtacatcatcattatatttatataatttttatgttttattgtttcggctaaaaggtatataacgaatctccattcaggaaaaaaaaaaaaggataagtactcatcaaatatctttctaaaagcaagataacacatgaaattaatagttgggatagaaattgaataggtaataatggagtgcacctccaaactccatcctcactatttatgtccttcattccgatgttcccgccgcttaatttctaacgggtttagaatagaaaaattcttattaaatataaaaattcattaatataattcaaaataaaaataaaatagttcttgaatataaaataaatatttttcttaaatatattatttgtacttcatattttataaattgtaaaaaataaatgagccagaaacgtaaccgaccaacatatatatatgtatatattgatgttaagtttgttgttggcagtgagaactcgtcaactaatatttactaaaatattagttagaaaatcactcaacttataaattagagctaagatgaagagaaagatttaatataacttcaaatggctatctccaagtagagagaaaaaatgaaaattttttaatgctctccatgtagtgatacaagaatgagtttccaacaccctctcacatgtgagagaggggtatttataggctctaatggcctaagatacatggtggtcccgaggggacaatgtgttattttcaagctgcaagttgcaggtgcaggatgtggtcttgcaccttgtactcttgtctggtgttaggtggtcccgggctgcaagggtattgactacaacgtacccttggtcaagtcttcagaccttccaggtgcggtgtctccactccttgtaccttattttcttcaaaaagtgaaaaaggcatggccatactctcctcgagtgcttaatccgtccttgtgttcgtacacttgtcgcttcactctcttctttcttgggaaggttccaccaagttctgaaatgtcatgaccgaattactttgcaagaggcttggttgagtgattttgtaggaggcctggccgagtgactttccaggaggcttggtcgagtgaccttgcaggaggccttgcctagtgactttataggaggcctggctgagtcactttccaagaggcctggccgagtgacttcctaggaggcctagccgagtgactacccaggaggcctgaccgagtgaatttctaggaggcctgaccgagtgacttttcaggagacttggccaagtgaccttgcaggaggcctgatcgagtgactttctaggaggcctgaccgagtgactttctaggaggcttggccgagtgactttttaggaggcttggctgagtgacttcccaggaggcctggccgagtgaccttgcagaaggcctggccgagtgactttacaagaggtttagccgagtgacttctcaagaggcctggccgagtgacttcctaggaggcctgggcgagtgacttcctaggaggcctgggcgagtgactctgtcactcccagggccatgtcactttttcgctctcatggccgagggactttgtcattcttaaggcctttctcacctaacctcagaaagtacatatgccatttttcggggttaacacttgctccctagt

SEQ ID NO: 193749 - DNA, 1862 bp, Cannabis indica
aataaataaataaatatgatattacgaaataatctctatattcttacctttttttcatgatattattgcaatattctcccctcggaccgattgcattatattttaacattaataagaaagtaaaacgaatagagtagatatattatatggttaatattattttgtctcttatattttgtaaaaaaatttaattgaattttatgttttgtaaaataacactttctagtttttaaaataaaacaaaatagtattatgagcttaattttttttttttaatataatagctttgaagataattacgcaaaaatatacctaattgtgtcataacaattctagattaaattattattaatttttattttgataaaaatcagttaatgatactattttatactatttttgaaaatacaatgtcttacttatcaattaacaaaatagagagtccaataataacttttgcaaaatacaaattctatttaacatatattatatttataaattaattaattcagattgtagttgttttaagttttttttcttttcactattcagagaagaatttattttttattgttattttagattatatatttattaccacttactttttattttattcaatgattatttaaattaaaataatataaaataatattctgaatttaattttcttaaataacacttaaaaatattataattagacttttacatcttttatatcgtagagactgaattcaaatagattatattaaaaaaaaaataacaataatttaaagtattatcttttaaaattttagaaacttttgttatgtaacaaaaatagattgctgaattaataatttttacacaataccaaatttaaaataatatttagccctcttaaatattattttaggttcttaaaattatatatatatatatattattttaggtatggtcgctcatttcaaattgtgaaagtataatcatggagctttatggaaatagcaataataatttatttatttttagaaaagataaccataataaataaaaaatagaacaaagaatttggactccaattatgttaggaaacgtaagattttcttttttcttaaatataaataaataaaatttgagagaaaggaaacgtaagtttgggatttgaactttatttgtagattagctttagaataaatacaaataaaattcattattttatgcaaggattataactttaacagcagagcaccagtttgactagatttctataccaaacaaggtatttatttttaattattatcaactattttttttacaaaatataaaagtaattttatttaagttacattactccctggttctagtttttttttttttttttgaaccgagtctatttcttttaattaataataaatttcaatgcaactccatctaccctaaaggtgtttgttttggtattaccaaaatacccttaccttttactaaaacttccatttggtccttattccattgctatgcaaaacatactaaaaacaacattagtttcattatttttctttcaggcgaacaacaattttaggtttagaaaattctagtaccaaataaagaaataataatatgaatacatttaaataaatagtttgcatataagataaatatacaattttttactaacttaaattgagaaaaggcaatattataacgataccagctcacacaagtaacataataacacaagaaaaaagagcaaaattcattatgacaagattgtgaaaataaataaataattgaaataagtaccctaaaagagtaagccgaaagtgattttttcatttatttacaggggtaatttgggtaaaagattattggtattttttttt

SEQ ID NO: 193750 - DNA, 1391 bp, Cannabis indica
ggcaaaaatgcaaactataacttcatcgcgtagtttcaaactatattttttatgtaatgtggtgcagtgcgaacgattgttggatagatttgatgaacacccctaattattcgaggtatctctatttttcatagttgggcctagggtttataataaaattgggcctgaaaagttgacctactggaccaagtcaaaacttctctaattttctgaatcggtcgttaatgaataatgactaatcctcaaatgaaaacacacgacaaaacacaacaacccaacacacttaaattcgaaaaggaataatctagttaatgattaatgattatttgtaaaaaggttacaactttaatcggtaaacatgaataaaggaaaggcctttagcttcttggactctcaaaacaagagcccaaaacccaagaccctgtctttcgctttcgaggagtacaagactcgtagtaacagtcaagcagagtagaaagatatttcccatgtttccctctctttcttcttcttcttcttcttcttcttctttttctacattctcacaacaactcacagcgaccaagaagatgtatgtctcgcaagcacccgctgcagcagtctttcttttgttacgacccttttcacataacaacaacaccattaacttctccaactctaagctttcctttgctgtcaccaccaccaagtgtggttgtgccactgctaaccagacccctattggagatgatgtgttttcagttacttcatctagttccagtgactttgattacttgggagagagtaccaaaggagatttgaacctcaacttggaccatattcactcattgggtatatatcaaaatcgtttctttgcctttttttttggttccccctttgttttgcttagttcttttcactttttcttttgcagcagttgatggtcaatcaacattagaaggtcccattgaagaagtggcttggatggaggctgaagaagctgagaatttgcttagggaccttggcattccggtgctttttctactctcttagacaatctctcttttttgccctttattaaaaatgacagctttactgaacttgtgcactttttcctgctgtagaatccttcttcatccagatattcacctcgtggtatattttgcactagaactttgaatctcagatcaattagtgccattggatatgatatggactatactttgatgcattacaatgtcatggtaaacattactttttctcctactattgtttgtgttgtgctgataaatagaccattatcaatttgagacagtagatatataataatggctgcaagtttataattaggattaaatccatttttttcatactacatataattggaattatgaagaaggggggttcttgtt

SEQ ID NO: 193751 - DNA, 1379 bp, Cannabis indica
ttatggtttaaataatatcacatgagaacaatatataatattgtatatatataaataatatcagttcaaatatcaaatatcagtttaaatgggatttgttttatttttattttattattttattatatataaataatattttattattttattaaatataaataaaaagtcacacccatgaatttctcataaaccaagaattcagttatataggcacactttatatagaatagatatatattgtaatatttactgttaagtagctagttaactacttaataatttaccttccacatatttataacgttttttttccaagggaacatgttatcatctaaggggagttatccatctaataagtaatcatttaccatcaagggaacttgctaccacattaggagtaaccagttacttatattatataccacctattctggataacttgttagaatccttggaataatttactagttacctgttacatagccctagttaagtgtaggttgttattatcttagggatggatgaccatttaccaattgtttgagtttaatgctcaatgtctatttttgtaatatgggtaactcgttacctataaatttaatggtggtcacaccatatcatttttttttttaaattattgcatggtagaaattacttttatttgtgaaaacatgggtaactagtcctatatttatattattatgcccaacggtgctacctcttagggtaactcgttatcctcccagggtagatggttactcgcattataacatgttttaggttagatttagaaaaaatcacatctaaaaatgtgaatggtaactagttaccaactccaaaactaaaataaaaaaaaaaaacaatgtaaattacataatgtggaaatcaatttaccaccgagaagcatttgtgtaattttcaatcaatatgtatgtgtcttaaagaggtgtacatttatgcatcatgaatgatattgatgttgagataatgaaaaatttcgcccaacataactttaatgtcatttttttaaatgactttaatgtcattttgaagttaaaaaaaaacattaggttggactaatttgaaaagaaaaaaaatagaaactagagtttatttattatttaagactctttagggtttagttaataaatatatttaaattatatctttatttgataattattttttataattattaaagttaaaaattggtatttaaatagtttagattggatagatggtaaatttgaaaaaagataaattgtctcatctaattgaaataagttggaaaaaatcaaatcatgggcctaagctataggtttcagccatgatgtggatttatagttcatttatcttttattttagttgttaactca

SEQ ID NO: 193752 - DNA, 2519 bp, Cannabis indica
ctgtatgcaatccttgctgttatgggtttagttgcctttgtcatgactagtagaaggaggcattgatgggataggttgagtagagaagtaaaattgcaacctcttagatgtatatccatataatgtataatgtactaatatagataaaatagaaaagaaaagataaatattttatgttaaagtttaaattttcttttaatgaatgatgtaaaagttctaatttgtttgttggagatggtgatttaggggtttgggatagattgtctattcaaatgaagagggttcaatggacttactgatgaaatatatgatccactctacattttgggatctattttcttttaaagtttgcattatattctttcccatttttatagttgattgtttgtaaatatataaatagatatatgtgtaatatggacaaccgtcctttaaaatatgttttgactttaatattgttggagatgattctccaaccccaccacatctttgcctaatttattttctgtttctctcatttagtaacaaaaaaaaaaaaactgcatttatttcatttatacttgatgtgtaagcctagtacttttgtttttcttttttcactttttttcttttgaagatttgtgctacattgcctcatattccaccttattaactttcactattcaattttgtacatgcagggatagtaactgacataaagcatgaagatgtattagaccatcatgatgatcaaaattcaattaagcagcacctaatctcatgttacaaaaagaatatatgccctgctttgagagctgagattgaagaaaataataataagagccctggcagaacttcactgtctagaggtaatgaattgaggaaattgtcttatttgttcggattaacaactatagattctaatacttgcttctctactttgtttatggcaataactaatggaatatatgctgaaaatgatcaaaattatgctatgtacgtataggtagtgataatcagtggattactagttggtgggagcaatttatggtgctgcttagaaggggtttgaaagaaaggaaacatgaatcttactcaggcttaaggatcatccaagtcatgtctgtatcgtttctctcaggtcttctgtggtggcactccaacacttcaaatatacaggatcaggtagatattttttttttctttgttcagctttcaatgtcatggaaaataactgtttaactagttagtggccattatatgaagcacagaagtcaactttctacaagtcatatatgatttattggatattgtccatcattgtctcacaaattgacccaaaagttatgactttttgaagatcatatcactttagcaacaacagcatttaatacaattgctttcatattggaccattttgatcattactaacaattttgacaatgttgaaacagattggactattgttctttttctcaatcttctggggcttctttcctctattcaatgccatctttgcattccctcaagaaaggcctatgctaataaaagaacgttcctcgggcatgtatcgcctctcgtcctactactttgctagaatggctggggatttgccaatggagcttgttctcccaacagtctttgtaacggtgacatattggatgggcggcctcaacccgtctttcattacatttatgctaactctgttgataatccttttcaatgtgttggtctcccaaggactaggactagccttgggggccattctaatggatgttaaacaggccacaacactagcttcagtgacaatgctggtgttcttacttgttgggggatactacattcagaaaatcccagccttcatagcttggttgaagtacatttcattcagtcactactgttacaagcttcttgtgggagttcagtactcagaacatgaagtttatcaatgtgaagttggattacattgtagggttatggacttccctgctattaaatgtttagcactagataataagtggtgggatgtggctgctttgactgttatgtttgtggggtataggcttttggcttatgtggctctgaagatggggcagcctcactaacttttcattgacacataatcaaaagaaaagtaaagaaaacaagtttgagacactaatgaatatgcatttgagttgaagccaatgtaaagaatttgaatgaaggttcttattctccaacttcatcacatataatcaccttggctgactaaatttctaggccgactctgttcttacttaggccttacaatgtattcaatttgtatgcaagtgtttttatgagcgatttactaaatgaaaaattgaaattatatgtaattgatttttatgcaaggatttttctattttttactccaaatttgtcagtagatatatacaatcactctaaccaaaaactagaaagctctaagtttagtatggcttagtatactctaattcagaaaaatgaaaatcagaaccaaagagttagaaagacatcaatttttactacagtcccta

SEQ ID NO: 193753 - DNA, 2071 bp, Cannabis indica
tatatatatatatataatcagtaaatttagaaaggtgaatcaatgtgcatactgcttaccatgtaaaagatcataaaggcttctgtgagggagatgatcatatatcagaagcttctcccctctctttccttgatagaaagccctgagtggaatcaaattctcatggcgaatcctccctagttgctttatcactggaatacatgagcttctatccttacagctaccttctctcaataaccttaaagctatagtgcctccatcagcaagctttgccttgtaaacagttccataatttgtcttctccataacttgtcctgttgcattcaaaacatcatctaatgtcaaatgttcacccccttgaaacatattagcttcccctcaccgccaccgccacctccacctccaccaataccatcatttccatcttcaatatcatcttccccttcctccaattcatcctcactatctgctttactggttctcttcttatgctgcacatacccaataagcactgaagccaaaacaacagtaccagtcatgaaaccaatcaccagaccagcgattgcacctgagctcagtctagtgttttcactgcaacttcttaagggtaacccacaaagggcagggttgtttccctcaaacacctctgcaccaaatgatttatcaaaaactggcagtatcccactgaagttattatgtgcaaggttcaacttttcaaggttcagctgagctaaaccttgaggaattggacctgaaaacatgttgttcccaagatcaagctgtttgagtacaggaaacctggttatgatgaattcagggaaattcccactgaacttgttgtcacccaaatcaagaaactgcaaattcttgcaggtagagtttggtaatgcaggttcaggaagagacccagatagtgagttaccatgaagcctaagagaaactagtttatcacacaagttccatatagaaggagccaaaaccccatttaacaagttattgcccaaatcaatatcagagatagaagaactgtagccgagctcaagaggaatggtaccctttaatgaattaatgttaaggtagagactttgtagcatagcaaactcaccaagctctctggggagtgaaccagataaattagcagcaggaagctgaagagagagaaggtgaagagaagggtctctgaaaagggtaaggttagtccaatggggtgaagaaacatcgtcgcatagaagaggagagccagtggaaaagacccatttgagacccctccattggcaaactggtacagaagaattccatgaatttaagagtaagttctcagcgttaccttgtaataaagttttgatcttttccaagagaagaacagcatcagcagagaaagaagatggcggtattattgatacagctgaagactcattaagtgttttagctgagctagtaacgaaggagacgaagaagaaaacatggagaaagaaaagcttcatagactccatgaaagaaagcagagtcaatacagaagagaaaaaagaaaggtgagagagagtgcagagtggtggggagttcaaaggcgttctcttttttgggaaagctgacagagtttcttttgactaagagagtaataatcagtaatctcagagtccagattaattaaacggtcgtgatttgcttacatactcatgcagtactaaagatatgcttttcaaaatgatgatccaacggtggagatacatttaggagtgaaaaatggtaatgcagacctcagataagaaataatgcagtctcattcttatatactggtaaaaagaaggaagaaaaagtgaaagatgaaaccatttcatttcattcccattattgttttgcttttttttttttttatatatatatatataatatatttagctttgtttgctatgcacgctcacctttataattctttcttttattatatagtctttaatttttgttattttttaggctttgattagcatatgaagaagccaattgtagttccttcaaatcaatggagctactcccatccttcatctctaccctacacgtgtacatgatacta

SEQ ID NO: 193754 - DNA, 1378 bp, Cannabis indica
catataataacataggatacacatatatgttaaagatcatgctaaatatagtatcattaattagttaatgttgcaaattatatgagtttctacataattaagtataatttaaccaatgacatatcttagcaacatttgaggtatatgtgggttaacttattttactttgataatgattacagaaaatcactaaccaatactgatcgaagagaagaaaataatattggcttcgttgatgatgaagtactactacttgtttggtactataattttgtggttattaatcacaacaacaacaacatcgtcatcaaaagtagtatctccacgatttgcgaaacttggttgtcaagaaaaatgcggagatataactatcccataccctttcggaatgggatcatccaattgtttccttaacaaatggttcgaaatctcatgtgataataactcttccaaccctcattttagggcttttctcaaacacactcaactacccatatttaatatttccaaacctagtgataatggtcaatatgattttcttgaccgcggccagtatcaatgggttcaagtgggatatcccattagtttctctagttgtccaaacaagacaaatattaaagattcaatagatttagcagacactccatttttctattcatctagaaattatttcgtggcagtgagtacttgcggcgccttcgccaagtacaaaacaaggcgaggcaatatgctcatcgagtatggttgtggaactacaaccaactcaaactattgcttatccaataatagtacgatgttattaagtagtaatattgattttaataattgtaatggcatcgaatgttgcatgactccctccacttctgatgataagaactttgaaatatccatagatagatcaaatatgtcttatagtgaatgcaaatatgcattcttgatagataaaaacgaaatgggtaaatataaaatattccgtcatatggattatgcaccagttcgactatcttggatcgttaacactacattgttcaacaattataaaacacatattaatagcttcaagtgttattacgggaacaacaacatgatgggtattagtagtactatgaatttatcttcagacctcggattttgtctctgccaacatggatttcgaggaaatccctatattgtggatgggtgtcaaggtaaacctccccacaaatattttagaaatatattatttttttttattatatacatatatatatacataatattatacatatacataacttttttttactttgtataatttgtcagatatcaatgaatgtgatgaacatgatgatggggttgagttgtgtccaggcagtacttgtgtgatacttcggtagcg

SEQ ID NO: 193755 - DNA, 1295 bp, Cannabis indica
aaaaaaaaaaacaaaagaataaagacatagacagcttatgccaaaattcacatgcaaccaactagaaaagtaaattaataataatattgagttgggttaaaattaatattcattcaccttgcaacggagacagtccaaggagtaacaagctgatccaccgtggcactatcctcaccgtacacgtcgtcaacgcctccactagacttgttatccatattatgaaccaatgaagaagaatctccaccgttgatcaatgtactactctccattaatgctgccgaaaccttcctttctcctctgccaagcaacgttattgtgttcttctgcaaatgcccaattcaataatacaacccagaaagtgaaaaatggttttaaatcaaaactcgttgtagtattttgaaaactagatgcagagccaccctgtttttataggtaaaattatagaagatgagagaaagaaagaaggagactgcacgtgtagaatgttatgtcaattgtcaaagacaagaccggagactgcacgtgtagaatgttattattcaaacgaaactaatcaaaaataaaaagaaagaaaaaagaggtttgttggtcatatgcctaccagatggtttttagctttcagcaacaatatcatactggaggaacgtgtaagggaatcaaacttaatattattattattcactctcaccttgtttttagagagagagaagggatcaaagtagaaaggtcaaaggtggaagttgggaggtagaaggtgaaggcattattacccttttttttttaatgtatatatttttcaaaataaagagatgagataaaagattttttattagagatgactatttatttatttttaaaaaatgaccttagaaatgattttattttattttaacatgaaattatgttatattttgatgaaaattttacaataatacttcaatacattagaacaaaattagctttttcttatataggaaagtataaaaaaatcaacaaaaggatcaaatttttgagagtatataaaactttattaaatatataaatataacataaaaagttattaattacactaacaactggtaaaagaataaataaaaaagtgatatctttaggctaattagcatctttgttctttgaactttgacatgtacctaattatgctttataaacttttaaggtcgttaaaaatgtctcctaaactattcagattgttggatttaaggatttttgtcaaatttcattcaattttactattcaataattgtttatgtcctaaaccatgctccccagacttt

SEQ ID NO: 193756 - DNA, 1250 bp, Cannabis indica
  modified_base (449)..(449): a, c, t, g, unknown or other
ttccactcacattttcacacaaaactatttatgacttgcaaatatatactaaacacaatatcacaccatgaaacagaaaggatacccagcttgattactcaattccttttaaaccatctcaaaagtattgttaaaaaaaaagttatatcatttaaaacaagaaagaaactaaaaataaaaaaaaaaaaaaaagaaaaccagtgctcgaaatgacatagtattttatagtaaggaaaactaaaagtgcaaaatttgaatttgttataatatgaggataaaagccataattaactaaaggtgcctagaaaataataaagatcctcttgctgttgatttctttgatatgagacccttgggatagtgtaatttgctatctaatccccctccatagctcttgcatgacttcatcatcatttttcttctgtaaggtgaaacctttttgggaagtntcttcaacatttacagcatttgctaaagatgtgaaagactgagatttcccttgataatacttagacaatcctcttctgcacatataaaaaaaaacatttaatacaccaaaatcaaaatatgtaaaatacccagaagagaacaataaaagaacttggctcaatcggtcacatattatattgtagagaaaaaatatatacctgataggaagatggaccatgagctcggataattcgtatagtggaccattatttgaagaagaaaatgatgatattgatgttgatgaacttgatttagaagaagaagaagaagaagaagcatcctctactaactctgaggaagatgatgattcaatggagtctagtgatgaatctatagatcttgactcaatattaatatccttattattattattacagctttccatgttcataacccacctgtcgttttgagctaataataatttattatcaactctttgattttctgaaatgattttctctgcttctttgttcattatgaatgaatattcagcttagaagaaaagcaaaaatacacaaccttataacggagaagaagaagaagaagaagaaagaaaaagaaaagagctttagtaaaatatgatgatatatttgaaaggttgtattttggggagcatattatatatatactcgaacacgttacatgctttctatcttttaataatttaattaatgaaaaataaatggagaaaactatattgggggataaaaggacgtggactcgaacatgtgcttgcctattataccaataaacgaaaatgg

SEQ ID NO: 193757 - DNA, 1050 bp, Cannabis indica
ttattattatttcttattcccactcaatttacaaatgtcgacaaaccatcaatgtgtaactataaccatttataaatatactactattttaaactagtagagaaaatcaacttagattaataatatcaatctatgaaaatgaggaccagatagtagacaccctaaatttatcagaaaaagcagagaaactacgtcttagatcaggtctatgtaaacgagtcatgctgttttattcattttttttgtgtgtgctaaagagtgtttaattttttattaacggtatataccaatttattagtattataaaaagtaaattgcttaattttgtttggtaacatctttagtacaatgaaatacaaacagaaatgaaaaggaaactaaacatttatttaaaaatatattgtagtaatcaaatagcaatgaactgctgatgacatgttgaatggtttgagaatgtataattgaactaaacaatttccatgtttgttttgatccggactgtatataagcagtctttgtttaccgcttcagcgattctttttggtgcatgtcatgtgtgtttcttgtgtgcttgctgagctcaaataatattttagcaatatttggacttcatgcatgtaggtttgatatgatgaattattattgtggaaaaggacattaatcatgacaagtgcacattttggatatttctattttgttgtcaactgactttttcatttttattttgtaaaggtaggaatagaaagcttcaaggcctggctgctgccatcttaaaattatgggagaaatgtcatatagcaaagattgctgtgaagttgggagttccaaatactgacaacaagcagatggcgaatgagctcaaggcaagttcaggaaacatatacatgacattcaaaaataatgctgtccaataccagataaaagttgcttatatttccactaaaatgcttttccagatctcttcatacaactagtccaattgagccttgaatatgtcttatcaaattaagcttcagtcttgatctggttagcttaacgttataatgtttt

SEQ ID NO: 193758 - DNA, 1580 bp, Cannabis indica
aaatcaaatccacattgttgatggaaatctttagcaacaaacctggcttttgtattgaactgaactgccatctgcactctcaattctgaatatccatttgcacccgataggatatctgccagggggtagaagaacaagatcccaagttttattcttctttaaagcagtattttcagagttcataccagcattccacttaggatcttcaagtgctttcttcactgtagtgggaagaagagaggcaatgaacactcttggtttgtgaataccacttttagctcgagtttgcatgggatgttggttggtgacagtgggagcatttgaagtggacgaggaaggtaatattgaaggtgaagaagtgggagattgaagagcaacagtgggggaggaagaagattgtgattctgtagtatgactcgataatggaagaaaagaatgtgaagatgagggagaatgagacacagtagtgttttgaggttgagtaaaggtcgagagagtaggaggggtagcagtaggggaaaaaagtatactaggagtgttgttgacaggtgacttgttatgctttttgtaaggaaaagcattttcattgagaaggacatcacgagacatgtacactctaccatcaggagatagacatttatagcctttttgggtaaggctgtatccaagaaaggtgcaaggagttggcctataactcattttagttttgttatagggtcttagattgggaaaacataggcatgcaaatgtcttgagagctgaataatctggtttggtgttaaataacttttcatgaggtgtcagattatttagcactctagtgggaagcctattgatgaggtaagtggtagctctataagcctcatcccaaaactttaagggaaggctagagtgagctaatagagttagatcggtttcaactaggtgcctatgtttcctttctacaaccccattttgttcatgagagtgagggcaaatgacacgatggataattctactgatttctaatagattggtgaaagatctgaactcccctccccaatcagattggatttcttttattttgagatttaactgaagttcaatttgtgttttgaactttgtgaatgtgggaagagcttcatccttagttcttagtaaatagatccaagtgtacctagtgtatgcatccacaaaacttatatagtacctatatccattaaaagaatctatgggggcaggcccccatagatcagtgtaaagaacttgaagaggagaagtatatatagtttgagaagtaggataagaaagtttgtggtgatttccaaggcaacaagcagtacaaaggtcaaaaccatttttattgctatgagaaatgttacagttttccattacagacatgacagtggctttagctggatgaccaagccgattatgccacaaagaaaaattagaaaaaggtacatttgaactagaatgaaaacattgaaaatcattgctatttgtagtgggagtaggatgctggtttgacatatcagtagagttttgactaaagtgaggagtggctgtaggttgatcgaacttgtaaagcccattttcaa

SEQ ID NO: 193759 - DNA, 2030 bp, Cannabis indica
cccttaagattaatattagtggatatatatattatatttatatatatatattcaaaataatagttatcctctttagtttgtctctttctcttctttttttttttgttattttggaaaataattctcataaattataaaattgcaaatgtgtttctttaaatgcatttcgttcatttttgtaaattcaaattactgatatagcattgaatttgaagataatatataatcttaagaaattttttgaataatttatagtattaaaattggtgagtctattgctcaaaaaaaaaaaaaaattgttgagtcttgttctagaatcggttttagtatatattttttagtaaattttatgttttaatattcgagtttatgattgttttgttcttgtttcaagtttttatgatcaatcataggggttgaaatgagagaaaatatgttaaataagattaattttatagatttggcatggattttaaatgggtaaaaaatgttaggttttggatactcaacacactttgtttatgattaaaagttaattctgaagcttcaagccaacttttaactatgacccattcacttttaggaaaaaggttgtgaataaaggttctagatttctttttgagctttccaaaacatcttaaattgttcaattccaagtaatatcgagagagtaaatagcaaaaatatcatcattcgtcataacaggattttagaattgcaaaatccaatagtcgtgactctctagagaagtcgcgactctctacaaagagttgcgactattgactaaaaaagacaacttttcaatttcgaaaaaatgacgatagagggctaggttaattcattccattcaattttcgtaagtcttggggactaggagagtcgcggctggaaggagaaaatcaccattgaagacttcaacttgtgttctttatcatctatccttaatcttttgtgtttgtaattgaattttcgtatattttagaatgaattctatgagctaattttagtattattagggttattatgtgactcatttgaatctctattatgaattaatgtatttttttaatttcttcatcttctattcaattccacaaaatttacgttaatttaacaattatttattggtaatttataattgttgtttatgatttggaatcaaaatcttaaaagtgggattataaaatgttagtgattattatggatgaaatttcaatttagaacgaaagcatttaggctgattgtacgatcttatgagtcatgtgtttattgctttgtttgtgatatgattaatctttatcatagaaatataagaaattttcacatagattgagtttgtaattcttaatacgattatgaactatttttatcagcttgttaattgaataagaagaagaaaaattaggtaaattgcattgatagtaaaaaaaaagtatataattataattatcctaattaatttctcattatttatttcttgaatttttactgtttattgttatttcttttgctataaatttcttaattattattgaaccaaatagagactagagattcgagtttaaaaaaaaatagagaccagagattcgagttataaaataaaaatagaaactagagattaaatattaactggtaaatgataatcaattattgtgagactatatttggtcttaccaagatttattacaaattacgagcgtatgcacttgtatagctgttaaattttgcaacaaaaataaaagttcaaataatttcttatcatgcatataagaaaactatgcaataaaatatttgaactttatttttagcgttgtaaattatttaaaattttctaaaaatttacaggtaattctagatgccgaaacagaataagaagtatatcgaaatcaccattttagcacggtaaatcatgttgtattaagatttgtaaaacgattgctcactttgttgcaagagactctcaattcttacctgatcatatgaattagtcttctattccaatcgagtagtattcagattcatctatttaa

SEQ ID NO: 193760 - DNA, 916 bp, Cannabis indica
ttgtatagccaagataaaaagaagaaaagtgaacctgctgaactagagttaaggacgtatcggctcgtcccatgtagaagcagatcacttgggctcttttcaaagaggacaaatcttttggaaaatctttcaagagctgcaacacaaacacattttatgaattgaacaaagacaggtagagaagatcacatgaacaacttcataatcttcaaactattgaaaatatgaaatttataaagcactttcttgagtggtattacacttcatctatatataatttcgatcagagtagatataagattggattagcatagttaaaagatgatttgcacctacagatgcttcagtatgatttacagtttaaaagaaaaagttaaacacacaagccagatgaataggcacattggatagacaaagtagttaaacctccataccttgaaatgcatctcaagagcaaactcatcgtctctgttatcagaaatcaaactatggacagcatcgaaaactgctttctcgtaggatgtagcttgttcctatgcataaacaaattagcccactgccccaaataacgccacgaagtaaaatccgcaaccccaccttacccccccccaaaaaaaaaaaaacggaaaaaaaaaaaagcgagataaaaaacaatgaacgtacgagtcgagataccgccgcatgaagatagaagtgagcttgagaagggtccgaggaggaaaggtaatgagcagccaaaatgttggccaaaacgcagtcttggtcatgtaaggtcgctttcaaaatcacagacctctctctcccataaattaacacctttgatttttccggtcaaaaaaaaaaagaaccattcagcatacttatggatattgaaagggaaagctagaaatagcgaaacgacactaaaaaagaaatg

SEQ ID NO: 193761 - DNA, 1909 bp, Cannabis indica
agtcaaagaaaagaaaaaggaggaagctatatatagaaaaataatgaatgaataaatatatgtgagacaagttgagataaaaagagatgatgggatttttaatgatatgctcattattctattcaaaagaaaaaaaaaagaagaagaagatgatgggatgagaattgattagagagtagagtacaattgtagtagtgcacaatagcatattgcgcactttcgagtgttgtagctaattatataaataaacatatatacatatatgcaaagagtaaagtaagagtagagtactctagaatattgtgtggaaccatatatgtaattagatgttgtgtgttttaagagtagtgctaacaattttttttattaatttactaaattaaaatataagagattagttcagagctggtcctaacactaattagaccttatgtaacaataaaaatattggatcattttccacaaaatgtgatatatttgaaaattattaaaaaaaaaatatatgtatatttttaaaatatttttggacctttggattgagtgggccttaggctagcgcctaaccccgccttatcttaagcccgatcctaaattgattttgatatatataccaataaataatattgactatggtgtacttgaattttattagtatctttttgtaattctaataattaattacataatactaaagaaaatttctaagtatatatcttaattttttaaaaataaatttttaaaaacaaaattttaaaaaattaaaaaataaaaaacatcaaaatgtagttttcaattttcaaaaatatttttttttcttgtttaacatattatattttatatttttgttcatatatccggaccatagacccggactattgaacttggagtccagacctcggaccccagactccgaccccagacttcggacccagacttggagttggaccctgaacctcgaaattgggtccgacttcaggttcgagtccgagtctgattctgggtctgggttcgggcgagggtctgcgtctggttccagggtccaatctgtagttaggataggctaatgtcatggtatggtgtacaatattgatttttttaataaaaaacaaatctaaaaatagttttagaaaacctgggtcaaacaccattaaattttaaaaaaaactgttttgtattctcacttttaagaacacaattgtgaaaactaaaaactaaaaacacagccaaacaacttcttaaaatttctttatttggaatcaatttagtatacgtacctaaatacaaatttatcattcggttagcttataagaaaatattgcaatccaaagataagctagctaagttatttggtttcatttctaatgatacttgcctgtaaatcaagaaactcatggtcttgtattctttgagtataggtacagtaccgaaatttgcaaaagactgttctgttaggtaggaattgcattcccatgactcacattgtgagattgaatgtaatgagagcttatctctcctagttgtgtaagtacataattctagttggtgtttcaccatttaagatctgtctcatctcattcatgtattaaatttagtagcaattgttcctcatggattaaatgtaaaagtatatattgagtcatatatataagaacatggactattccattcatcaccaattagttttgagataaaaccccattattattatcatgttattagggctatattcctaagccatatataagaacataggctactcgatgaaccccattctcattaaatacaaataaaaaattcttacaattttgattaatattttattaatccgaattttgtttgttacattgatccaagttcttgagcgtgctaattatacaataataatatctctatataccgaaaacaaaaa

SEQ ID NO: 193762 - DNA, 1104 bp, Cannabis indica
cgaataaatatatgcttcattttcttaacatatatacatatagctagtatatggaattacggactatatatttatttatgctataaatataccataaataaaatctataaatggctaattattggtggtagctttaacttataataattaaggtcggaactcggaaggaactaggaagggttggagtcaaagttgaacgttagatagcaaggccacctgagattaaataaatatatataaacgaacactatatatatctgaaagtgaaacaaacaaagctcttttttaagaattggtcaatatcttcgtaactaaggctatagggtgtttgccctaatcattagaaataaaagcacaaaagctagacatggtaaaagattcttacagaatcaagtacgtcctacctagtactgcgcgccctctgaaaactcacgttctgatctttccccaataattaaattgagtttaccacaattttttttttttttattttcttaaaaataaaaagtaatatatatatatatatatatatgtacattagatgaggtctatatattgagaaatattagtgcaattcggtataatagctaatgtgtaaaatataacctattaaatattttaaatgcttcattcatgtataatatagctaaactatttagctgcttaagctacagttataatgcatatccttcttcacataatagagacactgatgagagtgttcaaagttaggtaattaactatacataatgtatgttgacatgttaattatgtaattataatgagttgaaattagaggcacgtgattggcgcatgcatgccgagacttgaaaaagtattcatgaaaacgctcacaccgcacaaatcgcccgcaccgtaccatactgcataaaaaatacggtttgaaatcttttacgatgaggtgttgcagtttgtattttttccaaacacatgtggtacgatttgcgattttgaatttaatatataattacaattcaaactgcaccgcagtatatatacactacattatttttttagagacaatttcatataattagtgatttaataattagtatatatgtaataatgtttaaacttaataag

SEQ ID NO: 193763 - DNA, 2401 bp, Cannabis indica
aaaacaggaaatcgctcatctcaacgcgagaatcgctgagtttgagaagtccgaagatagttccagggacccgaatggatcgaattggagaaagagctagccgagagggacgagatgatcggtttcatgtcgaggcatggtggggctgagttcgggcccaaggagggggaagaggacgggaatttcggagatggagatgctagtggtctgtacgaacagtttcaacatcgttctagtgagtttgattcggagtttcttgcttcggcttccaagctttcgacggaaagagccattctctggcaggtttgaacaagttcctatctccattttttgtttcttaataatttctcgaattagagtttcaaagatattatattttaattgcttttgacccagcaattagaatgctcattttactattttgtttctcatttgattttactaagtttagaataattggagtttttgtatgatttcacaatagaagtctaaattgaaattatgataaaaagtttttaccttttcaaaataataaaaaattcttgtattattttatacaaaatggagcttaaagttcttaaagggaaaagcagctaaaggtagagcttgctgtttcttttccaatatataatgttcgtgtaatcattaaattaaaataaagtagtagatcaaagtcttttcatgatgcaaacatgatttcgacttttatatgaattaataaaatatcttatttgttccatatggtatggaagaatagttatttgactaaatcttccttttcacgtacacgtgactttgatctcaatgatgtttttttctcccactttctattactcccttttgctggcagatgaaaagagtttctttcttttattttatttcatttattattattatttttatatgtatattgaaatgttaacaaatgttgctaaacgatattctttataggagatggatacaagttttatttttcgatagaaatagtttttctgatgtctggtttggaagtaatgtagaatatattttctttttcatcttgatgttgcaatgtagcatgaaaaatatttagatacatcataaaaccaaggctactcatcttttgtcaactaatcttactcagttgaacaatggcccataaaatattagaaaagttgcaatctactctttagacttggtcacttgaaagtagataggtggttattggatgttttaagttgaacgctttgttgtaacttgtatgtggcactttcctgggccactatatcaacctgttatctctttctttccaaacattagagaaagcaaacatcagtacttatgctgtgatagtgggagaaattctattctgttgtgccattgtatattttgtaaatgaatttagtaccaaatcattttcatgtaaagttttcattttcttctttgacttttatatttttgtgcaattttatttctattctttttgatatctatggatcctgctataggaagtttagaagaaacttttttatattaggaaatttattcttttaaaaaaaccttatgttcttttctttgtactacaatcatcatcgcgctaatgtttgtttgcagagttaataaattcatgacagcccatttggctcctttacattaattttacgcagattttttttttgttcttttcgaaatacaatgcttttgagaaagttttataatcatgtcgggtctttatgaacaataattacttttctggagccggtcccacaaaattaatgcaaaagttaactgtttgcatattaacttactttttttttatacatttttaactacttaaacaagtacaaatcaatacattttatatttggaaaggatcaatcaatttccaaaattgcctgcatctgcatgatttcaataagacagaaatcaccatttcattgatcaattaaacttgagttagctaaagaggttatggtagccagctcctgtaatgagggtttcaattattccaaatttatgcttgttttaaatcttttaacttttgcaggatgtacagtatgaatctgccgagtcaatgtatcctatgaagcattttgttgcaaggtaagtgctaaagttacgtttaataatgtagtaagcatgcattttatgcacggttgctgaagaaagggatccatttctttcctcttagacgggaatccccttggaaggtcgatggagattcaagtgggatctcctcaaagctaaagttacttgaacaagaattactgaatttggaaaaagtgggaaagagtgatgtattaaaggctccatcattgatgaggaaacaagcgaaaagatatcaagctcttgctgggcagatagatgagctatgcagaacaatggtaactttttaacacctttgcctttttattattgtttt

SEQ ID NO: 193764 - DNA, 1044 bp, Cannabis indica
aaaaaaaaaaatgagtcctatcaatattattagcattggagatgcccttataccactccaagacacgtgaaataaatattttaaaattgaaagaaagtttgagcctatctatgagtcaaatctcaataatcgattttgagtggcagtgatactattgactttctttatcttacattataatgatttcaataaaaatcacaaatcaactttaaattttttgttacaacacgagtaccatccaaaattctaaatcattcttgtaaaaaagaaaaagaaagtttatatttttaaaataaaaagtagcagtagtatcttacttaagagtaagatgaataaatcattggataactatggaaaagaaagaatgttgtggatgtgaccattcccaatagaaaacttgggtggtgtgtgtggtgttgtgttcgatggtgaggaagaagtagaagtagcataggagtggtttatccatctccctcaacgacttgatgactagatttgactccttttttcattcacacactatcatcacatcattccgagtaaaaccacagtaaacccaattcaataatgattaaaacatggtataaattcattgcaacatcaaaggatcctaattatacaataaccatcaattacattgtttaattttctcaacaaattatggttaaaaaagaaaactataattatgttaatgcaacttaatttattcgatcctactagaattaacgtatataaatgtatgtgattagttgatgatgatgatgatgattcatgtcataaatacacacgcactcataggacaccacacgtacacacaaacacgccgcccacacacaatttttcctctcccgatttcgtataaatagccaactaaatgagtctaaaaccactcactcttcaaaccccacaaaaaactcaaactcatttcatcacttcaaccaaaacccgtcttagaattctcctctttcatcaatccaaagtttttttgcctttttttcattcccacaaaagttttgatttgtttaaacacatacgaattagata

SEQ ID NO: 193765 - DNA, 952 bp, Cannabis indica
cagattacacagctggttagatagaaaacataaagggtaaccaaacttactatttttaccttttttccaaaaataggaaaactagacaactttccttttaagtttgaatacacaaaataggaaaccatattaaacacataccagccgaaaatacaaataaataataaaatatttttgtcaattaaatatgtcaaaaatggaattaacactaatgttgcataagttagttataggaagaaaagcttagactgtgagtatagtgcagggaattataatgcacttgagtatcagaataaagtgaggaagagttttcagtagttctcggcgtttctgttacccaattacagatttaacgtatcttttccatggttgatactttattatttcaatgaaatacataacataaaatcacttttattattattattattaaattttatttagatattaaaaacaagtaggcaacgctgttttttaaaaagaatttgaatatggtttctggtttattattctagctatagttgttggagggtctattccccattcttaaatgaaggtttcatgaaaagaagcctttatgcagatcagtgaagataagccatacatcttattttatagtgatgaacttgaattaatgaaagggaaacgtcacattaattttatatattttaaaggaaaggtctctcactaattaacaaagactaattgcatatatattccttacataagcatatttgactttactaatggtgtgacataatatctacaattaaacaaagaattaatatataaacggatcaccaagttgcaaagccatttttaatgccaactttgatcagatgggattaaaaataagcatctaaggtggacaatagtataattcttttagggtggcttctctaacacttttttatttagaaaagtaaaatcaatctatctatctatatctata

SEQ ID NO: 193766 - DNA, 1487 bp, Cannabis indica
tcaatggcatgaagtagatacaccattgcttttggggatgttttcaagaatccaaaatataaaagaaacaaaatgatatatatcccaatcaaattcataacttagaaaggagcacatgtttttacaaaccaagatgcaaagctttaattatagttttataaatgctcacatctttataagtaatcaaatccatttatgttataggaataaaatatttccctaatttcaataaatataaaatatatcataaactgacgtcattgacaattcaattagaatcttcagccggaaataaaatgctcatcaaatagaggtaattgtttcatagagtagaacgaaattggtaactcaaacaaggtaatatatcttaaaacataaactttctttccatagcagcattaatagtcagaaataacaaagcccaataatattaaacaaaatactttcactgcagcactaaagtattatgtagatctaacggtctaacaaatggtagagggactatcactttccaaatggaataaaggctatacagaaaagaggagatatacatatgctgtgtgcatacctgtgttacaattaggatttgatatccaaagtcaactccaacttaaaagaaaatcaagaattcccaacaaaaccatgcctcgtggtttaaattaaaatttatcccttgcattcataaattacaaaaaatttcaaattatctttaccaggctcttacaaataatttcaaattatattagcagccctgatagcctacgagacactaacaagcagaatgaccagagtgatattacattcaacctcactcgtggaaaacaaagaaataaaacacaaatttggaatcgaaaagcattttaatggatcgttcaaaaaatctggagcttgaggctagctcgagtggtaggtgggtgagggtgtgtgtgagtggtgggaggttcgagtccacttaatgtatcaaaaagatttccaaaaaaaaaaaaatctggagctttgtcaagaaatgtactcaagttaaaatgaaaataaaaataatccaattgaggttactatatcgatagatttcagtttcataagtttgtactttgtaagagatggaaaaaaagcataataactaataactatgccacaaataggagttagttaaattcaatgtggttcaatatccctaaagtaattttgtctgtgaaaataagtagatttcaatctcagtgtagttcttcagtctcttcaatcaagaaactttcagtgggaaaaaaaaactaaggattgaaataagtaatgcaagacaacgaaatcacacttagctcatgaaagaataatttaaaagaaacataattccataatctatccacgtggatgcgctaaactttaatttctttaaatgctgggaaactttcagccaacggccgtacatgatctctatcgcaaattcacataagtacaaaagaaacataaaagctaacccacatttcccattatat

SEQ ID NO: 193767 - DNA, 1510 bp, Cannabis indica
gtcacttgtttttaagatgactattagtggccttattgacacttaacaactaaaaaagagtacgactgcaacaaaatgtaagataaagtacttttagcatttttctattaaggtcaatgtataacaattacaaatattaaaagagttttgccataaaaatatccttatatattaaattataatttcttgaaatatcaaaattataaatatcctttctaaaagtggtattcctactatatttttgtcttatatattacactcttgtttggtagatttatgtcaaatatttgccatcaaaagaaaaatttaaagggtaactaaaatacatactcattttatttaattatttaaatagatatttttatttcctaaaaaagaaattaagttaaacgttatgttaaagtgaaggctataataacctcaattaaaacaaccattaattgtaaagtattattaaaaagatacacaagaactaagctgaacccatgagagtactgataaattaatacatattactccaagtagataataaaacgttccaactacttcctaacccataaagaagttttcaaagaaaacccaactcatttatttctctccccatattagtattcattcacttcatcatattcttcaagtatatatatacacactagtacatgtgagagcttcaacctctcaatgttgaaacaatataaaggaacaaacatggtaagcctacagtacaaaatttgctacatgttcgtattttcagtacttatatccagtaagattgttggggcgaaagtaccggcgattatcgtgttcggagactcaacggtggatgcaggcaacaacaaccaaattccgaccatagccagaagcaatttcgagccatatgggcgtgactttgccggcggaaagcccaccggaaggttttcgaatgggcggatacctactgacttcatctcagagggttttggcctgaaatctgccatgcctgcttacttggatccttcttgtaacatctcagattttgctactggtgtcactttcgcttctgctggcactggctacgataatgcaacttcctcagtgcttgtaagtgttcttaattatttatttaaattatcactgtgattcaaatgtatacgtattaattaatgtaaaacatttcttttatagctgtcaatatgttatagaaagaaaaataaataataaatatgtataaacaattttttttagcaatattgtcagattcaagtatataacaaatgtagttatttttatagttatagtagatatttagctaataatgtttaaaaaattccatataatttaagacaaaatacgagtgcaaaattttattttattttattaatacgtgcaaatgatttattgatacttgattttttcatactatataaattattcaaaaaagtttaaaaagcaataataaaatgcttattataattataatgtaagtaaaccaagttaaagttataacttccaagtgtaaaaaaaaaaaaaa

SEQ ID NO: 193768 - DNA, 1995 bp, Cannabis indica
aagattatggaccacaaatgaagaatacattagctactagtcactactaattaatcccacatgtgtgaacatatttttcaattaattaatataagacactagctatatatacaggccacaaatatattagcccatattaatttaatcatcctcatcatcagcatccaagttagtgattatggggacccaagcagtagaaaaaactgagctgtgacccttccaagtgagcaccaacatatgatcttcttcctccttcttcatcccccacccacttgcatgttcatcaagcaaagccttcacttctttaattgtatcttcaccaaatggaatgctcaaaaagccagcgtttctcattctttgggacaatgtagcaccggactccaacctctctattctttggaacccttcaaagccgattatgttttggatcttgtgaccgatatccgactcgtattccatcctctggcaactgtcttttggtaaaaaagtttccaaggcatcaaagggtatccatagatagttgaaacatgttgttatccttgatgagagacttgaggcgtttaggtcagagtcttcatcaaccaccactacgattcttgggtttaggcctttaatcgtgttgagaaaactgtcacgtaaagagttgctgttattgtcattattgtcaggcaaatatcgtagccagttctggaaatttacaaccaaagcttcatcatcttggaggtttagcgaagaagcattgagatgagttagaagcaattcaaattgaaaggtagaagagttatattcttcattatcatgatgactagtagtattttcatcaggagaggaattataataattaggtggtgatgatgatgagtgtataacatttccaataacattgaattcaaagggtacttctctaaactttgagaaatttgctaaacggaggccaacttcatgagaagatatattgagcaaaggagggactggtggccggaatgaagggacggtaattttaagggaaggagggccttcaggccttttagctaaggcatctatcaaagtaggccactgcatacagtaagtgatgctaaaatctaatatatgaactttattgtagccttgaattgccttgaaaatgagactatttgaagcacaatatccaaaccggtgccaagggattaggtcaacataccggccagctaattcagttaccgacatcaacctcgtactctgaacgacgccgtttgacatatctgtacttgttgtagtagtaggagtagtagtagtggtagtactagtactagggcaaatccttgatgcccttgagattagtgcctttagaaaccaagaggtgagcctttggttaggatcacccactgaagaggccacattgttgagaacccacatcacttgttgggccaaagtgacgtcgtttctctctaaagcactcgcacagtgaagcaaaagcttctctatacaatccccatcaaggcttcctagacatcctctaagggcagccccagctagagacccttgaggagtactgttaatgaacacattattagtatgattagggctttgtagagaaacagaagttgttgaagtgcttcctcttaattcggttttcatggccaagggagaaagtaattagggtttattttcttttgctttctcactttttgagccacaaattaagaggcggatcgaggatgatgatattataatagggagagaatagtgaagaatgagaattaaagaagagggaaagtaaagctttggagatatcgagtagctatatctaaatttgttttcttttgtgggttttttacacgcgtcttcttgatattggtgattaggatattgaagaagctagggtagttttatctattggagactgaaattttcagattgagaaaacatgggtacatgttggagatttttaatttcatggcactatatagtctagctagctcgttttaaatatgtaatgagagagagagagagaga

SEQ ID NO: 193769 - DNA, 2208 bp, Cannabis indica
ttatgtgttctatatgtcattttattaatgaaagcgactttcctttatttctaacagtaagtttgctacttttacttttgatttaatacattttaatgtatggggtctttttcatactataagtgttgaaggttatagatagatattttttaaccattgttgatgattttctcgctatacttagggaatgataaatgaaacatcagatttagtcaacaactgatttctcttattgcaactcaattttcagtctccatcaaagttgttcactacgacaatgcaaaataaccgaacttaacggccttctatgcaacaaaaggtatcataagctatcattcttgtgttggtcatcctcaacaaaacttagttgttaaacgcaaacatcaacacatcttaaatagtcgatagaactttatttatctttaccttattggagttatgcttattaatactgttgttttatctaataaatcgcactccatctaaattacttatgaaaagacttcttttgaagttctttataacaaagcccctaccaccttaaagtttttggttgccaaagcatgattggttgccaaaggatacgatcaaaaataaggtattgattactttcacacatttatccctgttgcaaagtttaataccttaaaattattgcttgctattgcagccatcaaaaattagtctttgtaccaacttgatattaacaacgactttattcatggcaatttaaatgaaattatttatatgacgcttcccaaaggatataaacctaagggaaatattactctgaaagctatatgtaaattaaccaaaagtagctatggcttaaaacagctcacaaaactcaacaactacatttttttattgggttcacgcaatcacttcagataacaccttgttcattaaaaatcataatgttgttttgttgcccttttaatatatgttaatgacattgtggtaacttctaataatgatgttgctattacttttttgaacaacaatttaattcagtcttttagcttaaggaccttggtcctttacaattatttttaagtttggagattggtcgttcctcaaatggcatttttgtttctcaacgaccattcaccctacaacttttgacttaaacaagttgcttaggagcttttattgttcgtacacccatggaacctaacattagactttcatccaatgttggggaaccattggaaaattcgaaagtctatcgtagaatcattggtaaaccgatttacttaaccattacacgccttgatatttcatttgctgtaaataaattaagtcagttcttatctaatcctagagctcttcatcttattacagctcatagaattttacaatatcttcaaggcacttttggccaaattttttcattcagcatcttccactaacttgtggacttatgctgaaactaacatgttcaatgcagattttcatcttaaaatcttttcagatgccgattaggcttcatgtagtgacactagaaggtctatttccagctactatgtcttcattggcagatcataaatctcttgaaaatctaaaaagcaatctaccgtctctcgtttatcatcaaaagtagaatgtcaggctatggtcaacgccacttgttagattacctggctattagcactactttgggattttgacatcaatcacaaagaccctgccaccattttttgtgacattttagagaacctcgtattctatgaatgatcgaagcacattgagatcgattaccatgttgtccgagagaaggtccaagaaagcacattaaagctcattcatgtcactaccaagaataacattactgatatatttacaaaaccattatttcctagttacttccacacacttgtatccaagatgggatatgaaaaacttatacatttcatcttgagaggggagtattaggtttaccatttagtttaaattggccaaacttttcagcacacttcaactttgggcctcttcctgttggccctacacacatatatatcagctttgtaaatgtaatagacaactttggcattttctgctctttttataagtgagaaagggttctctctaataatattcgagcctaagttacaccgagttggtttattactttttttttttaccaaaattggtatccttacctatccctagtctcgtttgatatatggaattagattgaattggatt

SEQ ID NO: 193770 - DNA, 2328 bp, Cannabis indica
agtaagaaccattctgatgatctctaggagtgttttggggtagtgagagaatacagaatgaaactcaaacctaagaagtgtactttcagagtaaaataaggaaaatttctagaattcatagtaagtcaatgagggatagaggctaaccttgaaaaaatacaagccttgcttgaaatgttatatttgaaaaaacacaaggatgtgcaaagcttgacagggaagatagcagccatgagtcacttcatctccagttccattgaaaaatgtatcccattcttcaatatattaaagaaaagtcaaaatttgagtggaccgaggaatatgaggaagcattcaaacaataaaaggagcatatggcaagccgtcgattctgtccaaactaatccactgagaggatctttacatgtacttggtcgtctctgaaaatgtagttagtgtaacccttgtccagaaagaaggaaaaaaagcaccatgtttattatctcagtaaaaggatggtaggagcagaagcacgataccccttaatagagaaactggctttctgtctgctgatagcttcttgaaagctactaccttatttccaagcacatttgatcaggtcttaaccaaccatccactatgacaggtcctacaaaagccagaagcttctgggagaatgctcaaatgagaaatggagctcagtcagttcgatatatagtatgtcccacgtgtctcaatcaaagggtaagtcttagcacacttcatcgtggaatgcatcaaaactgaagcaaatgctcacgaacctaaaatatgtgcccccacttgaaaaatatatgtggacggggctttgaacaagaatggatcgggagcaaggatagtgatggtgtctccagaaggcttgaggcttcaaatagctttgcattttcaattccctgcctccaacaacgaggcagagtatgaagctctactggcaaggctaagaccatcaaaggtcatgggagctcaaaagatagaagtcttcagcgattcacaattggttgttaaccaaatacttgggggggtaccaaacttacggagaaagaatggcttcttttgttactgctgcaagagagctgcttcaagagttcaaaggctataaaattgagcagatcccaagggagaagaacattcacgcggactggttagcaaatttagcttcggagaaagaagtagaaagactaggggtggtacccattgaataccttctggatccaagcatcctagccaagacagaggttgcactcgccaaaccaagagcccgactggatggaccctatagttaagtatttaactaagggagatttaccccaagatcaggctgcctcccagaaggttcaatatcaagcctcacaaagaaaaaatattacattaattacgtccggaagtgtgacccatgccaaaggtttgcaaacatcccgagagccccaccaaataaagtcatgttgatgacaagcccgtggccatttgtagtgtggggaatagatctaattgggtcccttccaacgggaaagggtagagtcaaacatgctatagtcgcggtagattatttcatgaaatggccagaagcaaaacatatcaactcaattacaggaaagaaaagcctatattttgtgataaaaacattatttgccgatatggactgcctcataagatagtcttagataatgacaagtaatttgacagtgacatattcacggacttttgcaaaaagtatggagtcgtaaaaagcttcttcacagttgcaagaccacaagaaaatgatcaagcaaaagtcataaataagatattaaaagtcacactcaataagaagctcctagcttgccaaaatatttagcctgaaaaattgtcgtgagtattctaggcttatagaactacctcccgaactaccacatgacactcttcattctcaatggtatacagatgtgaagcaatggtcccggtagaaagcaccatgcccttccacaaaagaactaactacaatccgatcaccaacctatcattattacaagagtcgttagatctcgtagaagaactccgggagaaagcataaatttgactggttgcgtaccagaggaaagtggcaaaacactttaattctaaagtgaaaaacaaaaaattatccataggagacctggtcttaagaagggtctttccaacttcacaagaccatggagtgggggtgttagacccaaattgggaaggaccttatgagattgaagatgaaataagcttcgagacctacaaacttaaacaaatggatgttccttaatcacaagagaatggaataatgatcatctccgcaaatactat

SEQ ID NO: 193771 - DNA, 1845 bp, Cannabis indica
  modified_base (1801)..(1801): a, c, t, g, unknown or other
gaaagttgctgtatttgtagggttagtatagaaaagatacactttcagctggaagtattccaagtgacacgcctgaggccgaccctatacttgggtgcaatcagcctctatctgaaatagtagcagcagcgaacgatggtatatcggagtctacaccactaattccaactaatgaggatagtatagctgcttgcaggtatgcagtattacaacttgcatttgctttgttgtctttcttttttattttctagtacttcctgccacaacagtcagtttagtgttattgtttaatgtagcctcctctaagtgatcagaggtcaggtgatcttttggtgttcacaattgtttgtttaagatttgctctgccatttttctaggtatatacccttcagtgattcaaaaacaatttttcaaattcatgcacgatgggcaattgcttggacgtgaccccatttcttgtgatgaagacgatgagtgtaacttctcaaattttatggatgcggattggctgtcttcctcaggaatcttgtgaaggagatataaatgaaaggtgattgtcatgtttccacatttttgtagcttttacactcctttagtctttatctttgactcactctctcaagtcctaatatctgacaagcgactggtctctgttgttatataggtctcttggcagcctttcaatagagaacgttgtgaatggactaaacattgatatgaatgaaccagcaagaaaatctagtggaatgtccactgttaaagtgagtagctgtttcatttttttacttgataatttaattttattgtcctctccaattagtaaaagagatttcaactacctaattatgaaactcaaattatgttcaaacactattctgcattgtggtatgtaatttatgcttactccttatgattgtgtaggaaaatgagcaagctaaacccgacttagatgaattgcttgagaaatttggaagttgggtttctgatggaggttcgctctttcattagggtaactagaatcggtcaaaaaacaataattcctacaccatattaaacaactccatccgaaggatgagtttcctgtacagcaaataaatggtaaaaggaaatcaacaatcaaaagaaggataattgaactctctccctaccctagtgtggagattttgtaccagcggaattgatttcatcatatgagatccttcattgtttatacttatgtccctacatacaaacaaactactagtgtacaatccaacaaacattcacaattctttcagttttcccctgatctaaccaatttcttttcttgtgtatacaacttacaagtttttgactttgtaaataaatgtttagatttcccaagtgacaatttctttccatttcatttttatagacagacctaactttcctaactttttatttttactgatttacaacaaaatcagtataatcaaggttgactacctctaataaatttgagcaacatgtgatattccatatcagttagctatgcttaaacacgctttaattaaattattttataggggctcgtttgattatttattaaaaagtttcacataatacactaaaaatttaaaaaataataaaataataagctattcaatcatttttattagttattttatagttgttgtgattgattttctagttatttttatttttattttttatagattatatatgttgttgactgttgtgaggttattttctgattattttttagttatttttttacactattatttttctaaaactaacgtaatttgaattttaaaaatanatatatatatatatatatatatatatatatatatatatatatat

SEQ ID NO: 193772 - DNA, 1941 bp, Cannabis indica
gatgagatcttaacaccatgcaaattggctgaattcaattcaattcaaccactccttagataaaatacacgtatagaatttgcattatttcactactcgtgtcatatttattaaccttagatatgatcaatgcaaagtttgttgtgtgtctgaccaaaaaaaatacttacaagtatgaattcatgcctaattttgcagggtcataaatagataaaaagataaataatacattattggttattcattggcttctaaagaattcatgtgcttcatagtatttcttcaagataacattaaaaatgggatgaacgggttccaacagattcgagtagggacccaacattgtactgggtggcgggggagtctcctcgtcctctgatcggtaataatggcacaccgagaggccacttagacaataacaagtgtgatagtagtctctagctttcccaggcttgtctctgagtcccccctcttgcgcctgcattgaccggagtaaaaatcttctaccggtaataaactatagagtctactaaggatgattcgctagtcttattgaattggcaggagagaaaaactcaaaccagactacttacatgttttagctaaaaaaaaattgacattataaacttaaaacatcaagaataaagtgaagccctcaaagttaacaactgatttctaaaatccaaacctgtgtgcacagaagtatgtattgctgcaatgcatggctgttgaaaagatgctccattactggacatgttgtgataaagttatggccaatatcattgtaattcacatgggaagaagcatttaaacctgtaaatggaaatgagaaagtaaaagaataaatatcagaacctaacaaatgaaaaatgatcaagaacagataccatgtcgtatactctgctaaattggcctacctccctcttcgggtataccagatactgtggaagtgctgcaacgtccaacattatctggtctcaccagttgttcatcaataaatgaaccaactcttcgtaataatgcgaaagagcctccctggtcggtattattttgttaaccccattatagtccggaaggaatagtagtaaaaaaaagtgaaaagacagaaaaggacctgccaaaaggaatagcatccatcaaccaatttattagttctcccttgaaatccacactcccttccttgtcgaaataccagccagtcctagaatagaaaacatcgttaaaacatagcaaaaagtaagatcaataagaaaattgcaatggcaaggtactaagaatgacaagaagactgcatatcttacaattaaacgagacaagtccaaacgatggacctcattgatcagaatcattgtagctaacccacagaaggtgtacctaacatccgtccaagatttgatcaatcagttatgtttcatttcatttgaattgaataaacaatgacaataattcacctaatttcccaaaatcagttcatacaaagataaattacttacagcaaaaaaacaaagtattaagtagcttgctaaaaacatacccaccatgagcttcagtgttaggttctccaccaatgccaccttcataagtctgacagctgcaaagagacaccacattgtgcaactttaattatttatagaaatcaacaactatacataatgcaatatcaatgtaaaagacttaacagtgataccaaatgcatgcacaagggacgctattaaacataatcttgatgagacttgagaatcatgattcacaagacaaacagctcctgagcaaatgaggagcatgagttggagcctatctatattgagaagagcagagcaatcaagaccaaccttaatatgtaatttccaacattctgaactagttcatcatccaaaatgttcaaaatacttgcaacctgatcagaaaaggacttagataatcataaactaagctgcttat

SEQ ID NO: 193773 - DNA, 2783 bp, Cannabis indica
aattaatctagtccatgaattaatatttataaaaattaattttactcatgatttgattttagtgtgatatgtacgtgttattctataataaaataatttgtgtgttctgcataatcataaaaatttgtaaccccaatataaggccaattatataaataaattccacaactataataagttttacaaacatgttcgtcctgatatttttataatagagtattttacattatatattttctaattttaaaatattgtgtttagttactttagtaaacaaaattcaaaattaaaaatatttattgactttttttaatattattattttttttaaaaaaaaaaaagaaaaattagagcatcaatagttatgcatttcttttatttttgtatgagtctataagatgctttaatttattgaaaagtaaatttaatgtaagtttacatcaaaaggatataattttaaaaatacaaataggcaacattttaatttaaccaagttagtgctttgctttagttcttgtatgcctactcaagattatgctggttttaataatatagttgataactaactctagtttaacaattagttttattgtaaaagttagttatcttttttgttaaaggtgcaatagtttaggtaaagttgtattaaacccttttgtttagatgagctatagataagatgaccacctaaacaattgctaaagtttttcccattttcacttattttcaaatcttctctcttattcctctatagcaaaatctctttcatggtattagagccaactgagtcacgtccatggccaattcattaaacaatcctcaattcgataatgatgtaagcaatgctcctggaatgatacaatttgccccaaccctagtgacctctgattatccgaatcaaccatggaaccctttctctaattccctcaatttttcattaaagatctagcttgatcaatgaaatttcatgtcatggatatctaaagtagttctcactattataggccacaatcttgatgactttctgttcagtggtgataagcctccaaagttcttgattactgatgactcgaaacctgtcttcaaacaatggaaacataaacattagctattactttcatggttgcgatcttcaatgacagaagtagtcttagcatccctggcttcgcacaccacctctcatttgttatggaaagctctcgagaaacgattctttagtgagttaaaagtctgtcgtttgcaactcaaagtttagttgtgtaacatccagaaaggtaatttttccatctcagattttatggacaaagttaaagcattcagtgatagtttgggcatagttgagtatggcgtaagtgagaagatcttgagcttcatttgcttaatagattacggcccgaatatgactctacagttttgggtataacatcaagtactgagttcaaatctatggatgaagttcaagctttgttaatggctcatgagttttttcttgaacgtcacaacactaaatctgatttttcctctaagatgttagccaatctcactattgggtcttcaagaatcaatcacctaggtccctataggcctccttttactcgaggtttggcttctgaatcagtattaagaactggtattaagccctttagtccattttctcttgatggatctagacctttgtttcaagtttgcctaaaattgtgacacaccactacaatatgtcactaccgatttaataaagctttcgttacccctaaagcttctcaagaaacctcaatcatatcttgctgaaactgaatctgttactaaaacccaagaatattcatcctcaaccatactagatttgctagtgtctttacgtggtatgtcaacaccggtgcgaccaatcatgttgccttttgtatggaacatcttcacaaatccattccctatataggttttgagtctcttgctataggatatggtaaggaattagtaacttctcaatattggtcatgctcttcttcctcctttctctaaccctcttttacaattaaattctgttttgaatgttccttccataactaagaatcttgttagtgtttccaaattaacagatgacaatgatgtgtttcttgcgtttcacaagtcttgttgttttgttaaggaaaaacaatctagaacggtactgctaaaaggaaaatgtaaaaatagcttgtacatgcttggatatgagtctcaatctttatcagcacctagtttgtagtgtcatctggccacttcttccacatcattagctgggtcaattcaaccatgcagtcttgagtcaccatcttgtactcattcttgtaatgatattactgtaccaaataattgtactcaaactaatattaataaaaactcagattcttctctttctcataatctccaagcattattaatttctgtttctaatgatataaatgtatggcattgcaaattaggtcatcgctcttctagagttctaagaaaaatactttctaaaatacctaactcgggattcattaaaaatttaaaattttgtgaaccatgtcaaaaaggaaaaagtcataaacttcctttttcattgtccacaactcatgctaatcaatctctataactcttacacactgatttatggggaccttcttatgttccttccaaagatgggttatggtattatgttcacattattgatgacttcagtagattcacgttggatatttccatttacctcaaaaaacttcaaacttttgaggtgtttattaagttcaaggtctcttactcgt

SEQ ID NO: 193774 - DNA, 1182 bp, Cannabis indica
aaataaaatatttttgctgtcaattttctttaacttaaatacaattggaaatgtttaaattttaccacaaatatccaaaaatcaatacaaattttttttttatttctgagttaattacacgcgctatatggtcgcgtgggctacaaagagcatattcttctaagtcagtcaagaaagaaatataagaaaaacacacccagctctgtactccgtcgaagaccattattaaagctcaagtctttgaaaacttgtattatgcaacaatggaggttaccaactcacaccactcaccctgcaaacaaatcccatctctcctctcctccttcgttgatacattcgttgacttcaccgtcagcggtctcttcctcttaccggaccccaaccctgaaaccccttctgctcctctgcagaccaggtaccccgccgccgaccgcctcatagcagtcggagatgtccacggcgaccttaaaagaccaaacaatcgctgagaatagcgggtctaatcgacgactccgataaatggattggagggtcaaccatggtggttcagatcggtgacgtactcgaccgcggcaacagtgagcttaaaattctctactttatcgagaagctgaaacgagaagccgccaggtccggcggaaccataatctccatgaacggaaaccacgagattatgaacgttgaaggcgattacagattcgtgaccccaaatggcgttaaagaattcgaaaattgggcggaatggtatcaaattgggaacgaaatgaaaaccctctgcaaaaatttgaaaaaccctaaagacccatttgaaggaatcccaatgggtttcaagaacatcaagaaagaattttcaaacggattcagagcaagaatcgcggccctaagaccatcgggtccgatctcgacacgattcctatcccaaaacgtgacagtggtggtagtcggagagtccgtcttcgtccacggcggacttttaccggaacacgtggctaagccgggattagagaagatgaacgaggaagtgaggaattggattaatgggtcgaaaggaaaagaggcaccttctccgtcttactgtcggagtagagatgcggtggtttggctgaggagattttctcacgaggcggcggagatgtgtgattgttcgactttggaacatgttctggcgacaattccgggagc

SEQ ID NO: 193775 - DNA, 1185 bp, Cannabis indica
atatatatatatatagttgctagtactatctctcacccaataattgaatcgatatcaaatccatctttcatatatatgtaaattatgatctatatatactctacttcaacgtaagtctaatttagaataattatatctcatataatttaattagttgatatgctaagataatgttgagcatcatgatatgctttgtatggtaatataaccattgctcttatatattataagtagttaatgtataaaagtatatagctaggttatataataagacacctcctaaacttcacaagtctacgtacaattcatgagatttattatgataaatattgaaattaagagatgactatatttttatagattttctagtagatatatatatattatgtgtatcagtgtatattagtaattactacgtaaactatctaaaaactagctataaaaattatataatatagatctcaaaagtacgtacgtagagatataatttttggaatatctgagtgttgaaaaatggagagaatgaaaaataaaagcaccaatggatcatcatattcatattatatatacatgtatgtatgtatgtatatatatttatatgatataattgataaattaataaatataaattaagaggtatagaagaggtcactatctctttctctctcactacttttatttttgtttgcatgagaacttgaccgcgttttgaggtagctgtctaaggtatcataaattgtgttctttccaaacccatatgccatgtgatattactatttacccatcatttttttataccaaattcttttatttctttcactcttttcacatattctaattactaattactttatattattatctttgattgggtaattcatccttaagagttattaagatcatacatattaatctttttctttattaactacataactacttcaaactcgataataaaatacaccaataataaattaatgtcacaatttgtcgtgtgacacttttaacatttcttatatagatataatagttaacataatgcatgttataatacttacatatatataaatacatgggtgcaggttattaaaatttatagaataaaatttaaattaactctcctatcataggacaaataattaaatgcctccagtgaataatttgctcagtcatgtttttactttt

SEQ ID NO: 193776 - DNA, 1828 bp, Cannabis indica
cctctatctctttttcaaaaaaaaacgaccaggagacaaacatgagtagctttttggaagtaaaactaatggtttcccttcaaaatataaaaatccacaagacaaaaagtaaaattgtcccatattacataaacacagtttatgtgaaccaatcggaactattgtgattcatccaactaatcctcatatgaactgcagtagccgtgcaaatgttactaacataagattcaagggaattattaaaagtaatagttattgtacttcttggtcatggtacaatgaactaaatttgaagtccacaaccatccgcataagtttggattaattgcaacttttcttgtacattaagagttaatttatcaaaaaagagaattgccacaaaccaattattattataattaaataagttatgaacaagtgcaatgtacataccataacagtcaagaacctcattaggattcgaattcggttgcaattaccagagtataatgcatcctgaagattaatacatgattaagtaaacacaagtgtaatcaatagttaaaaattgttaactatgagtacatacaaaaagacttaatatttaaagtagttctccccacatccaataaaagcattgactatggtactatttacttgtacatgacatgatacagggcaatcaaagtatatcggatgtcaagcaatcaaagagcacacatcgaatgatgtcctttcattaagtccaaccaattgtttcataaacatgtttaacaatttaaataaatactatgcatacttacagcctggctgaaaaacatgcttacctggaagttgatttgagtactctcaactaatttcctaccaaagtcttcattatccaagttcatcaagccaacctacagaaggagataaagaaaaaccattagatcttagcaagtatcactcaaggaaccaagatgaacatatccatgactcatccactcattgaaaaattaaacaattaaaaagtcacacacatacaccctgttcaaaatattcacgcgatttgttcttcctcgtacttcaattttaacaagtttcttgagtgtgcatgacacttttcctatcattttcgcttttctttgatttcaattagtctactcctattcaaggactaattggtgataatgatatcacttctcttttattacaattaatctactcctattctagctattaatgaatatttatttgtactagtttatggaactaatatacattcaaacttacgaattcttgtcataaatttaattgaatcatgaatcaatttcgcttattattccttgtcctagattgacatacacataaaagttcaatgtacatacccttacactatctgatcatatattttaaccagttccgtgttatacacaaataaaaatactcacttgtacaatactgactccatttggaaaagcttttgcttatgcttacagaatcttatttgataagctaggcatctagcttccataaaatgtcttaaaattaaaaaaatgtcttcatattatttatatgaaaaaataagctgtccatttacatttaaaaataatagtatagtatgatataacaatatataagagggaaacaacacttattcaatagaaacaactgtaatgccctaccagcgttccatataaaggaatcttgtgcggcagctgttcggcgcactggataagaaactgccagataaacaaattcagtaacatgcgaatacacccttcctcggcccagaatatgttatacataattaaaaaaaaatgcctaaccattgaaacaaaagtatattgaaaagagagagagagagaga

SEQ ID NO: 193777 - DNA, 1230 bp, Cannabis indica
tttatcacggtgacttatttacgtactttaagtaaacaacctaattaattagctaattgtagttaatttgtaaccttatttctaaaaatggttgtatttaaggtagctagaagaatcaatttgataaaatatctaaatagatataccgagttggatataatataaaataaatataattaaaggtcttaagttttgtcatgttataaaactgaatataatgtacagtcattgagaaatagttccatatatatatatgaatataattatataagtgacaagctttagtattataatattactaatttgagaaattattttgagctttgagtatatatatacaattaattattactttagattggttggctaatatatagaaaaattggaaaagttaaacctcttcacattataacataaaccataaaaatcatgctttggattttagagtaattaatccagtttgttcagatcttatcttaacaattgataaatttttctatacacgaacgtaatgacatgataaataatttagcatgcatatcacgtaatctatttatttactttcccttcacaaaattgtgtaaaatctgtgcttattagatttgtaataatatcttgttatgttaaacctcatttttatattattatttttaagaactttacgtgtgtgatgtggtggtttcttaaaatatattaattaataatttcaatatatataaattaaaataaaagaaaaacaatatatataactgaacatataaacataattatgcatacacaccaattgcaaatggatcatatattcatattactttctcaccattctcgcacattgatttgtaaataatgtactttggtcaataaacttaaagtaggtaaaaaatgaagaaaaaaatatcactataaaatttttaaaaaaattatgtaaatatcactcatatttgactaaaaagtttttaaaaaaatttcaaataatgtcactccctatcttctcaaaataacatactaaaaatgagaaaagacagttccaattctacaataaaaaacctaatatagaattaaataaaattgcaacttcaaatctataagcaattgaaagagcttgaatctaataaagttaaaactaattaaatagtatgagtcaatatgagtcataatcgtattattcttttttagatatctaaactctctagaaattccaaaaataatagcacacaccaaataacaata

SEQ ID NO: 193778 - DNA, 1705 bp, Cannabis indica
aacatgtgtgttagcatgtaattgttatttatttacatactaaaatttcaaaagatatttaaattagttgaagaaataggaaatgttgtaagaaaaagagagaaaagaaacgattacttgttccaattgacatcgactccgaaatctctgatgaaggttttgactagattgacacattcacacgtggcaaatcctatatggacgtttgtgcatgaattttaaagccgtcgttttcgttctactattttatctacatcctcacatcattattttttattttattgacaaaaataatgaatcaatgatatataaatgaaaaagccgtgtattttataatttggatttatcctaattttaatctttctctgattttcatgccacgattgagtcaagtgtacacaatatatacggatagttattaaatgttataatggcgacgttctgaagattccttatatatttttcgtcttcatcttgttgatgactgtatgtagcattggtgatttgacccttgattttatcccattttctcctcacaacaacaactatattcaaattgccaaaacacccttctatctccatatttcagacacatacagaaaaaatagggaaccgttttcttatgtgtatgcagaataagcgaaaaggagttacaacacatacgtagaaaccaaagataataacgggtgatgcaatgatctcttctttgatttacattatatgatcattccatcatatatatcttgtaatgctgatgtttttaagagcagggaaattaagcgatgctgggaaatggggttgtcgggattctttcagagtcttcaaacaagtgggagagaagggtacctttgaccccatctcattgtgctcggctccttcatggtggcaaggataaaactggtatttctcgcataattgtacagccatccaccaaacgaatccaccatgatgctctttaccaggatgttggctgtgaaatatcagacgacttgtctgattgtggcctcattttgggtattaagcagcctaaggtttgattttaattccccatctttcttaatttgcagagaagcaggattcaaacttactgaggcacaattttttatttttttttcataaagattaattttgtgatttttcttaatttgagagagaccaatgttcctacttacatatatttgtaataattttttaaaagatacatgtagaagttagggggaccatagcatattccatttgattctattctcaatgagtataaagttgactttattgtttatactaaaaagttcacggtgcatgctattacactaaaaagtgaacttagattgagaccatgaagttctttgaatattttagtgtagatttaaggagtttgacatgtcatgttctgtttttgtgcagatagagatgattcttcctgataaagcatatgcattcttctcacacactcacaaggcccagaaagaaaacatgccattattagacaaggtatcatttgttgtgtataatttgattgagtctttgttgtgtgttgacacttgacaatttaatgtatgcatacagattctagctgaaagagggtcattatatgattatgagctaatagttggagagcatggggcaaggttgcttgcatttgggaaatttgctggtagagctggcctagttgacttcttacacgggcttggactgcgtatgtacc

SEQ ID NO: 193779 - DNA, 1578 bp, Cannabis indica
tatatatttaaattattatattagctagttagtatagatataatatatatatatatatgtgtaatatttgaaagatgtaagaaatttctatttatatataatagctagagactgaaattttgaggccgaaaatattaatttagtaatgctataaaataataacaaatgacaactaagcattacaaatttaaagtttaattaaaataaaatgaaataaatcataatatatgcatgtcactcttattacaaaaatacagataacaaatataaatatatattaagttaaattgaataaaaaaaatgtaaagataagtgtggagcaaattataaaataataattatacatgttatcatgtatgtagatgaattgattcaatattactttgtacttgcttaaaaatattatttttgtactaaataatatataattaagtagtacatgtaataagaatataaggcttaaaatataattaattgacattagatggtgatttaaggaaagtaattttaattgatggcaataataatgaattcttaccatgaggaaataatcttgtacaagaatagcatataaagtccaaattccaccattaagaaattggaaaaatgataaaaggaatggcatatactccacactcttgctcgtcaccacagttttctgcatatttaattaatcaacaaattatattaattaaatcaattatctgttcattcaataaaaaatatcatttcaatatttgagaaaaacccaataagttggaatatataaagcatccatatatatatatgccaaaagaaaagcatccagatatattcattctgttaaagaggacctgtttgtatataaattaatatatataacatttatgtatttatttatttattgtggagcataagcaaccacatgggaaagtgactaataaagtttactcttttaatttgcagttaaactatatttaaaaattctgacttttgcccccacaattttttgttttcttttcgtacaataattactatttattttgtccaaatctgaatttatatattattataattaattttcataaaattgttgattgttgcatatattaaattaaaattaaaactaaaataaacaaaagctgtacactacacatcaataaaattaaaacacgatccgtagaattttctaaaattaatattttattatttatgaattattttaaactcaacaaagaaataaaacctacattttcttttttcccacttgattttattatactagctagctaccttgtacttaaagagtttaattatataattattatatgaatgaccacttacaataaagactaaagtggatgatcgatgactttattccaaataattaataatactaattcagaataaatcattaagatattaaactcgtttcaaaaacgtataatgttaaaataaaaacaaacaaatatattacccattacacttggaaaagtcatatataatcataactactaaaggtaaataattattgaaaataaactatttgtaagtgatatatatatatatatttttgggttttttttatttttaaatttt

SEQ ID NO: 193780 - DNA, 929 bp, Cannabis indica
acatgtgtattttttagtattccaatgtttactgataaaaaatatcaccgcctaacacttataattaagtactagatcctatataaagtgttaaacaccattggtgtccaatgctctaaaaaaatataaagcataaatagtttgacaaatacaaacgtaatgagaaaaacctaccctagtaaagattgttaacgttttgcctgcaaaagtcggtcaggagatatggtggacaataaaaatgaaacctgcacaagtcccaacctgccccatgaaccatcatttaataaatatatcttccataaacattgaatggaatatttaaaatgaagatgaaacttcaagtgtagtcaatctaatattaatcaatgtgagaggagagaccaagaccatggctcctacaagacaatgattttagtagtaataaatcactcgtccaaatgttcaaataacaagagagaccacaacacatacaaaggaaaggaatagaaaggaggcaacttaatgtaggttttttcgccttgtgaagatcaagaatcaactgcttgctgagagtcagaccatagcattaaggttgctaaaagtgccattgttgcggtttcaacacgcaggcgatgaggcccgagacctactgccgaggcccctgatcccgttatcaagttcaactctttctctgtgaaatctggaagccattaaaacataaaaacacgatttattaaacagagaaatatttcacattggcataatagagaaaaataacataaccgttgaatttagtatacactaacccccttctggtccaactatgattaatccacttggctgtattctcaaactggtcaatgcactaacaagaggagtagcttctgctaccgctacaaaagatagcgttgactgggaaacctataaaataaaattgtaacatttaagtt

SEQ ID NO: 193781 - DNA, 2106 bp, Cannabis indica
tatatatatgtatatatgtataacgctcaattttagttttttcggtcgatttattacccaaaaaaattgactgttcaatggcggttttcgttagcagttttttcggttttctgcttcggcaatttcggttctaatggtgttcagtaggtctgtttgaacggttttttcgattttttgaatttcgtgctcagtcgggtctgtgtctgggtccgggtccgggtcagagattggtgttaaccccaaatcctttgtaaatattatattacaagctaatacgaactacttgttatgtattaaataatacaacatacattgtattaaaaaatttgatcgtaataattaatataatacattacttttttccaaacatagtattatttattatttaatataatacaacccttatacggcgtaccaaacgagccttaaatgtgtatagaacgttgggaaataagactagacgtaaggccttaatttagaactgaaaattcgttcgaagtgacatgttgcctcttacagggtgacatgtcacttatagtatgcatgtgagtgtttttgaagtttttcaacgtatttcaatggttcaaaatatttgctccaaggaagttatttttgagataaacattgtaaaatgttgggcattcaatgggggacgttcttagtttcttgccaacatttttgacctccattaatccctcttacacacctgataacaaccatagagagtgtgagatttgaattttaaagtttggttcatctacactataaatagagacataagggattcatatgcatacactagtgaatttctataaaaaaagagcattttgttaaaaactataagtttcatatattcgaaaagctatttttactttttttctttcctaagtgcttgtggtaggaggaattaaacttttagataaaggtataaaatcttttttttttatttaagcgtttatatattacattgcataatctggaactcgaacctaagacctccaacacacacaccctcctatggccacttaagctagcctcaagtggttgtattaaatcttattcaagtttggtgattctctaacttttcactttgtgttagtagcatgagattattatcacatctatatatattaagtaattgtcacttagctatatataatttattaaattatttttattatatatttcaattattataaaatttgatttatatatattaaatgaatgatgttatattaaaaataaatatatttaatttgaaatgaatgctcatttcaaaccaaaatatgaaatgaattcgtaacatggattccatggattcatttattaatattaaaaattataattctaaacatgtagttctattttagaatttgattctttatatgatgatggaagtattataataatcaactaaatgctacttgaaaaaactattccaattcaatccatatcttatgaattatacaaaagctttacccattaagtgttcagtaatcttaattaagtgattttttttatatatatgtatatatagatagatagattcttatattatattgaagttagaagatggaaaaaaaaactcatatttaatagaagatatatggtgaggttttggacatttaccataagtattcaatatatataaataaagtgatcaaagacattgaagattgttccatatatgtagaactcatcatcacaaaaaataatatttgattttcttgaacacctttcactaacttttcaattatcatataattaaaaccaaaaacatttcaattgaattattgaaataattaaataaatatcattacctctaggaaccattaatatagcagcaagagctttgaaaactttcaattgtttcaaacaatttttttatttttcagaatcgttcattaatcgataataattaatttttggtttgatacttttcttcttcgcaggttgattcatgggaaataatagtattctttgtttactgttgttgcttattcgttgtctagctccttctgtctcggttagcttcattttttagagacaattttaatacaatttgaattgtacgaggtatttttatttttatttttttcttggact

SEQ ID NO: 193782 - DNA, 952 bp, Cannabis indica
ttcaatgtttcccttctgtttcaataagcatcgttattcagatcatgagtcatactgtgtttagtttaataatattcgttactgtttcttttttgaaaaaaaatgtgtaatttgttaagtgatttctttttcgtgaactgctctagaaaatcaaaagtgatactcgacatacatatatattctgcttatttttagcggctcaaacatgttgcttgatgtttgtaatttgtaaacaaatagcaatatactacacgttgaaatgtgggttgtctacagtctaagttcttttgtaaggttaaccaagagtactaatatatatctgacaaagattttagggttggacatatgtgctgacacattggtaggagatgaaatgcttaagggaatctcaggtggccaaaagaagcgacttactacaggtacaatttctacagtgtttttatatatgttctgcaatttattactgttgctggacagccaaacctgattcaaataactttggaattggcatcaattttagctactttcattataaacagaattattgaatgtcaatttttttgtaatgttaagtattaatggtatgtgaaagttcaatactaacagagcgtacttgttctgcaggtgaattgcttgtaggtccagcgagagtccttttcatggatgaaatatcaaacgggcttgatagttcaactacttatcaaatcatcaaatatcttaggcattccacccgcgcacttgatggaaccactgttatttctcttcttcaacctgctcctgaaaccttcgagttgtttgatgatgtcattctcttgtgtgaaggccagattgtatatcagggtcctcgtgaagctgctcttgatttcttcgcgtctatgggatttagctgtcctgacagaaagaatgtagcagattttctgcaagaagtaagtgttgctatctctctctctct

SEQ ID NO: 193783 - DNA, 1769 bp, Cannabis indica
atcacatattaacaaaattgtactttggttttttgcagaaatgtctcttgcaactcttgtctcagaagactgttgtttatgctacacatcagttggaatttctagaagcagctgaccttgtcttggtaaattactgatctgaaactttactgcccatgtctcctgagctgatattaatattcttcccttctctaatttgtcatgttattatgtatatcaggtgatgaaagatggtagaattgctcagtcaggaaggtatcaagatctgattgctgatcttagtggtgaactcattagtcaaatggctgctcatagaaaatcattaacacatgttaacacatgtaaacaagaagattcctctaccagaagaccaagtagaaagaatcagatagaagttgtggaagattggttcagagagcccttagcagataacagccctctggagaaaagccatgaagaagaagcagaaactggtagagtgaaatggagtgtttactcaacctttgttactgctgcttataaggagcccttgttccagttatccttctctgccaagttctatttcagggtctccaaatggggagtaattactggcttgcttgggccactgagaaagaaggaagagtaactaacaagaagttgattgggatatttgtattactttctggtgggagctccattttcattttgggtagagcagtttttctggcaactatcgccattgaaactgctcagcgcctattccatggaatgattacatcgattttcagggctcccatttcattttttgattccacaccttcaagtagaatactcaacagggttagtgtttttttaattgtttgatactttctcatatttggagcttttatcaagtttctaactaataatcctttttctttctgaaaattgttcattgcagtcttctacagatcaaagcacagttgacacagatattccatacagattagcaggattggcctttgcactaatccagctattgagtataattgtcctcatgtctcaggttgcctggcaagtcttccttctttttgttattgtgctcggaatctccatatggtatcaggcaagaattaaagcctcttgtgcaattatgtttgtatttttaacaaaacttatattactactaccaatatcattaccatcagatgatcagaattgcttagtcctttgatgtttttgtttggataaacttttttggttacttttgtaggcagattacttaacaactactgttatagaagctgaactagtttgattacttatgtaggcatattacattaccactgctagggaactagcaagaatggttggaattcgaaagggtccagtgttgcatcacttctctgaatcaatttcgggggctgcaacaattcgttgctttaatcaggaagaccggtttgtgatgaaaatccttagccttgttgatgacttttctcgtgtagcctttcacaactctgcaacaatggaatggctttcagttcggataaattttctcttcaaccttgtattcttccttgttctgtccattctggtgaccctacctagatcagccattgacccaagtaagcaactctctttcccatctcgtatttaggccaatggtttaacaaaaaatatgagcaccactcagtgtagttaatagagcatgaaatgtcaacaaaattctagataacacctcacgggaaattgctggggtccatttggtatgagataatcttagtatgggaatgggaatcttgaaaata

SEQ ID NO: 193784 - DNA, 1622 bp, Cannabis indica
aagaaatcctaattagtttttgttcaatataatggattaattatggtatctctattgtctattgatgtagaatttgggttataaatttaggagaatattattacaaatttgtgatgcaatacacgtttaatggtagttgatgaattgggcccgccacaaccgtcagattatgttgttcttttttggtatggttttatgaaattgaggaaatgctgtgattaatgagaagtgagaacatgttacttttttttttttttttgctgaatttgattgacactgtagtttggggttggtggacttccatttctaaccccactccccattccacgtggcaacaatatagtgctcctctgctctccaccatcactctccacgtggcaactgtttatctggattagagtggaagtgaacgaatctgttccacttacttcttcataacatgacgtcacgatgatgttcatcacaataaaacattttttcttctttttgctgcccataatatggttagatgagctttcgatcggaacattactggttttgtggaatcttccttaatatctatttctatccgtaatgagcacgagatctaactttctctatctatataacgctttatttaaaaataaaaaataaataactaataaagttttcaagaaagagaatagataaatttgtagacgaagtagtataatttaattagggtatctgtgatcaaattttttaatttttgaatcttgacacaatcaaattttaaattaaaataattagagcgaaatttttttaatttatagaatggtttttctatgcattttttctgtactttactattaaagtgtcaagtagattaacactttatataaataaatacgtgatgaaatttcattaattcacttaatattactaatcaaaaaaaatttaaaatattttctctctctttttttatttttattccttttcttttattttttttcttcttctatctaaaaagcaaaacttttttttttccaccaccaccatcataacacaaccaccaaaactacctcccaccatcacttcaaattttcaactttcttcttcttcttctttcatctatcaacaccaccaaacccaccaccatccacaaccactattaccaccactgtcgaaacattttctcacatcacaaacccaacaaaatcaaacaaaaacccacaaaccccgcaatcgatttttctttctttttctttctacttttattttcgatttttatgttttggatcgataaaaatcgaatatatacactatatttctagtagtgttccaatttagacttgttaaaaaaaaaaaaaagacaaaaacgaaaaaagaaccaaaagaaaaaacaaaaaaccttgttaagatatataatatccaaacaagcttggacttttactatgttgaatgtagacattagtgtacctatgttgttgaagtttttggttgaaaattggtgaagttatggttagttcggttgtaggtgaaatttaaatactttgaggccaatgccaacccaactcaactataataaaagataagatgagaccaattgagtagtgagtcaatatggtgtagcttaagatattgttttccaaattcatcgtttt

SEQ ID NO: 193785 - DNA, 1538 bp, Cannabis indica
attttgagccaccttctctctacgtatttcgaaatcctccctctctttctctcttcaaaaccgaaaccctagagtaattagagtaagtgcccacacacatcaagtggtacttaatcatagtgtgtaaggctgtgaagaattaagtttcaagagaaggagatttggactcaaatcttggtgatactctgctacagacaggatacaagggttagagatctgagtggaaggagacattaaattccgctacaaccactgtaaggtttctgaaactttatatgtgtttatttcatatcgttttagaatgtttaggattttaaaaatatacttgttagtaaatctaaatcctggtaaaataattttaatatatacatctttcctatgattaaacatgctgcataatcttttaagataatactttttttatgataaattttcaagatatacttgatcaaatatatggggttgtgttgtcatgtgatgatgtgatattaggaataggttccacgttttatcatacgacaattgttaatttagttgaaagaaaaaaaaaatcacatgttgatttgagagagaaaggaaatgtttggttttatgattttgtgaaacgacaagggctgatggcagatttattgattggcccagctgacttgagttgagctaactacgtaacaaaccctactacacacattgtccaaatgctttgtccgactcccacttgggtgaaaggtgagttgagctgagttgagttgtgagttgtttttttcccaagtgggagtggcaagatatatatctatatatatctacatatatagattttttatatatatatatatatattatggatggtgccaagaagcaaggcaacgccaaacttgatcctcaatatctaataatgttccttcattgggaggctttgatttcaccactgcaaatgcaattccatttccctacccctattcatgatctattctgtctcttaatcaattacttccaattattgttctatatgccatctcactactcttcacacacataaactttatcttcatcatcatcaatattatccttttaaatatttggataagttcatcaattttttttcccttaattaacatgcaaattttaataatgtatatactatatacatatgatcgtatataacatgtgcataagtgcgctttcgttccattttttccaaatttttccatgttggtaggaaagattttggtcaatatattggtgccatagcaagtgggagacaaaccaatgagaaaagatggttatgtaagttgcgcatggctcatggggtgcttgcttaagtgtaccatattgaaatgatcatatatagatatatacatctagttagttagacatgcacttctttctacaataatacttactttaatgcacatattatacttcaataacaatatatataattataaggaaaataagacattggcattaaaattcatcatgtaaacagaactacaataagttacactaaattataatactaatttctatataaaaaaaaa

SEQ ID NO: 193786 - DNA, 1088 bp, Cannabis indica
tatatatatatatgtatatctgtgtgtgtggggcaattgcacataaaaaataaaagtgataaccgacagattatatggaccagggaatgaagttgcatggacacgtcaacgcgtacaacacttaagtgaataacaaagtccaactttgagggctctgtgacgagatttcaaatcctaattatatctataaataagtacgatgcaatagtcaatagcttctaaattctctttactaccaaaatatacttcaatatcaccttctctatattttacagctccacaattctagcttgctctgaaaatcatcatctcaacaaaaaatggcgaaagcttatttcataaagacattatttttattcatatatcgaattctttttcgtaagctaaaaaccttacgaagaagtttgagcaacagcccttcatttagccaatcttcaatctttaaaacatgccataagtacacttgtctgtctcatagatcatcgtcagatcttgcaaactcaactatgattttcaatatggaaggaggtttgttaaagtcttcttctttattcccatacttcatgcttgtggctttcgaagctggaggtctctttaggtcaattgttcttttactttcatacccttttatctgcttgttaagtcaagagatgaggttgaaatggatggtcatgatctcattttttgggatcaagaaagagagttttagggcaggtacggctgtgttgcctaagttttatttagaggatgtagggtttgagatgtttgagttgcttcaaaaagggtcaaggactgttgcgttgaccaatttccctgttgtcatggttgagagcttcttgagagactatttgggtgttgattgtgttgtaggtcgagagctcaaggtcttccatggctactttttgggactcgatggaagatgataccaaatatgttccttccaaatatcttggaggagaatttgatcgcaaacgtcgattctgtatcatcatgatatgagtggcatcaccgacttcaatactactttttccaacaacaacttctttcaagttgtaaggtatgtttattaattgataatagtacacttt

SEQ ID NO: 193787 - DNA, 4272 bp, Cannabis indica
aaaagaaagagtaagagacctaagtaatgtccttttatcaaacaggtgagagcctaaaatctaattatccatcgaatatcaataccatctgaattttctcacactatacgttgtcgtttcactcaactcaatctttcttcttcacactcttcaataaattagtgactaatttataatatgatcagaaattgtagtaagtggatgttccactattcatgctctgccatagaatcgtatagcgacgaactttttaaaaataacctaaacccattttacaagtcccttttttttattgtttatcttgttaagaaatccataagaaaagtaagaatagaaatagtataaattgtcaatgataacacaccgttgtatgacctatgaaagcaatagtctccgcccacacaatgtgttcactaaaatgcttcactctgattcttcactgcaattagattaacctaaaatagaaatgcaagtttaaccggactagaagtaaaaatcctaatatgatttttgaaaacatataataataaaaaaattaataactaaaaccataatcaagaaattacgaacctgtattgttttgaaaccactgtcaacttttcaaagaaaaaaaaaacaatcaagtacagaaaagggcaacgaaactctagaaaaaattagagaaaactaacccccagtggctgaaatcggacttgcggagctattggctttacttctccagtggagaacgaagctacctcgaaatgtttagaacgacgctcgattttttctctttcgcgcggttgctggttttttttgccatttttgcgctggtgtgctgctcattcaaagttgaacggagagtatgataatgggctgctattattaattggggttttaattgggccttacgtccaacagtgttggacgtggctctatcacaaaaataaaataaaataaaaaattataatgagcaattttcaacctataacgtccactataatttttttagtccagcattattggacataatgtaattttttccaagtccaacaatattggactatgaaactccccataagatttttcatgtccaacactatttttgtgggacataaaaagattattttgtagtagtgaaagagttccatgttgagaaagcctgcctaaattcttcgaagctagtcgatgcagcgattgcagtgcggatgatgagtaatcattggatcaacgaggaatttagtcgatcgagtcgaaagatgtttgggaaaatgtcagtgcggatgatgagtaatcattggatcaaaccttctaactctagaaaatacgaagcttagtgtgggaaaagtgaaaagaacaccattgaggatggtttatatttcaaaaagaaagatggcctttgcgggatcaacggttcaaattttatagaagatccaacggctagggagacaagaggttcagcataattagcctagggcccaccgaactgtcaaggtgggtctcttcacatcatttagccattggttgcattccacctttcttgctgaacgcgcctcgtgacgtgccaaaggggccaaatgagatttttgaagtaccccatgattgccacacaggcgaatgtaaatgttgtattttccctaaacagagtacagctcatacagaagatgcatctgtgacttaaattatcagctcgtgttaatagccagtactgaggaaggatgattaagggacacatgagacacatgacataagtccgcaactcaaagagtctcgaaagcttggaggtaaatgttatccatgttttcacgcatgagacacatggcatgattaagggacaaaatgtattagcggaaatgaataattgagataactcataaggtatctcggaggcgacatctcagccatcccaaaagtatccactagacacttgacggaatgaactatttgcaaacaagtaacatctcctggacccagaagattgttgaagtaggcgaatcccagatggagatcctttaagtgatggacccagagtagcgtcatacagaaatcgctttatggacggttatacctttttctgacataagatcagatattgtcccccatgccaggccatggtagtgcgcgtacgcacatcgaaaaatgcttttatttgcccaacgaccaggttacagagtattttgcaaaggagagacctttgcatgacacgtgttccgggttggaaaagaaaacccctactgtagttgtacgccacacgatgaagaaggttcttaccaaccaatggttagatggtcctatagtaatgccgacgttggcagcgtgtagagtatgaaaccctaggtggataaagggtatgccctttaccccatgtgtgtctataaatactcccattttctttgagcaatgggtaaaaaaaaattatttacaaacactctactaaaattcctatagagctttctcccaccaagagaaacaagaagaatagagagatcattattgtaaacacttgtaatatctaaacacttacccaaagaggctaatactattgactcgtagactaaagatcattaacgcctgaaccacgtaaaaattcatttatctgttgttttatatcttttattttcttaagttctacataatcagtttctaaaaatctcggtaaacaaaatattttcataattaagaattagtttaaatttgtaaagtttattttatttatttatttcacataagaatataatattttggagtaaatatttagtatatttttttatgaaattactctctaatatataatgtacagtattatttcaaaatatgaactgataaaaaattggagaaattattatatttagtatatttttttttatcaaattacttgaatatataatgtacaatagtattttaaggtaaaattaacataatttttatatacaattattttttctattattatttttacaaaagtattaaaatatatagcactccaaagatattattagtaattaaatattacattatcgagttaatatacttgacaagaaaaagtatttattatatggaaagaaaataattaaaattgatattgtgtcaaaatttaaacaatatttattttaaatttttgtaaaaaaaaagtttcatttcaaatttctctctaagcctctcaacactttaagacggtcatgaggcagccacaaagtccgtcgtgagcttgctcggcagcaaagaaactcgtcgtccacttgctaagtggctaagcagaaggagacaagatagaaatatagagaggatgagatgaaagaaggaaataaaactagaatcaacatgcataaagaaatccaaatgtaattgttcgcagaagacgaaactaacaaaaaaaaaaaaaagaaatcccaaaaatatatgaaatcactttacaacaaaaattgacttctatggcatactagagcaacaacttagttttttacaactttcaaaggttgagaaagttgttggagtcgtagcaccgtgaccgagagtgagtccaagagagataaaggtgctagctttcctgcttgcagaagttgcaccaaatttatatatatgttgagttgagtcagtaagaacaaccaaacaatagattataaaactaattatgcatttaccaaaattccaaaattaatatggaaacaacaatataaaacaaatccatcatgaaaactttagtgctcattctatgaaccccttatgaaaaaaaaactattttgggcctagatgaaacaactagatgattgattctaaacattatcaggagaatcgacatgcataaaaaaagataaaagaaaaagaaaacctatctgtgatcttacgaagaagaaactataacctctgtcatcgttcgaagaacacgaataaaaataaaaataactaaaatattttggtgataatcttcaaataagaaaataggctaaattttatttaacgcttacgaaagagagaactgaggttttttttttttcttctttttttaataatatataaagttgagtttgaccttaggagaggctagaagcttaagaaataaaactgagagacttgaataggtgtgaaaatcgaaaaaacttttaaagcaaccggttagaccttcgaatctcaagtcaaataccccactttcctcaattaaatattatatataaatataaatgaaatatgggatacctaatatcaacctttggatcaaatatcacactgaagtatgctaaatagtatgctaaatgctatgcatgacaacaaccagcttctatatatatatatata

SEQ ID NO: 193788 - DNA, 686 bp, Cannabis indica
gttagggaaaaaccaaaaaaaaaaatgtgagcactaccatgtagtacatatttgactaactaggcttatcataaaccatgcgcattcaagcaaagaacaaaatagaaagttaggttagaatgcaattcatctcaaattaaaagagaaacatgttaaaaatgtactgatgttataaccaagtactacttctacttaattaattattgcgcctaaaggctaaaattcatatttgtttaaactgaacaaatatatgtatttacataataaattgtatgaatgattaaaattatgaaatttatttattcattaattagctatatatctagctaaaatggaatttcaaccatgtacggcattattaatgttagtaccattgtatataaattatgcttatgtttatataatagaactcccacattaacaaattgtaaaaatatatataatgatataaactcttttcatttgtcaatacattttacatggcaaacctcatacatttcactatacaccttatcttatatctaatatgtaaggataaattatctcaaaaaaaaaaatgtaaggataaaaatgcatttctggccatacttttaaactaagacgtaattatatatatacattggctttaggagagttaggaggaggatgaggagtgagtgaatccgagccgagagagagagagagag

SEQ ID NO: 193789 - DNA, 1793 bp, Cannabis indica
aaagggatacagtaagagatggtcaaactctgtgatctgtatagtcttatgcttatattgtgtacttaatagaaaatgaaagttcaaatcacattcaagcaaatgatcaattacttcataataatcaaatacatgagtcaaaatgacacacttacatcttgattcatttccttgtgatttttttggcattttgcttttgtaacttaatctcctttgcattgcagcatgagattaggtgcagctaacctaggcatcaagaaaaagtcatatcaatcaaaagaatccttagagtgtcaaaatgaaaaatatgcaattatttttccttgattgacaaagaaaatgtttttagaaaataaactgaaaatacagcattagatgacatttcatgatcttcattcttgagctaaaaaatttcagcataacaaactatagctttaaattcaatactcataaaaatattttggaatgatgaattgaacaatttcattatcattgaacaagttgttccaatgttgaaaccacatgttaccactcaagcttgtctcttatgaaaggattttccattcacctagctagtcgaacaagataatgtcttagctaaatttggcaaatttacatgttacaatatattcaaaaagcattgcaccaacttatttgcctatttgaaaagacattagtgattgatttggtccattaattttcttattcaaatttctctgctctatcctaactcagcagtcggtttcataactcgttctcatcgcacatcacacaccactcattgcccgttgatttcggtcagtgttccatatctaaaatcttctagctactttgtttgtaatcttcaagctttctaaacccaggccctgctcctccttggactgaaaaaggacatgttacaaaagcaagatttgtagtatgatagacccaattattgatagcacataatgtatagaggccaagaggaatgagggttagtgagatagagtacttgttaggccgcaaagcatgatattgtttgctttaagtctaacccgtaccgatttgttattgggtacctttccaaaaaacttaatattaataaagtaggtgaatatttatatttaatgcaacttttgcttattttttttttattatgtgggatttggattgatagtttgacagttataatgagttatttttcccatcaaaacaaaaaatgtacacttattattattagtttggatttaggggaggttgtgactgattaatttactattttgtgatttgattgaatatgaatttaaacataaaatgatccactttctttgatgatgcttgccaaccactagtgaaaaattaaagcaaataaatataaatcacaaacttaaatacttataagttatatcattttggactctaactctttattttgttaaatgataaattagaccatatttttttaaaatggtacaaaataatactctgaactggttttttatcaaaataaaattaataataactcgatctgagttgttataacaaaactggatacattcctgcatctaatcttgctgaaattgtctttaagttgattatactaaaaaaattatcaaaaattaagctcatagtaatattttacaccattttagaaaataaatgatctattttgttattttataaaatagaggatccaatcgataatttttacaaaacagaaggtccaaaatataattacttgtatagtttagaaaaaccaattctttcaaagccacctatataatacattatttatatatgtaagcaagaaaact

SEQ ID NO: 193790 - DNA, 4549 bp, Cannabis indica
caattagatttttatcttatttttttcatgtttttaaattaaattgaattagattgaatttgatttttaagtttaattggatagaatgataattatttgaacctaattacaggtgagaaagagaaaaagtattagattgaatgagatatcaaattatatatggctcttattattataattaataaaatgagatttagagtgtagccgttatctacaactggacacaccatgatttgggtttgacaacgtcaacaacggcagtgctggatacagtcgttataatgtggagtaaggctagtttagtcattttcctcttccaacttttatactgaccgttgcataaaacgatttgtaaaactacatgcatacgtaacctaattaaacaattatttaaaatgataatattaaatgagaaggtcttaagatactaaatgatgattgtcaatctcttgttacaataacttaatcaatttctatgtctagaaatatataccaaattttttttattcaatttcttttcatgtggtatttgttatattatatttacaatattatttcggtaaatttttgaatagtttaaagtttttttaatttaaaatattataaactctatttttaatattgtaaattatttagaattttttaaaaattttacaaaaatgatattgtaagtataacaaatacaattataaaaagaaattaaaaaaaatatattttagtatgtaattttaagtatgaaattagttgactaaaaaattataagttataatcagcatacatatacttatattgtgagtaattagtctacaaacattaacacaagcatacttaagaaaaagatgaaaactaaaaaatataaaaataaagaaagaactttttttttttttttattttattatttttattttttatagttagataaggtacaaattataatttttcctcttaaaatttgacatatatcaaatttgttgagaaattatataaatataattaaagttaccaaatatacattcacaaattaaaaaaaaaaacaatataaacaagtaaaacataaatttaatctcgtacatgtaaattggatggtttgtttaagaaatatgagttgtcacgagcaaattagagcacgaattcaagtgcatcacgaaaatattgagctcgccctttaaaaatattggtacagtacgacacgatccatattttcctgtgacacggcacgacacgacctgtattctgtaaaatacgaataattatggactagactaacacaacacgcatgaatttacaacactaaatttgatataatattactcagttagactttctaaaactctaaataagagtgtgcataaatcgatcaaatccaatgataatctaattacaactgaccaccaaatattggttgtccaattgtgatcggatcggatgttaggtgtggtatccaaaaatctaatacatccaacatccaattaaactaattaatattttcatttagttttgatgagtaattagaatttatgttattatatatataaaaaatgttaatatatgaaaaataatattaatttttttatttttattttttaaattggatggatctaatttaatccaatagatggtgtatctaaaatattagatggatctgatccgattcaataaatattaagtctaaaatattagataaacccaaattaaattaataaatatacatcaaatgataaaaccgatcaaattccattagattgattagatgactaaaattaattagatttgatccgaagtaaaatctaatgtcaaatattgaatttggtctaataaacacggctaactccaaatatacccctccttactccactagactatttaaaatcccaaaaatacccctctgtttcatcgtttttcactctcttctttacgaggaaaccaaggcaccgttatctttgcccatcacttacctgctgtccttatctaacgtctatatatagcaatgcttattacaactgaaacttatatatctcatatctgtgattattattattatttattatcaataatgggaatgatgaagacattgtcgttaaagaagacgatgatcaaagagctatggccatggagattctcgggtttcaaatggaaagggaaggactcttcttctccaactcagtctcagttaaacatcttagacgacgtcgttttcaagatattatatgtcgtcgaagctgtcgttcttgtctccactctctgttttttcttcctctgttgcggctgtcacttctgatttttttgatatatatatatactgttaattccttcctcacaatctaattttatgcttatttatttaagatccataattggggcttttgtaactcgaatttttcttcttaggatttggaagattcttttatttattttattcttttgtgtgtaaattattgttcttggtattctttaaaatttctaaatcagtggaatataattactaatatgcttttgtgttttcgcttcaagtttttatttttgattttgtcaatggtaaatggaataacaaagttatggctgggcctggggaaacctctggctttatcgtttattgaattaaacgacatgtttttagaagtggtaaaccttatgtcgtattcatgtaaacttttgtcgtttttagacaccattataatcattgtcgttttaacaatggggctaatgacactatatttgcaacggttgttattgtgatctaaatttcttgctaaaaagaaaaagaaatttggatcatttaataccacatgaaaaagttttgtgataccatttatcaacggttatttaatacctcattgtattttggagcagtaatagtttgggtctaaatacaagttgtgctccatttggcgaatctaatccgactccatatttaaacccgatgtaaataaaataaaaaataaaaataaaaataaactctacacaacacacttttattttcttttctgttttaaaaattgaaaaacaaaattgttaccatttttattttttaaaaataaaaattttaattttattttgtgattaaaaaattagaaaataaaagtattaccaaacgacgaataatatctctaaacatattttattaattattttaaattttaataattatttttgtatagtaatatagattataatattataattactttaatattatatatttgaaatagataaaatatattaaaataaaaaaaatggtaatatattttaaataagtaatataaaattatattgtaaaataaaaaaaaaaaaaaaaatttagacagaagctcttggtcttgggagtgcacttgaaattgtacttatattattatcttgaaaacaaaacgggctgtcgtttccagtattcctttaaacgacactttatttttgatgaaaatcctttaaacgacacttgacgaatgaatggattttgcgataggcatcattccacatttggacagtcatatattcagttctgtccaaaacctccaagaaactatcaccgaccaccgtcctctggtgtccaaaaacctcagctatggcgtctccggccttaccaatgcaacgatctcccacttcttcctcttctcctctccaacgtctctcaaccttcaaaaacgcagcacccaatcctacaaccacttcttcatccctcactgccgcatctccgctcgattccttcgcctcagacccaatcttctcagcttttctctcatccgatttctcctccacctccttctcttccgccgctctatcttccggctctccagcttccaccgccgagaagcttcaccaagccatccgtctccttgagtcccagcttcgctccgaggttctgtctcgccatggtgagcttctctctcagctctcttctctccagcatgccgatcatactcttgccaccgtccgatctgccgtctcctcccttcaggcttcactccgccgtgtccgatctgagctttctgatccccttaaatccatacagacacaaacgattcaactctccaatatccaccgctcgacggagctcctccagcactcaattcgcgcacttcgcttgtcgaagaagttacgtgatctgatctccgtgtctgcggctgatcctgataagcttgatctcgctaaggctgctcagctacattgtgagatcttgacactctacaatgagtacgatctcgtgggtatcgatgttgttgacgaagagctcaaatgggttagagagactggtgataaattgaggagcgaggccatgaaactgcttaacaggggaatggagggtttaaatcaagctgaagttggtactggattgcaggttttctacaatcttggtgaactaagagccactgtggagcaacttatcgaaaagtacaagggtataggattgaagagtgtgagtacggcattagatatgaaggcaattacagcctccaccggaggtggcggatacgggcccggaggaattaggggaagcggaatgccgcaaattggaggtggagggaaggctagggaggctctttggcagaggatg

SEQ ID NO: 193791 - DNA, 3611 bp, Cannabis indica
tgcagaaaaaaatacttgtatattaagttgggagtctagactaaaaattgcagtggatgcagcacaaggttagttgtatatataagtagtacattatcatatgtatgtctaaatgtagttgaaactaaattatgtggtagaatttggttaaaatttcaggtttagagtatctacatcatggttgtaagcccccaatagtccacagggatgtgaaaactcccaacatcttgttgaatgagaaattagaagccaaaattgctgatttcgggctttcaagagcttttcctattgaaggtggcacacatgtatcaaccattgttgctggcactcctggctatcttgatcctgagtaagttctttaattgagttttttgcctgatacattaaatagataattaaaatatatttgtatatatctcgataggacaacgttctcatctattttcaactaataaattatgttttttgtcttgtgatgttgggaaggtacttccaatcaaactggttaaatgaaaagagtgatgtatacagttttggagtagttctattagagataattacaagtcgaagtgttttatcaagaagtagtgataatgagaacattcatctatctcaatgggttcaattcatggttggaaatggagaaattaagagcattgttgatccacgattacaaggacacttccaagtcaactctgcatggaaatatgttgaaatagctactgcttgtctaaataaaaattctattgataggccaacaatgactcaggttgtgatggaattaaatgagtgtttggcactagaaattgctaaggatagtcctttgactaaaaagacgactctgaaagtccctactgatataaaaccttcacctagatagactttggtaagtggagtaattgtggattttgtgggttaattttattttaatcaagctacatgtactaatatttttggtaaaatgttgttcaagtttgacattaatttattattattgttaaattcctttatgtactaaaagctataattattattttttttttatcaaagaagaattatcattaatcaccaaattattacaagccaaattacaaactctacatccaaactacccaacaattataattgatcaaagtacttctagtatagtttttcctctttggtacccttccctctaattacaagagataatctagttttgacactcttctcaaaaatacaaatatctatgttaacccatatgttgtaaacaactccagcaaggagagaattcgtcattttttatgttcccaatttggtgagatttcgcccaacatcctgcataatcaatcagccagctgaccataccaagccaactctgaatcttttgtaaaactttccttgaaaacatacattctaggaattagtgtttatgacactcataatatttcataaacagggcattttgtggtttctaatgccaaattcatcttagccaaaacatctcttgatagctgatgagaattaggcttgccataagtagtgtagagatccacatttttcccatagggatgaggccccgcggggacccgcctctactggggcagaaattctccatctaaatagggaagagggcagagacgagaattattttttatcccaaaatattaaacgaggtgggaatgatgatgacaaacccccgcctcgacgaggatcccgttttgtactttatttatatttctaataattttttataatttataatttatgtttttattgtttttagtatattagtatcattttttatgaattttaagttgtatttagataataattagtttactgaataataattaatgtgtaatatttaatttttatgtagtttaacattgtatatatttgaatttttattataaactttattttcttatattaggagattcctcgccccgtccgtgcctccattaggggactccccaccctatcctcgatcgagaataagcggagatggagatcaaaatccttaacgggaatggggaccgggagagcactcctgccgattttccgcctcatatgcacccctagccataagacaaacctgtgttttggtgtcgctaacctacaccaaataactttgccatagtctacatttacatcattttgccgaaaaatgctcataaatttaaattattttaaatttacccatgctccctgctgaaacaacctcaaattgagagaagcactccctaagcttcatgagcttcttccaataccaactaacatcaaattttagcttattgtccctttaagtagacgttgttgacctatttaacccataacacatcatttttgaaagtgagtgcccatatgcattttgtcattgtcgccttgttccatttgggaccatcttggaaccccaaaccaccatatgctttcggtttacacacaaaatcccaagaggcaatatgtatttggctagtattccatctttctcgccacaaaaagttcctacatagtacctctaagcattactttttgaaaaagaaagtatatgcccatccaataactactaatgccaataagtaccgaattgaatagctaaacttggcctgcatacgaaagatgcctactagccctaaaattgagcttgattcgaatcttcttgattattgtctcacaatcattatacttccattttgttggcctcaattgcacttccaaatatttcattaagaaagtccctgaaatttcagcaattgcagcatttattgttatttttcttatccattaaccgctgctagaagaatatttgatttggcattgttggctacaagacctatgctaaactccagtatgacatcagctattactccagtatgacatcagctatttgttggaaatattttactaggatctagatttactaacgtgtatgtttgattataaaatctataatctaacatcttaaatatgaatttcctaagaataatcaattaaacacataaagtagtaatagaaaactttacattaatggcagcagaataaatatgactccttccgttcagatctctaacccttgatcctttctgttgcagagcatgatcaagatctgaacctcgtattaccttcaagtgataagaacgctacacaatcttccacactatcttgagtattaacttgaattgtgtgggtaatcactcattcactatagggttcaaaaatatgagaagaataagaaatgggattcgaaaatagaagtatctctctttaatttctatttatttgacaaagagtcaattagattatgaaaaagagctattttatgatagctattagggttaggtttagaatttaaaatagaataaaaaaaagttaaaattgactttatttaaacccttatggtcgaattccttagtgggcctaatgagtttcaatttcgccactttattaaaacttatctttcttttcttaaatgccatcttttaattctaacactataaatgtcaattatctatttaataattataattaattatcaaataaagttaccatttaacttatttattaattagattaggagtgtacgtcggtcagtctgatcggtttatactatattttattcaatccaatgt

SEQ ID NO: 193792 - DNA, 1533 bp, Cannabis indica
tatatatatttatatataatatgcttctgctccaaaaatttaaacaaggaaagatatattaattaaaaatgtttaaatagtattctataaatttgaagaattaattaaaaaaaaatgtcttttacaaaataaaaaaaaatgttagatagacttggtttacatggtaactagtctacataaattgattgtgtgactttttatatggcctggtttggtttaatttttttttttacttatagttagaattataagataattataagataagtataaattttaatttatttttatgttcaaataattattataggaagattttttttaatgaaaattactttaaaattaaaaaaaaaatctcttttgtaaataattttaaatcatgtacattactttaattttaaaaataagtacttctcgaaaacactattgagaaaagtcataaattctaacttctctccaaaaaacacttttcaatttttatctaaaaactcttaaaaaaagacttattttaattctaaaaactaaaaaagagtttataaaaagataatctaaacaaatcgttaaaccaattaaaaaccagttaaaaacaatcattgttcattctctaaacaagaactagcaaccttataagttataagtctacaaaaattgatgatagtagtaaattttaacactatttattacattatagaaaagaaaaatgatggagaattatggtaggaaaaatgctaaaagacattagtggtgtttaacactttcctatattattattaattcaactaaatatcaggtctcatataatttaatgtaataacttttagataattaatcgcaaagtaacatatttagaagtgctaggcactagtggtgcccaataacaatactcttgtggtagtgtaagactaacctctctaatggcagtaacctcagcatgagcagtaggatcagtgcatctcaaaaccatgttatgacaacttacaacaacttcatcattgcatacaataacagctccaaaaggccctccatctccactttcaactcctttataagcctcctctacagccctactcaagaatttctggtctctatcttctaataaaccaccacctaattaataacccaactcaactcaataaccaatcaaacatatgacattaatgtaaataattaatattataattattactaccttcttgttgaatagcaaaggcagaaacagctccacacttggtctccaacactaacatatttcatcacacaagagaaaatagtttaacaacaataacacttaaaaatgaaaaaaagaaaaaacagagaagggttggagttaccattaggtacttctctaaagcccatatccacaaaagcaagaaataatactaggtagagagaattaaggttaatgtttcttttttggtttggtatgaaatgaaaagtgaaagtaatatttatatatatagagaagagagtttgagaatgtgaaaattgtgaaaggagtgcatgtgaggtgtttcttcactacctctttatttt

SEQ ID NO: 193793 - DNA, 2439 bp, Cannabis indica
taacacaattcaacaatccaacactaacccaccatttctttcatcaatttctccaaaacccatcttcaaaatcctctcaaactcaccaaaaacccttcctttcctcacaacaatgtcttcattcaacaatcttcaaataccctccgccacaactatgatatccaccgccgcttccgccgccgccgtcgccatggtagtccggtcattcgtcagagaatacatccctcccgagcttcaacacctaatcttcttgaaactaagaaagttcacgagttcactctcttcccaactcaccctggtcatcgacgagttcgatggtcttacatataatcacatcttcaaggctgcaaagatttatctcagacccactaatgtcccttctgatacaaagcgattcaaagtcgttttacccaaaaaagatgaaaacttttcaatcacattggatagaaatcaagagattgttgactcctttaatggggtcaaactaaaatggagattcttttcaaatcagatcaaatctaagtacatttctagtcctggttctcgtggtccgtacaattggagtgttaagtctgagcttaggttctttgagttgagttttcataagaagcatagagatatggtgattgagtcttacttgccttatattttggagaaatctaagaagattaaggaagagttaaagacattaaagcttttctctttgaagaacagaatgttgagaatgagaggaggaatgaatatgtgggaagatgtgatttttgatcatccaatgagttttgaaactctggctatggatttagatatcaaagaagaaggtaatggaggatcttgagaggtttgttgagagaaaagattattataggaaagttggaagagcttggaaaagagggtactttgttttttggtcctccaggaactgggaaatctagtttgattgctgctatggcaaattaccttaaatttgatgtatatgatttggaattggcaagtattaggagtaattctgagcttaggaagttgttgatttcgactgcgaatcggtctatccttgttgttgaggatattgattgttctattgaattgcagaacaggcttaggaaagctaagcctaataataagagtctccatcaatctacaaaaaggaaatatgaggtaattattaaagtcttgttttttttttttttggtttcttaagaagtttatggacatgaattgtgagtttttgattcaccttgagtcaacaatgaaatttcttagcaagaaaatgtgatcaagaagagagctgttgaatgatttttagttagtgtaaagaacagagatgttgccatatttagaaaccttaaaaagttgaatgaattagcctttgaaaactttaaggttatgtttagaacttggattttagcaaggaaagaaaaaatgtaagaaaaaaaaaagtgtggagaagaaaattttgttgaatcaaatttttctctatgcaatttttctgtccataccaaagatgagattttatttagttatttaatcatttttttttccttactttttctttctccatcaaaatcaaacttttaaacatcacctaaaatattgtcaaaacttgatttttcatgttaagtgagattagaaagcttgtccaatcaaattattatatttatgagttcataaggtgtttttttatcaaaatacttaagttgaagttccatgcttgaatagaaatcctatgcattaattctttcaagcaattgcatattaaaatcatacctataacagtcttattttagattttatcacatttctcagctctcatttggtaaatttttcaggtgactttatcaggattgctcaatttcatagatggattatggtctagctgtggcgacgagcgtatcataatactcacaacgaacctcaaagaccgtctggaccctgctctaattcgccccggtcgtatggatgtgcatatccacttgtcacattgcaccccatgtggattcaaaatactagcctccaactatctagggatcacagagcaccaactcttctcggaaatagaacagttgatagagacaacaaaggtgactcccgccgaaataggagaggagttgttgaagattgaggagcctgaagcttcattgagaggtctaattgagtttctacaaatgaagaaaggaaaaaaattgtgatgaaagtaaaacatctcttgctttgattaaaaggttatagagaagtgaagatataatgaaatctatattaaattcttacatttaccaagttagacataaactggctgcttcttcagcttattttatgttcttttattttaacctttacactgattgaagacacaggatttttcttactaagtcaaataaagaaagtaaaaaaattcaataaagattaaagttttgtgtgtacagtagtgatattgaatttgtg

SEQ ID NO: 193794 - DNA, 2776 bp, Cannabis indica
taaacgtaacaagtaagtacaagcctcgatgagactttatactatggaaaacttaaaattatgtatagcacatcattcaatccaactcaatagtcaataccaaaattgaagaaactacgacattaaacattttattaaattagattgttttaccatcaccaaaaaataatttcttcttctttttttccttttttttttaattttattttctgttgatggtaaaataagaaataataacctaaatatttatgctacaaggaaatgttgtatgggtgccatgacatcgataaaaaacagttggtacataaatttataataaatgatttgaagtaaacaaaccataaattaaattcatcatagatattaaataatataacaaaatcaacggtggagatgaatccaccaataatggtggacgattcacttatagaagataagtggggtctcaccacacacaacacaacacaagacaggtttagttctagtgaagagggaccaaagttgacttgacttgacttggcctatattaaaccaaaaaaggggttgggcgtattctagtagttctagtagtaactagtaactagtaaccaaacccaacccaaattacctccaacaacaaaagaaaaagtacttataaaactctattcaaacaaagtggtttgttatgataaatatttatttcataacctatattttattaaaataaagaattgttaattggaatatctgaaactgatatggagtcaactgaatcaacagcaattacttaatgcttttttgtcacgtgttagttttattttctgttattccattcttgtaattctgttacagttagttgtcaatcccaactaactcctttgtaattactcagcttatgttaatataaaaagggatcttactgactcaattactcagattgatcagtatcattttccctctcatttcattcagttcctttcccctgttttctctctttctctgttctctttcaattgttcttcatggtatcagagctccatggccaacaatggcgatcaagatccatcacctcggccagctcctgctgtaactcctgtccaagaacctgcactgccaaacaacaatcttttgcctctcaatctcagactcgatcgatcgaactatacattgtggagatcactggttcttgctgcaacccatgcatacaatctcgatggccatatcttgggaacaaatcctcaaccacctcgtgaaattgcaggtaacacctctaaccctgccttcttttcttggcaaagacttgatcaatttctaatgcattggttaatgaactcaatgaccgaggctatgttgagccatgtaataaatgctcaaacctctgctaaaatctggaccacatttgagcaattatttgccacaagatcaagagccaggatactacaaatcagagggttactcaaatcgaccaagaaagactccttatctgttgatgattacattctaaaaatgaagcaatacagtgattctcttgctgcagctggacaatctttgacagatgaggatcttatactttacattcttggaggattaggtggtgaatatgaagcagtggttgtaaatctcacatcaagatcggaaaaactcactctccaagaagtccaattcatgctacaaaaccaagaaatgaggataaatcaacacaccacagattctcttacaaatgttcaagcaaatattgcaaatttctcctacaacaacagtaatagaaacactcaaagttacagtggtcgtggctataggggttcaaatcgaggaggaagaaccaacaataacaactatggtggcagaggtagaggcacaaacagacccacatgtcaactttgtgggagaattggtcacactgtcatcaagtgttatcacagattcgatataaaatttacaggcccttctcaagaacaaggtgcttcaacctccaccaccccacctgaacaaccacaagccaatctttctcaggccatcaccaccacaccagatatgtcctcagcttggtacatcgacagtggggcaactcaccacatgaccaacaattcagacaatctcaacacatccaccgattacaagggcaaggctaaagtcatagttggtaatggttccactatccctatcttaaaaatcggttccaattctattcatacacagtcacataatcctttaatcttgcaagatattctacatgtcccaaatgtttctaaaaatcttttgagtatttcccaatttattaaagataacaatgttactcttgaatttgatgatgtgtgttgtcttattaaggacaagaccaccaagcaagttcttcttcggggtaatgtccatcaaggtctttatcaactcaaagttctcacaaataagccacccctacactcatctgtcattactgaagtctcctcttccaatcctagtgcattcaacttcaccaccacaagcaatcctgtgtatgacaaaacaaaagtctctgatgtttggcattgtaggctaggacatccttcctttaatgttctagctaaagttcttgccacggtttcacctcaaatcaaatgtaataaaaatactttttgtgatgcttgtcaaattggcaaacaacaccatttcagctttaaaagcactcctaataaaataaagacttgttaattaccctctagttttaataatgctcatctaggtgagcattgtaattaatatgttaaggtgacgtttgagtgtggctttaacttttcttgatcaaaattaggtttatggt

SEQ ID NO: 193795 - DNA, 1188 bp, Cannabis indica
aacacacacctatctaaaattttgcacccccaatattcattaatgacctcaaatttaacggagcaaggtccataaactaagactagacaatgccaatctaacaaagatacacaatatacattgtcacataatttttacgaatcattattccaagaacaagctggtcataacaaacatattaaaatccataaggcttaagggggtaagacaccactccacttcaatatacttctacaactttcttttttaggatttcacaaacaagaaagcccatacttttttctatcttcttctttctacaaaaaaactcaatcagcaacaggttgctattgagctcttccttctacatatacatacacaacacacttttttatctgatttgaagtaaataaacaaaaaacgaggaagaataatacaatcctaacgcacccaaaagtacattaagcttaactacctgctgtaataaggactctaagatctcctccaacacagtactccaaaaccagccacaagtgagcagaagtttcatacctggataaagaaaattgaagaagagggcacaaacaagttccaattgacataatccagtggttaatcccgataatacgtcccatacagaagaatatgtattaacatatatatatatagacacaaaattgacaattcccatagcaaggcaacgtaaaacaagaactcaccaagaataaaacttcagaacattttggtggtctagagaatgaagaattctgacctgaaagtagtaaacaaaacccagaatgattatcattaaaacaatcaaaaaccaagaaaataaatctgtacgaaaagaccagtagcagcttacttcttgaagaaccttgttcttctgcgatttatcgacactttaaatggcgtaatactcaatggtcttcttcttcctccctttatacacagtctaccaacaaacaattcaaatacaatcaaagacacattcaactgaaccatcaatcaaccaaattgattatcgaaatttcaaaaaatctgagagagaaaagggaaagggcattgttaccgagcattttccatgtccgatggcttcgtaaacgtggtagtgattcattgaaagactcaaccgagacacaaggacgagagaatctagtgagagagaaatttagagagagaatctagtgagagaaaatgaagagattt

SEQ ID NO: 193796 - DNA, 1331 bp, Cannabis indica
attgtgtccacgtggacaagccaacctggcatttaacagctaaatttagacgggaatggtaaattgctaacagaatagtggttttggggatttacccgcagaaatttaggttgtgggggtttaataaaaccaaaaaaaaagtattaggaattttaccgccatttatccataacaatatgaaatacaaatcgactagactgcgacaacctgaagaatgagagttgaaaactaccactaggaaaaactataaataggaaaggacacaccacagcttaccgccttaagaagaaaagtagagtactttttttatttttacactttcaaaatatttttttttattattatttttataaaattctgcataaaaacttttattgtaactaggactagcctaaatcataacaaaaaatcgtataaactttttgttgcaactatctctgcaactaccttaaaaactcaaatcaattttaaaaacaaaaataaaaaaataacgaggtaattcctcaagaaagaaacaagtaccttgtggtgtatcgaacatgtaagggatattaagaatcttaggtgattcaacatgaccctttttaaactcctcaactgtcctgttattacataaatcacaaaacttatataaaaatactcataaattaaatcaaagtatgaaatcaaaaaaaaaaaatattagaaaaacccccaatttagatgtctttacctaacatcaagatatagatggtctgaattgataagtgccttggctgtttggacatcaatggtagagacttctagttctgcttctcctgagcttgagattagaaaaagaagagcaagaacaataataccaaaccaagaaaaacccatatcaaaatatgaaggaaaaaaaaaaaagagattattttaattctgctgatttaatgagtaaagatgatatatgtttatgcagaaatatatatataccttgccatagggaataaattatggtaagagtcaaatttggttggtcatttagtctgaaaaggaaaacattaatcagcaacgagggaaaacttggggtgcagctgttttgggattctgttattcagatgtggatgatggattaggttggagttctaacttctaagcattatataatcattttaagttaggagaaggctatattacacgtgtccaacatgtacgaaaaattataatgcagtgtcgactgtccactaaggtaacactttttccttttttctttagttgattttaattattgtttgaaaaaaaaaaaaacaaaggtagcattacatgcatggtttaatttagaatgggaactcatatttattaaaatttaa

SEQ ID NO: 193797 - DNA, 1693 bp, Cannabis indica
taaaggggtcgaacctcttcaaatctgatattctttattgcttaatttttttttgctttatttttattacatttctaatctcttcataattgactcattgtcgttgactaaaagtgaggtcaacaaaagaaaaatttgaagcgtcttctgggaacgtggtgcctcacctctctggtctcgtggtgccaaatatgtctttcaggctcggtttcctgaaggcggaagactttgctagagtgaaactacaaaatgttccgagaaggtaacatctagatgggcttggcccgttttatcttcagtaagggtccaactgataagtcttgaatgtttgtctgggttcacgtgtccaataccaaaaatacggataacatgattaatctaagtgaagctcaaacatatacccttatattatttttctgcttattacctttattatattatgatatatatatatatatatattcatcagcaatagatatgatttcattttataggtctttgggtacatatattgggatgctcttttttggtgagcatggcttcccttaattcccaaattttcttgccaagtagtgtttcataagtgatttatttgtgaaattagaaaaattagtttctcttttctactttaataatcaaaaattataattcttttgttcttgcaattcaagagaaatcatccaagacaattgtttattcattggctttatttggcattaaattctcaaggcttaatgatccactccctcttgccagctagaagggattcttagaatttgttggcacaagaggttgctttcgatttggatcaaatacaagatgctgagtcaatccctactttgatatcacctttaaataatctttctttgtgtcccattgctcatagaagagtattggaatttcaaagccatggaaatatattttggtcgattggtgatgagagttcaacacagtggattaggatttttgttgattggtggtaacttccttttcaattaaaacaccaccaagtttatttcgatggcttcagaacagtttgctgcttggatgcaattttgctaatttaatgatcttttaccattaatttttgaagatggactaatgcaatttgacttgcttccttatgatgtttctttaatcttacatgtatattatgttgccacttataatgtgaagtggtttaaaaatatggtattatttgaagaatggcagcagtttactaaggttttattcctatttcttggagtccgtataaattttcgtaccagatatgcatgttatatatatatatatgtttgctatcctattctgcttaatttttgttgaaaattttagcctgtttatcttctttgtcatgtttgacactatcataaaaattcaaagagtttgaaacttgaaggaatgccattttttttttcttgcttaataaaagaatgtaaatttgatatctatttcatgctttatataggcctaatgcatataattaaatagaggtgttttgcacgtaatattaacttagtatttatataaaaattataaaaattgaataacgctgggcaaagtacaatttaatttcttaatatttatatatattaaaaactaaacatattattccaattttttttttgtcgttcctaacatggtttctaacaattagattaataaagtaaaaataattctattaaaaaattaa

SEQ ID NO: 193798 - DNA, 699 bp, Cannabis indica
ccaatatcattaccagctaaaattaaacgttttttttttttttggcaggggagctagattaaacaacttaacagagtagatttgtggatccacctatcaacattagctatgtaattcttatgctttactgcaattggtctaacatttttactaagccgtgaacacacgacatcaatccaatcttacaatttaaaagctttgctttgaaaagttaattcttggttgatgaaaaatttgaccctcgtggagattacacagaattatcataacggcgaatttctatcccaaaccacacagctactttttagaggacgaaataactggactgacacttttcaaaagatacatgaatgttggatgacctagttttgcaaccatttatataagatgtggaaggatgaggttgtaagatattagatttaaaatatattgattttccaataccggaaacaaagaaaaattttccactagtaagtagtaaggtttggaatcataagaaacaaaactaatttccactgaagtagcttactagtaattatcagaaatcagatcacgcttgcagaataagtcttctttctaaattgcactaagagtgtaggacgacaaatactcttcctcaacagttcaataaaatgtatttcagtgcagtattttaagcaactagaatagtatttttttcgtggggaattaacccatata

SEQ ID NO: 193799 - DNA, 2161 bp, Cannabis indica
tatgttaaattttaagagcaaatattctaactagtctttttttttttttaagtaaatcttagtaagattaagtatgaaaggataaggggatttctttggcttggtacttaagtttaaaaagtttaatagcattttgaatgcttgaattacattgaattagcctcacctgggaccatttagaatgataaaaatttggaataattttgaggaaaagtaacagacaaaagtttcagatggtcttgcaacataaatacaatcgataggctacttgttagtgctagaatgcattttttcaacattccattatgtacttattacacacttattctaatactaaaaacctgaaaaaccaatataaacctatatatattgtatttagccaacatatcaaattgctagaataccaatcaaactcaagggggaaaaaatcaaagcaatgactttatgctttgtacgggcaaaaacaatttatgaacaaaaatgcagcaacaaatctcaaccatcgaataatgcagcagtcaaatttcctactctcaacccaaccttagttgaaaagtgatcattagccctggaaaaatatgggactattggcttggtttgaaaccccacagatatcatggcatcaaaagattcctttggatttttgggtttacttgatggaattgcattagtggtccttttgtaggaaccaaaccactttgtcttcatatacccatgtttcctccaagggggtattggcatacccttggctttcatggactctctaattgcattgctcattagtctcacaatctgtttaagttcatctactttcccaacaaatatgagtgggaaaacctcaagtaatgaagtgtattgatcacttggtcttgctatttcaaactctcctactaagaatgcttctacaatgtagcgacttccacttctttcttcatttacatcaacgtattcataatcccctgctggaaacctctttgatttatcccattttgacttgcaaagtcctacaatacaattttcctaaacaagattagcacacttaaaactaaaatttcaaatagaatcattatatatgaattagaacattatttaaaatattataaaattaaacatatataaacctaccagcatcgaagcccttttcacgcaaatgagtcatcaaacggcgtttgaatccttgaaaatcaccattatcagaagccatttcataaacaatttcagcttcagcataaatctttctcttcaaatcaccatcctcatcatcgtttacaccaaataacaaattcttaagcatatctttcctctccaactcatcagaccaagaatcaacatcagaaccttcatgttgattaattatttcctgatcaaactcacagccatgatctccactccacgcttctttttcaatgaaagaatttacaagattcgacaaatcagtgaaactttccgccggagagtgttcgctcccgctgctctcgcaaatccgtacacgagaaacttgctcgtcgaaagccgctgctactctcggaaacattattggaattctcaccattttcaatctaccctttttcgatttaatctgatggctcttatgtatagaggaaaaagacttttttttttactatttcaatagtgtcgtcattatatggtcactatgttataatgagagaagaaattaaaagtagttgtttgaagaatggagaaaatatgacaacagataatattgagaagatgatcagatgaagaaactaaatgtctgttgatttgtattatatttatagtgttcacggttctctatgtagttattccaccaaacaaaatcttgcaatgcatttgggcttaatttggctatattttaatgtatctgtccatttttacgtcctcattctttattcctaatttgtttttcggtgtgatttttaacactaaaaatggatattatatttgtcatagtaataaatataatgttatcacttatcaattgtgtgagcaaagcaaacgaattattgtggaaataagtgaaaaaaaataaattaaaattaaatacattcattttgggaaattggaagtcagtgttgttgtgttgaccgtgtgcatgtagtacgagactacttcatcaactaaaggataaatgctaaggtgcctaataggtgtcatttac

SEQ ID NO: 193800 - DNA, 1885 bp, Cannabis indica
attcttataatggtgttgtaagttaaaataacgttattaaagtaatttaatattaagtcttatttattttattttaataaaaattatataaaaaaaaatactaactaatactacataataatagtaggcaacttgatgaaattactatttgttttttttatatttgagagtacttaaagtttcaagaggtctaataaaattccccaaatgataaattaaagtttttttttttttttttttttaagaaaatgataaataaagttgaataaagtggttgaagtgtttttttggggactaaaaaaacccggaaaggaaggagtttccttgtgaaagacgtctctgtaagaagaagaaagtctataaatagctcaagcatttcggttttagatccttcctcttctcctcctcctctctttcttcttattatatattataaaatataaaaactccatcattttctggtgtttcagtttgggtagttatattttcttcattcatttcccaataactcaaactcgatcccgccgctttcttcatttctacgttttgtttatcaggtaattattattaccaaaatcttttccttattatttcaaacttcctataccaaaagcttcttacctttttatttttttctttttctctcatatatatattggaagatttatagcttttgtataatttatatatatatacataaatatataaaacgtcgcaaacgtggaggttgtcatgtttgtctggtttatactatatatatatatatctgatgggattgtttttctggttaaaaatttagtctttcattaattatttattaagctatgattatatgtatattgattgattgaagctagaatcaaatataattttcttcattgtttgttgattgggtaaagtttacatttttctttctttgcagctactcataatattacctcttatatatatatataaagttcaaccacctatgtagagggtactctactaatttgtccttttgatatgagtttgtagtactctcacttctttcattgtatatatttgttttcttttcttcaattaaaaaaatgttttggggctatgtttgtttaattcggtggtggttgtaatgtcttgtcaccacacagaaaatatatatattatcaattgtaccttttttctttttaagtttttgaaataatgcaattttgatgtcgagaactcatgttcagatctacacgaatcagtgtacatatatataatatatatatgtatttttcttggcccacaatatgagttgcattgcaattagttttatttttttactttctgtttttctatgttctatatctatgtaaatatatatagtccacatatatattatatttatattttaagtgcaaatctaccagagaagaggaaatcgaaactatattattgttattattattatatctttgtgtaagtgtaatcgtgggtgatgtaaagtatacgtggatgaaatgagaaatagcacaaacatatgtatattatttataataatgtatatatatttatatatatgttgttgtgcttgtttggacttattggaattaatgtcgtatgggcttgtaaacaatttctactttcattctcttaaatattatgaagccattttctagaaaaaccatttttggcaacatattttgaaacttctatagatctttcattactaactattattcttataggtgctgttttactcagtccccaaaagcttattatatcatcgtcgtcaccaccatgggttacttgctataaatgcattgtagttcttgggatgagaaggtacatatacatatatacatatatatttttttattattgattggttggttgggtttattattgagtgtgttttttt

SEQ ID NO: 193801 - DNA, 2268 bp, Cannabis indica
aaaaagcaatgccagaatctgaccagcttcatgcaccatgtaaaaagaataatctctaaaagatttttgaatttcctggctgtgcttaataaaacagtttaatcaaggagatgatatctatagagacagtatacatatacaaatagcaggaaattataatacaaaaagagatatggagcaaagtactgacctcatattttgagcaatgaacccatctagataatgctgaccatctgtatttaatacaacataacaaaaataaatttatcgaaagtaaaaacaaaaattcagttgctccattctaaggttttgtataagtggacaataaagatcatttccatatgatatcctcttagggttcagaactgtgtttccccaacagctataaaaaggaccaccctgttcggtccttttctcatctaaaaattaatgtaataacaatacatagccactgaacttaaaatcaactagccatcaccagtaagcaagctaagtagaatggtttaaggccactaacttgcgaggatcgtagatagtcacagtacggtcagctccaccgattgcaatgttaccagttgaagaactgctgagagcataatatatatcaccaacagagccacaaatcctttgcaggcaaccgccatttgctttcattctcaagtcccataatgtcagctacagtaaatttgccaaaggaagcaaataaatagcaaataaataaaaatctaataagcaagtacagataacaaagctcatgccagcatttagaaacaatgtaatgtagcattttacctggcaaccttcagcaacagctaaaatattacttccactcgcattacaagaattatgcatgaagctcacggctgatggatacaatagcctgaaaaagtggcaaaaattgattaaaagaatccaaaaatttgatggaactctgtctctactctgtctctctctagccacaaaaacaggagaacgttcatctttctaataaacagatagcgaaagcacaactaatatgtattctggaagtgatcaattttccatttttaaagaaagaaccatcccaaaaaatcatattccaagaacatcaagaccatgacacaaaataaaaattacaattgacgagtgaggcgacaccttaatgccaactaacataaagttcagtcacattagtttgattgcagaaaatccatttatccttttactaaaccccatatcagcgacagtgagagcaagaatttcatagcacaacttcataacaagaaaatatgtgatgcaatcatcttaagacagctttctccttttagaaatggttgttcttaaaattgtctgtttctgtgattctgaagtgcactgccagttaaagtgaaacaggagcaacaaaaaacagcaagtaatgtatgaagttgaaaccataagaagaaacctcatatgacttacgtacgaaaagttcggacatggatgtcctgatcataaacatcaacagttttacaaaagccacgtgccacagctgcctgaaataaaagctcagtcaagcatagagggtaacattcacttttacccaaggttcttgagtctggggatttgcctatgcttttgatattacaataaaaatttgaacaagaaatttccagcacaaatccaagaaactatttatttatacaattgatattataatcaaaaatgtgaacaagttcatttcaaagggtcaatatgtttttagcctttacagatagataagacataatctataaactagagctcatctaggatttaatatattagagcaactgcataccatagacagttggtttggactaaagcacagcccagcccaactactctctcttataccacaatcacgaggtgatactgtgtatgttagcctatcaacatctgaagaattaaatgatccaaataatgtgttagcactacaattcacaatttgaatcaaatgtacaaaaagacaggctcaattagtatgaatgccattttagccataaaaaaacgactatcattttagctatactgcaagactaagtcgtgcataaatcaagcctacatagaaatgtattctaccaaaataataaagaaggcaaagcctattctgcctcccgtgaaacttcatacaggatcaagtaaatctaaattataggagaaataaacaacagacacaagcttatgcatataatatatatatatatataaatatatgtatacacatacacctgcatggggtgcttatatatcatcacttagcatagttct

SEQ ID NO: 193802 - DNA, 3389 bp, Cannabis indica
aatttatgtagttatttccagagtaaataacataaatgggagaaaacataagagcaaaaaagaaattacattaatccaaggcaacaaccccattgaagcccatattggccgtaatcctctgtaataagcaccgaaaccgcattccacaaccgaattcctcacagtttgaacaattgtgagtggccttctttgcccatttccctctccatccaacacttgcagccttgttttgattgtgtcaagtggcatggtaatcaaagcagaaacaccactagccattgcagcacttagaccctgcaccaccaaggttgctcgggaaaggcctaaaactactactacaaccatggattgaaccattctcctctttcttcttcttccccatacaacaaccaaaaccactccaaatgagcctgtgtgcaacagaatacgaagcccactaaacaacatagatggtgcatatgtcaatatagatatcccaaaacctgtataaaatcctctaaagctatctgagtatgattttcctaaaagcatataaaccattggtgtaactatagctactaacactaggaatagagttgaactctgaaccatgagtctttggcttacagcatcaattggggtccaaagtccaaaccaattgaatagccatagctgaactcaaccctgctgcagcattagctgtagtatctgaatatcctaatctaacagtgactgtcccaacattactcttggtaacttcaaggactgtcatgtagagcgctctagctgggattgttcccattaaagacgtaccaaaacccctgtagaaacacccttcatggcgcatgatagcaaatgacatcttgaagcatgagaaatcacattgacacacaataaactcttgatcttgaaagattgaaccaaccattttaacagtttagagcaactgtctctatgtagcaacaaaacatcatatgagacattattaaaatcttttcaataacgagaagaagaggattttctccataaaaacccctgccttggttgaaatatcataaacagttcttgtaggctgcactatctacctaatacacaactagaaaacaactcgcctaagccttagccttagccttggccttagaaatatatgcactatcgacctaacacagacaagtttcaaacatctaagagctgagacaatgaaagaggagggaaggacgggaatttcagtaggccaaaatggatagacaagatctggaaatgagaaatcttttccatctgtcttccctaatatacatgaatattgtcaaataaaatgaacaaaaacattgccattgatgggatggaaagtcatcgcaaccacatacttagacttgttaaaaccattacgcttcttctcaaagtcatgaaccaaagtccatgaggtggtcgtcccatcaccatcaccatcgttagtagtactgccatttttgttattaccataattcaattcccatactttcccagtcagccaaccctggactagttcaagatggacgcttttgcctctcatctttgggaaaggctaagggaaattgaatataagtgcaataatttggatcctgatgcaatgagcagcccttccagacggcggtacatcggagaacagatgggctatcatcgattcggatgaataattgacacagtatatcatctgaaataagcatcactgccgccatcgcacctctcctcatcctcgcctcttctcttcttttctttatatctatgtaaagacttttttttaatatttctcttatttctcaaaaaaaaaaaaatatatccttatttcacatatttatgaagtgaaaattacacaaaatatgattttttaaaactttattataaaaatatggtaaatttagatttgaccactttatatggcatcttttaatttgtagacttttttatggtatttctacaccatatatatgtaaacttattttcaaaagcatatttaatatttagataaatcatttcaggaaaaaagaattatttttaccatctctttctttccttctcttaccctacctctctctccctcttgcttttgtgtggcgttcctgtccaagctccgatgagccatttttcgccagtaatgagatacaaggatcttagaacattattttggcgctactactgacattgaacgtatcctttctatttctcttagtccttttccaagagaggacatgcttatttggcatcattcggacacggaattatatactgtcacatctagctaccacttagctgagagtctggaatctatgaatgtgcaatcatcttcatcttctaatcgtcaatggtaaaaccgattttggtccctaaggctgcccaaaaaaattaaaatctttgcttggcggttcataaacgatgctcttcctacctccgtgaatctagctcataggaagattacttctctactgcttgtgcactttgtacttgtgcgtgggaattagtaggacgcacaatttttcggtgagattgtgcaaaggctgtgtggagaaagtttcatttccatgtatctatgccgaatattggtaatattaaagactgatattttctttcacattgctgctgctcacaataatgctgatttagagaagattacatgtctaatgtggtgtatttggtctgaacgaaacaaaaaaaaatacatggtaccaagcctaaaccaaacattgagatgttaataaagcagtccatgctttagctaaatttactcggatgaagatatttcttgattaggggaaattccctcccgaatctactctgttgctattaatgactctcaattttaataataatatttttttctacaaaaaaaactatctacataatttataaaatagctacataattttattttaaatatataataaattattttttatataaatatctatataatttatattttcaaatatataataaatttatttttttatataaaatatctacattatttttatttttaaatatatataataatattataaaattaatattctcttaagtaattgacatattctgttaaaattaacgtaaaaaattaaaaaacacaattaaaataaaaattctgttccatagcacattttatatagaatagataaatatatttaaatggacatgattttgtcgtgattgtaattttacggaatgtattccgtgatgtacggcagccgttaatttaatgtaccctaacactcatgtaccacggaatacattccgtgaaagtagaaacaaaatggtatccctattttatataatgcaatgaccaatcgaaagaaaaggcaaggattggcaatataacaaaaagaagtctaactgatatatcaactaacttgttatgtgattctaaatttaaagac

SEQ ID NO: 193803 - DNA, 1933 bp, Cannabis indica
ctcataactacttgactgtatcagtaagagtgtgagacagaaaaacgagatatatatttatatacatatatatgtgcatgtttggacaaaaagttcatatggtcgaagacaaagaaatttattaaatgtcgttatgcttgtactatatgcatatgcatgtggccatatgtccatagatattatctgaatttttgaattcaattattgctaagatcacatgatcaaaatttaaaatatatcattaatgattttgaatttggatgagcatatatatataatgcatgagttcatgtaatttcacaatgaatgatctgctattttatcccacaaaatcattttcatttcttcaaataagtaatttgaatactatgttaataatgcaagttactttttgacttaacggcaccccgtcgttctcttggtatttcgtgatatccattatatataaaaaaaattatagcatactattaattatgtacactacgtgtacataaattacaagagtgtttgattaattgacatgaaaagtgagtatatattgttgctaatgattaattaattaataggatggaaactttgaagttgagaaccaaaccaggaatggcaaagcttctaggcataatagtgtgcataagtggggtgtcttgcctggctttctataagggcccttctttcaatcactttttgcatcttcaactttttggtgtccaccataactcccaacatcgtgatcagtaccattcatctggaaattcttggatcagaggagttttcctcatgctcctttcaaatttcttctggggcatatttcttgttttccaggtacgtacctacgtaacgtattatatatagtagttagatagttagtgctaattttgtccggacatgcattttagtataaatattattgaaatgttttattcgtgacgtaacctaagcctaatttgtttgtgattaaaaataaatatacaggtgcaattgatgaagagctacccttctaagcttcttttaacagctcttcagtgctttctgagcactgttcaatcgtttgccatagccattgcattggaaagaaacccatcccagtgggagcttggttggaatgtcagactccttgccgtggcttattgtgtaatcactactcttccttctactacatatattgcttcttctttctttcttataaatattttgagaatttaaaactatattggaaaaagtagaatagagtacatgctaataagatgtatgttatatatatcttttttatatataaatatataaaataagtctaaaaaaaataagatgaatggcacagggaattgttgtgactgctgtgacatattacttacaatcgtgggttattgagaagaagggacctgttttcctagccatgtcaactcccttagctttaattattacaatcttttgttctgctattttcttgggccaggccatcaccttaggaaggtaatttctaatattatttttactcttattatttaattaatttgaatacttcgcttatctatcttccttttgttttatgatttacgttcttattgtaaactgtcacgaatattttcaaacattctttatatttttctttcctaaagggaataattttacatcattcagcatttttttcattttatatctactaattttaatttattattattattatttattttgcggggagggatggctgtaggtaagcagtattaattataaataccatacagatatattatgaccacatttagataattatgataaaaaatatttttatttacttaaaacaaaatttataatcatttttattaaaatttatttgatgatctcgggacttaattttttacaagaagtatttagcaagagtttttttttttttttttttttacttctactacttttagttgtttaattcatc

SEQ ID NO: 193804 - DNA, 753 bp, Cannabis indica
ggatctatatctcaatatccaaatccggtaacaactcaatcaaacggcagagtcagaaatgagttgaaactcggaggacattcattttacatcttcgaaaatcttttaatcatctttattaggagttaaaggatatcaataaataaataactctactcatttactcaaaataattatttggtggtgagacactgagactctaaatgagtaatgactgagtgtgtttaatttgggaaaataattcacctcatttatttagtcaattcatgcattattcattttggtcaaacttttaaggtacaagaacataatgatacaattaatactgaaaaaccaaagctcttgctcgtgaaattcaaagaaatgtggagcgtcttgattggttcacattagttattgcttcaaattatagaccatattaaagattataattcacttttatttattttattaaaaaataatataatggtcataatagatagtttattttaaacagaacttaatgcatgccagagatagaaaccatttgattaattttgtggggacgatgatatacttggccttgttaaaagggactttagggcatcttttgtgtttttacgtatcttactttattattcaaactatcataatgatgaaccaaatcattacttttttattttagatatttaaaaaggtatacaataaacatgcaaaaattaatccaatcttaaatgaaataacatttgctctcttctcttaactctacttgcc

SEQ ID NO: 193805 - DNA, 2529 bp, Cannabis indica
cgataatccatcgctcaaaattaagtgtagttagcctagagtaatcataggatgggtgacctacttggaagtctttttaggaagtatgcgagtgaagacaaagaatattagaaagattcgtggtgatttgtaaggccaattttcattcttgaaagtagccaaatgacttacacatgtatactgtgtatatgtattagactacaaaggtgaaaaggggtgttacagtagaaatcttcaatacgaattcttacaaaagaaggctttgaaaaagaataaacaaaaggagtctcgaacatgattctacatgcagaaagatatgactaacaaatatttctatgatttaagggattaccaactacaaaaaaaaaaaaaaaatcaatgggtttcgtggtacatgagccattaacacttcaatattcacaaataaattctttgaaattgagaaaagataaaaataaatgaaaataaatgcttttttattcattggagataccaagcaaaagaagacgagtcatggctatggccttagaaagtttggacacttgcattattttgggaccttaaaatatcgaactttaaatgttcgggggtaaaaatcttaattagctcaaaattttaaagttcacatgatttggcatatatcaaagttcgatattttaaagaaatacaaaacctatatgtttaattgtggtcccaatataataagttacaaagaaaaacaatatagaattcaaaaagtttgtgagaatgaaggaattatgcatatactttcacaggcgaatatgcatctaaattaaagagatttaaaaaaaatttaatagagacattaagatttctcatggagaagggtcttctaaaaacattttggggagagatagtaaacactacttttctcaacaaatgtgaaaccaaaattgtgtagaataagacactgatccaagcttggagtggatgtaagcaatcagaaaagtatcttaatgtgtcttgattgtgtatcctacaatcatattttgcaagaaaaaaagggataatagcagcaaaactacccaaaatatactatttgtgatacttaaccgcacaaattcatttttttagtggtaacactctccaaacctgacttctgtagagctcatcacttttttgtcaaaaaattattaagtaccaaagtggatacgccacagtataccaaatgtacacgtgaaagatatttagtgctccaaatcattttaacttcttaaatataataaaaattatttaaattaaaaaaaaaattacaaaatacatttttttcttcttcttttttcttccttctacatttgacatctacatttgacagtcacctctcacctacacaatccacacaaccatgaccattattcccataaccaccacactaccaccaacccaccataaacaccacacaaataatctccaagcaagacaaaaaataacccataatcagatctggaaaaacttactttgaaatcctaattaaaaaaatatcaaagatccaaatctattagcacaattacaataatattcagaatcaaaagagaaaactattaaaaaataaataagagagagagagagagaacagatctagaaagagggtatgtgttttgagttgtcgtcggagggtctcgaacctacactggcttgacggagactctatcttcttctccgatcgtatgcacttgttgtcatcgaagcagcaatgccgaaagagaagggagagagaaacaagagagaggagggggaagaggttgattaattaaggattttgtttggattgttttaatccgcatataaatttctttcgattttgtgtgtatttgtgatagaattgaattaataacttttttatccctattcaataattcaagggatccgtggtgtgttgtaggagatttaaacaatgtcttaagccaaagtgacaaacgtggaggacaaccttatcccaattggctcatctccgggttcgaacaagctattatggagtgcgacttatttgatatggaattggttggttatccttacacttgggaaaaagggaggggaacaactcgttggatcgaagtccgtttggatagagcacttgtttcttcttcgtggcttcaaaactttacacaagctcggcttttaaaccttgaagtttctccttcggatcactcgccaatttatttagagttctttactccggatagtttcattccaaataggcgtttccgttttgaaaatgcttggttaaaggaaccaatgtgtttggagattgtgaaggattgttggaatgcctctagtgttgcttcggtagcagagaagatttcttgctgtgcggataagttggccatttggggaaaaaatgtaactggtaattttaaactccgaatcaagaactgtcgtgatgaactgaaaagcttgaagaacaagagggatcaattctcggtacagaggtataatgagaaaaaaaaggagctgtttttggtgttggatcaaaaggaagcattttggaaacagagggcgaagcaattt

SEQ ID NO: 193806 - DNA, 2216 bp, Cannabis indica
tttatgacgtattaaatggtttttaattttgaaaaaaaaaatgtctttttggtttttaatgaaatgcttcaataagtttgattagtttttttttcttaaagctaaattttgaaccattttgtttaaaatgatttcatttttgtggataatgagattttttatgttaggttattgatgttttttctttcttaagaacaaaagctttggtacaatgttaatttaactaattttaacttttgtatgtttcagggccatcttcaggcgattcagaggcctagggcgagacttgaaaaaagatatatttttttttataaaaattagaaataaatattaattaaatttaaaagttttatatgaaaaaatataaattagtattttatttacaaaaatacctccataaagtgtggacaacaattttatctataatgtactttaattaccaaaatacctcttacactttcacttacacacactatatgcatgtcacctcaaaatgcatgatcttttccttctttttttcttcttatcatttttaattttactttcagttttaagttagtgttaagtttctctttccatttctttttcagtttttcattaaaaaatctcattctttccccacgattaaaacccacgatcaaaacccactctgagtaatatctatctccatattcttcatccaatttccaccattctcattcagttttttatatgtatcttttattttgtgtatatgatggccattacctgttcctctacttctccatctccattgcctaaaaaagcttgcaaaatgggtcttcaatcagttgctaacaagtgaaaagggaaacgcccagtgatcgacgatgatgactataattttgctcccccccttgttaaaggtgatcgtcgaccagtgaagaagaagtcgaatgtttcttttcctgaaaaaaaattctaactctgatggtcagaagggaaagaaggtaccagatgaacttcctaaggtttgtttgtagtttcgttttagttttatccctaattttgaaatttcatttatttttgtttttggttcgtttttttgttcttatttcattttagggtttagttgttgttgctgttgttattttcatgttttttttatatttattttatgggttttcaaatatgtaaacaattcaattcatgttattagtttgtgttctaggtactttgttctatttttggggtttattgttttatatatatttgttcatatttcttattttttattgttatttatttttttttgtttttatatttttttgttgatcgttggtgttaggccttatttttaacaaatttttatggttggatctgagtggtttgtttgtagtttcataatagttgtatttgcattgttgtttggatatattttccatattttactgttctcatttactttttttttattctcaggaatgggaatgcaaattccctatttctaatcattacaagccaaaagttttgtgtacttgtaattatgaattgaataagaagctcaatgagattctttctccgaatgtgaaggccttatttcggtctatacaagttggtaaatttttagacattctgtcttttaaattttacccttaaattgtacatgaaattttattgagagaggtccagcagtcgaatgccaaggaatttcaggcaaatatttgcggtcattgtgtgcgacttagtgttaaggagttcgtactcattacgggtttggattgtatgggtgattgtaataaatctgagtttgttcaaaaatcaatccacattattgactcatgcttctgtggcgttaaactgattactcaaaaatctgttgaagatgttgttttgggttgtatgttgagagatgatgatgctttagctttaaaggttgctgtcttatattttgtaccctgttttcttcttagtaacacaaaggatataaagagattagtcaggctgatgcaaacaacttcgttctcgtattgcaagaattttgaattagaggagtggtgattatcttggccaggatactctagctttgcaagatctgacattgaagattttttatttaccccttaatattgtaagtgttcagtttgcttgcagttggtttatagttgctctgaattttttttttgttgttatatttattttttttctattttttttgtttttgtatgttattgtgtatggtccaagtgaagaacccg

SEQ ID NO: 193807 - DNA, 1193 bp, Cannabis indica
tataataatcatattctaccaaactaactatatttcgtttaacattttgttaaaattataataaattgaaccttattttttaaaaaaatggtagaaacaaatacaaaaaaaatgcaactagtctaattattataaccatcaagttattattaagttttatcattcaacaaattgaaaaatagtaattacccaaaacaaactcacatcaaatattgattgtaaatttgtgaaattattattcaggccagtttcaggtggatctatgaacccagcaagaacattaggaccagcaattgcaagtagagagttcaaagggctttgggtgtactttataggtccagttgcgggaacattgcttggttcatatgtttataaggtcattcagttgagtgagcgtaagcccatcatttctcccaccttttcgctcagacttcgtcgtatgatgagcactactactactgacactccccaccttgacaacaaacgcccatctacttctgtttaattcaaataaaaatactatttattagtatgtttgtttggtttggttgtttgttaattttagtcaccaaaaataaaattaattaatgactcggttggatcgatcgatcagtgattaattgtatgcatgtgtttgaaagtgatcacatatattgttgtatattgtgagtactgtttctctagctatagcttaattataagaatctattaatgctttaaattatgtgtgtaagatcttgcgactgaaaggtgtaatatatatatatgcatggctacaaatgtgaataaagactttctatcgaaatttcttcaacactatatatctctattcttgtcatatatattgcatagctataaaaaactttctaaatctgcattcaataatgcttttatttgattttctcacaaaatcctaattcctaaagactacagttcattttagaaatcaaccaatcttagtcgaagatttatttcttaaaaaataaatctatatcttctagttttcccaatcaaatcgctataattttgtattaatggttatactctcctagatgagaatctttatgtcaaattaatttgaaaaattcctttaaattaataaactttaactatatatatatatatatagttccataagagtatcattattagttattagtattaatgttgaacagtatgatcaagaaatgaca

SEQ ID NO: 193808 - DNA, 3150 bp, Cannabis indica
caaaagtgagtggtggtctatcatttccccgagtcccaacaatgagtacccacattgtctaaaagaatcaattctcatggggatggttttcaaaggtggtcagcaagattacaaagcagacagaaatgttctattgatttttcaaaagcaccatataaaggacacatggaattttcaataatcattctagaggcaatgtttgcacgaactgaaagtgcttcaaataagatacaccatcaaagtacgttatgacgcttaaggattttggcattctaaagttttgttccaaagggtaggagagaccattcaaagaggagcacaattcaaagcttgtatgaggtagcctccatttagtagagaaattaacatttgactctttcatatctacaattattctaagtaacaaaattatggtatttgaacgtgcataaggggaaaaaaacattgttaaattactaaactatagtacttttgaaattgttgtcaacatgcatattatacataaatattgggttgaagagagttattaaaagtttgtctttagaaaaatgatgtagtaattttgtagagaattgttaaacaatatcattagtgttccacattatttaaggtaaattatattattatagtataatttaataaaaaagtttaaatattttaatttattgattttatgaaaaataatcatttacttgtaaaacgtcacttggattcaacatgaacatgacataaaaattatatgaatcatgtttgtgttcgtattttatctaaaataaatttaaaaatttcatatgacacgaacatgacttgatgacactaaaaatattaagggaattttttatttttatatttcaaaatagtttttttttattattatttttatttttatttttatggaattatatatcaaaactcctgtagcaactaacaaagcaatctaaattgcaacaaaaatttctatagcaattcacataaaaactaccatagcaatctaaatcgtaaatttaaaaaaacaattaaaaaaatagtatataaaataattctctaaatattaatttagtttaaaattttaatatgtctgtatttgtactatttgtgtccataatttttcaaaaaatttaaaatctcaataccacacgaatttgaaaacccaacacaaattgacaacactaaaaactaaagttagacaaatggaccacacaacatacatagtatcttaaaacattatatattttattttgaatgataataatttcttttgaaaagattgagagaaatgctaaaatgtaccagtggtgtcaagcaccctcctacgtgttaatatcgctattggtctaatttagtatcggatccatatagtttaatataatagcatttagggagtatcgctaaccaatcgtaaaacgacacgtgttaagggtgttaggcaccactggtgcccaatagcaatgctctaataataataataataataataataaaaaaaaaaatggaaggcacactcgtgcgtgtgaaacgtgagaatcaagtcacgtccgataaagacacgtgtcaataccccacataagatgtggacgtgtcaagatcaggaacgtaagaattattgaactgactaatactaatactacacatacacatgcacaaaattaagatacgattattattgtaatcagagcaaaatccaaaaacattattattattaacatagggttgtggtgcgtactgcgcaccagacgttacaggtgggtcccataatagctgacacgtactataaagcgccgtaggtgaagggcggcgggggtgacttcacgttgtcgtcacgcgcgatccaccacgcaatcgctcttgatccacgcgccattcttttttatttttttatttttattattattattttttttaatttattttttcgaaaaaccaaaccacagagtgaggacattatagaagagaacgtatactagactccaaacacagaattttattttatttttatttttttgaaaaattaaaaaaaaaaaattaaaaaactttccattttttgggtttcttgtaaagtcaactgtctttttcccacaaaaagtagtgttataattatttgtatcatgttaattggatttagttatttttttttaaaaaataaataaataaaattatattgcatttgaaaaaagaaaaaaaaatgaagcagagtaaaacaatgtcaaattattgcaaatttgcctttttatatttttttttactttttaccaccatactttactagaccctgaaaatggtaaaagaactgtaacaaacatcatagataataatgatattgaagaaattaataaaatgatgtaacaaattgtgtaattttttgttaaaacaaaatgagtattataatattggagattaatgggacttaatacatgattaagactattctaagcaaaggcatgtgacactagttggtctcatctaataattacagttttactaatatttagtagttgagaattgttaaaacatattattggtatttagtaccattttcgatatcatactattattggtataattaagtatcaagtcttatataacttaataaaatagtttttcgagaatatcactaaccaattgtaggacgctacttatagaaagtcctaaacactactgatatttaataacaatactcttagtactttagccactacaaaaatcattaggtctaataattgaacaaccaactttcttagtaggaaaaaaatattagaaataaggataaaaaagaaaatttgtgacgaaaaaatttaaaatataaaaattataaggataaaaatacaattatgtaaggactaaagtaaaaaaaaaatataaagacaaaattaaaaataatcaaaattttgtatgtaaaatataatttatataaaattagagtgggtcagccccacatgactaacttaaaatttaaatacttaaattgctatttattaaaatgagaaatacttaaagacattagtaatgtctagcaccttttaatgtgtaatattgttattagtataattaagtattaaatttcatataatttaatgttataatttttacggtagtatcactgaccaaaaataaaacattacctctagatattactaaacaacactcgtactt

SEQ ID NO: 193809 - DNA, 3049 bp, Cannabis indica
gtgccagtagttccaatgatttctgatttgtccattggagttgggcattataaattttaaccatgtattttcagacaaagccaaatataatcagaaaacatgcaaaagaaaggttaaaaaggagttacaagtcttgcaataccactctgactaaatatcaaatcaagtagaattcagaatcagcatattttgtgaatgtaaataggaacaaactcataatacaatgcaatcatcaagaacaggacccaaaaacacacaataatttcaaatcaaatttaggtaagatcgtcctcctcgagttccttggctttcagcttttccttcaccctcaacagtagggtagtcttccaagaatcctacacacgtacagcagcaatacaaacataagtccaaggtaaattttccaagaataacaagcaggaaatagcaatttaatcagaaccagagttgtaagcttaagttgaaaaagaaaaaagaaggctaaactagaaggaaaaaatatatcctctatttactttaattctagttactgaattcaacaattgacaggcaaatgccaaaataaggtcatattatctatttggagctgcaataatattgctctgaattacctagttccactttaaacaaatcaaattttcaaagtgctcatacctgaaataatttattttctctctaaatagcaactttgtattttatatttaagaaaaaccataaaaaaagagctacaataacaagcttcaaaagaaattgcaaccgagaaattcaaaataattgagtacaatttgaaagaatgtattaccagtggagtcatgctatcaaattccttgaccacatcagtaaacttagcaacatcttcctcatcaattgaagcagcaatatcctgccagaaatatatagaaatgaatagtgtgaacaaccaaacaaaaacagttttattgaccttttcttaaatctgccatcatccaatttatttgatcagatgcctcactggtaaactggagacaaatactacatatagagcacatatgcaaaagataagaaaggaaagtacaaatcaaaaggtcttttaaatcaattgaactcacagctaggaatttgtactcccttgttcctgaaaaagttggatcaagatcctgcaaaagaacaacaatatttgcacttcagacaacagacaaagacgaaaccagaaattttgatctccaagaaggaaagcttaagatgtgagacctgataacgttctaatgcattggtaattgcgacaacatctcctctacaaagttggcaaagtccagcatttagaagatgtcctttaactccatacttaagcaagttattgttgagtgactgtcgtgctatctcttcataaatctcaattgattttggatatctgcaggaatagatcaaaatacatcataacaagtaataattaaattaagcaagtaatactattaatgtcctcacataaatagataaagaatgtctgttgaggataactttgcaatactattttatgtgttctgttatgctgcagctcttgttcgggtaaaccagaatgtaataagtgaaaaaagggtataaatacagaattcttgttagttgtcacatgaaatcaaagtttataaccataactgtcaatgttttaaattacggatttgagcttcgaggtgcattgaggcgtaagcctaatatataattgaaaaaatatttatactcacctaaaaatatcaaggaggaataaaatgtctcataaaactcaaaaatagcttaaaatgtctcataaaactcaaacatagcataaaatctcataaaacttaaacttgaatacagaacaagcaaagcgttaaccaaatactcctgtttttttttcttgttgatcaaacactttcagaggaatcctaagtttcagtcaaaacttgaccagtaacaaaggagtgcaaaaaaattatataagacagaaatggactttcatataatataaatgctcttttagttctgagatatggccatcatccagcttcaagcttgtattaaatgtgccattcagaagatctagttgcaatcatcaatcaatgcttgcaacatcaaagaagtggttctctaataaagtttataatgaagaaaaactaagtgtatgcagtatatacatccaaactcttatattgattaagtgtacttactgttccagttgagcagcaaattgtgcaaccttttgcttgcactgatttgcagaagtagttacttcttcattttggaagaagtcggcagctttttcaaagaactcaatagccttctcaatattctgttctgactcatacagttcagcaatttcctgcaagagcaaaatgtaggccagtgtcaataaaggttgtaaaaggggtctcataacacaatcacttacaaatctaatccataataatccaaacaatagttgaatttcattgtgagacacacaatgtgaagtgaaaaatgaaaacactgaggtcacacactagtttcatgcaagagaagtttataaacagaataccttaaaatatctggctgccatattgagccttccaatatcacaaaacatatgtactgcttgctctaagcaggttatggactctgcattagaaaaagtatttgaactattatggtattttatttaagtatcaaactaaatgaaaactaaggaacagctaagtatctgatatctacaagaataatttatgacagacacttcaacgccaaaaggaaaaactatgagaagccaaacaaaagctagaggatttataagcaaatttttaagataacttagctaggagatatacacataccatttacagatgttttcttgtagcaatgggcagcatcaacataagcttgggctgcttcatgtttgctttccaactaaaaaaacgagaaatagaatatcatactcatgtatttgaaaacaaatggttaaattacaacaaaagaaacactaaatctattaaacaccaaacaaacaaaccttcacatgacagtttgccaacttgatgtatgttgatccagctctgtcccctaa

SEQ ID NO: 193810 - DNA, 3503 bp, Cannabis indica
acacatatatatacataaatatataaaggccggccagctgaagtgccatgaggcaacaatacgtgtgattaacaacacagacataacagtactttcatcttctgttgttttttttttttattttttttttcttttcttgttgactccgcataaggtcaattagaatgaaaatgaccctttcatgtgcatccaatcttatcgatactctttttattatgccttcccaaacttgagaaataagtccaagccggcaaccggcagtttagtggtgttcggctctcatatataaatatataaatgtatactctatattagttacgcatatagaaacttacatcacctgccatttgtctcatggcattttcaaatatttgatataacttcctcagtccaatcttgtcttttccccttgttttatcatccaaactaattaatccctttgtttcctttgctttacatttcataatacataaccaaacatacaaataatactatagaaattattaaggaaaaatggtcaaaatgaattaggcactactatagtggactttctttcttaattataatattaacctctgtcaactatttagtcacaataactcaacataaaactccaaacgtatttccctatcaatttataaaaaccatgttattatgaattaggacaactaggtaggttgattaactactagctaatactcctagagttctccatccaaataaacactatttgtttatgatttcaaaattttcaaacaatggctctcttcgaccaaagttcaatcctctttcaatcacatacactccgatgttttgttcttaataagatactcttcttactattgttgttacccgaacatggcaattcagttttcttcaacttcacttcttttcatccaaacatggtggacattacattccaaggagattcattcacatcaagtggagctctccaactcacaaagaaccaggctattggttccctggctggcagcgctggccgagcctcatattcgcagccgattcgactttgggaagctggaacaagaaggctcactgatttcactacacacttctcctttacaatgcaagcacttgacaaagcaggatatggggatggaatctctttcttccttgcaccttttgagtctggaattcccttcaattcaagtggtggttaccttgctttgtttactcctgaatttgctttcaatgcctctggcaataacagcattgttgctgttgaatttgatagctttgaagacccatgggatcctagctctgatcatgtgggaatagacattaattccataatatcagtgaaaaatgtcacatgggaaaatagcataaaagatggatcactagcaaatgcatgggtaagttacgactctactagcaaaaatttgagtgtgtttttaacttatgctgagaatcctatctttgtacaaaattctacaatttctcatattgttgatttgagagagtttttgcctgaatttgttagagttggtttctctgcttctaccagtcaatttgttgagttacacaacataaattcttggtcattcaactcaagcttggaggttgataatgggaaagggaaattgaaacagggattgtggattgggttatctgtggggttttgtgttgtgagcattggatcaggccttgcttggttcatattttggagaagagaggctagtaaagaaaaagtagttaatgtgaaacatggaggtgaattatctatggacaatgaatttgagaaagaaactggacctaagaggttcacttatgatgaactaagcagagcaacagacaactttgttgaagaaggaaagttaggtgaaggcggattcggaggcgtctacagaggtttactaaaagaatccaatacagaagtagcagttaaaagggtgtcaagaggatcaaagcaagggaaaaaagagtacatagcagaagtgaaaatcattagccgtttgaggcatagaaatttggttcaactcattggttggtgtcacgaacaaggcgaactcctcctcgtctatgaattcttacccaatggaagccttgacactcatctctttggcaacaagcttatgctgaaatggacagtgagacacaaaatagccctaggcatagcctctgccttgttataccttcatgaagagtgggaacaatgtgtggtccatagagatatcaagtcaagcaatgttatgttagactcaaacttcaatgcaaagctaggagatttcggcctagccagactcatagaccacaacgagttagggtcacaaacaaccgttttggctggcacaatggggtacttagcacctgaatgtgtcacaataggaaaggctagtaaagaaaccgatgtgtacagctttggagtggttgcacttgagatcagttgtgggagaagaccagttgatcttaaagcagagccaagccaaacaagccttgtggaatgggtttgggagctatatggaaaaggccaaatccttgaagctgcagatgagagactaaataaagggtttgatcaaagacaaattgagtgtttaatgatagttggcttatggtgttgccatcctgaccacacaattagaccctctataaaacaagttataaatacactcaattttgaagctcccttgcctagacttccggcgaagttgccggtgccggtgtattttgctccgcctttggatatgcttaggttcacttatacatcagatgggcaaactggaaccattaatgaacatactcaatgtacttatagtagctatactactcagtcatcaactacttctggttctggatctggaggctcttctagagctctgctaaatatgcatacacgttgattttttagtgtgcaatcttgtttagttttgttttgtactgatctttatctctaatgtttatgctaaccaaaatttttatattaagaagggaaactatgtaactgtaattactttttatttgcttaattggtgtaacgcttatatttatttctatagcaattgttatgttttcccatgaagaaaatagtttgaaatttttaaacaaagaattccacattagcaaaactaattttctcaacatctcctctcagtagagtattgttattgttatgattgtttaagaataaaatgatatttgattagttaccagagtatctcagataattactacatttcttataatggcaactttattcattttgattatagtatttgtaaagagttgatgtaattggttactgtaatttcttcacagcaattcataaacggcttgtttggtatgccgtattgtattgtgttggattgtgttgtattatattatattgtattagtattattgaatacaatattatgtttggtattgacttgtattaatagattgtgttgtattgtattgtattagtattatttaatttgggtccggatctgggtccgagtccgggtcggggtctggatccgggtctaggtttggggtccgggtcg

SEQ ID NO: 193811 - DNA, 1190 bp, Cannabis indica
tttagggtgggggacgacggaagagagagtcgagacgagagagagaaagagagagagtgagagggaaaggagagagaaatggtttgagtttttgagaggagttagtttttgaagattttagaaaagtggtaatatattttcaatgtagaaaagtattagtttaaggaaaaatttatcccctagtgcatgcatagaaattcaaatttctctatgtaaatcaaaattattactcttctattaaacatgtcaaatctgctgataatttcaaatatgtctctagaacattttattgtgtctcttcgagtacctgaaggaaaaattatgaaatagtagatcatctactcttcccaaaattatatatatatatatatctcattaaattaatcaatataatatgtatgcatatgatacatacgcatgatttatcggaatgacatttaccgattgatatgtattcatttaaaatctaatgataatatataattaagtagagagaaaaacaaataatatggaggacgcccacctcatacaatatgtttgtatatatgtacgtatacattgtttatattattagcattatctaatatatataaatatataatgtgcctcatgatgcgtcatgatctattataaattcataatctatgcagcaaagggtttgtgtttggcttaataattaatcatatatagataaaataattataattaatagtaagatgctaattaattagacattcttgtactactcttttgtttatttacaacagttgacattccaagaggaatagactatagtctatatgtgtaattagttagagaattatataatttaatgatctatggttgttattactctaaatttaaaaggttaatttatggtcaaaatgttgccaattaaataaaatgtcacgagaaagcttaatgttgtagttgtatggatggatgaaagaccaactaatattacttagtatatatctccattgttttttaataattatatcaaagaacagctaacacgaatgatcaactaaatagaatatttatctatattattttttttttaaaaaaaacttaaatatgtattcagttggcttcgcggtgttgtttgtttgtctgttcggtttgatttttttctctattattacttacgtaagggaaaaataattatttccatcttactagtttttgga

SEQ ID NO: 193812 - DNA, 1088 bp, Cannabis indica
tttttttaaaaaaaattagttagtcgatactcaaaacaatgaaaatataagaattcaccaagcatggctgcttaaaacaggtagagttgtctcgtccagatgcagaactcagactgcttgaggttttctaccacaagatatacaaggtactggcctatttaaaagttaaaaatcttaatgacatttttctattgaccatcttgtttcgtgatgccaatgtacttcataacattattgtcactgaggatttatgtggctgatacagagattttagaagctctagcataattgttttcatttcattttgtagatatttccacacactgaaaagatagagaatataaatgatcaatactggaccttgcgagcagaggaggcaagttttcctttttctatccaatttctgtgaacttattagaatcttgtttcatgaactttattgtctgattggcgtgtcattggcatgtcctactatttcttattctttcatggagttgtttttatagatgactttcatctccaaactggagtcttatacaactatagactatctttgttctttattcatttggtataccttatgatttgatgctgtttttttttaactgtgagttacagattccggaagaagagaaaaacctgggtgcccatgatcgcttgattcatgtttaccacttcacaaaggacactgctcaaaaccagatggtactgaattttaagagctcagtcccataaatatatgtatatatatatgtattctttttaatcgtttgcttaaattagtgattagataagtagtgaaggatattcttaacaagtaagattttgttatgttctttatttgtacattttttttccatttaaacagcaagtccaaaattttggtgaacccttcttcttggtcattcgtgaaggtgagactttagctgaagtcaaggtgcgtattcaaaagaagttgcaggttccagatgatgagttttctaaggtatgttctgtgctgtttcttcagcaatagacatttatttgttgtcaaattttatcagctgctcttttttttttttttttttcttctttatcatcttgttttt

SEQ ID NO: 193813 - DNA, 633 bp, Cannabis indica
aattggtatcataggtgtgtgtcaccctccaaatgagaggaggccagagccgctcaatcatgacgagaaatgtcatgtaattggaaaaattgctttgctttaaacaaccaatagaaaggtcactttgtccatcaaagtgtgggaaattgattttcaaagattttggcatgtacaattgattggattgatgcacgcacccaactccctctagtattttgatgagcatttggtgtgcataatgccgtagagaaggctagtctccatccattcttcgttttagtgtgttcattgcaaacttatttgtcttgctattcgttgagaatttctgtcaattgatgtagaagtccttgcatgttggcaaattccttaatttttttcaatttctccactcgtttatccaaatagcacttgggtagaactcactcccaagaactaacctacgagaagagagtgtcaaagttgaaagtacttgtatacaactgcgggaggggagacatttcaatggctttggtgtaatttcttaatgcattaaccaaatagattaatcagtttagctacaagcagcagtgttttcccagaagaaccagtatgaatcgatgacattaattatgcagcagttgactctaggattgt

SEQ ID NO: 193814 - DNA, 1015 bp, Cannabis indica
tcaacttgaaacttttaggtagatagaagtatgctgatgtttcacttgctcattttgtattttatgcttgatgtgtatgtctttcagcttatttagaatgtcggaagaaattgggaatttatctgttatcacatcccatatataggcgagccctaagttcaggtgtccatgatattcttttactgttttacattctgtttttacatgtctgagctgaaagatggatcaccatagtagcacaggagtaaaaaaaatgtttcttgaaatttctaatcctataagttgacatatttaagaactcgaaaatgagttgagcttctcttagtgtttttaatttttgttcagtgatacctttcatgaggtacatgctcttttggaggtgcttctgtaattgtacttatgtctatactgtgcaaacagaggatttgatgtgtgcattttttgcatggaccctatctgatctggcttagaaaactaaacaataactaaacatatacaggaaactaacactagagaatttagtataagttggaaactaaacatgataaaaaattgatattgcaaattagatagtcttgtgtaaaataaatcaactttaaacataatcttaaatattcaatttaataatagtgtaaaaaattctaatagtttattcttgtctgcattgacttctattgttccaagtgtgtttgttttttagaacatctttttttttgtgtgtgaattacacaaccgctaatgtaattagtttgctaaaattagccagctgtaatccaacccagtcacacacagttataattacaaaatgtaaccatgattaattaagtgctatatgcatctgtcatttgactttgtttatttattggctggtgcaggcactggaagtcattgaccttgaacagaaagctcagcttgttcgtgagcttgatggacatgttatgagatgtgtccgagatcaaaacgggatcatgtaatacaaaaatgcattgagagcattccaacagaaaaaattgcg

SEQ ID NO: 193815 - DNA, 1205 bp, Cannabis indica
gattttagtggcacattcttttgtacattgcacgcgttactaaatacatataatataacaccaattaattattataagcatttgaatgtacatatgcatcatggtttttaaattcaattagcttgcttctaattaatgataatattaaagataataaattaacttaattgataaaaagcaatgagaactgagaactaattaattatccctttcaaaagttttacaaaataaaaaattatttgcttaataaaatatcttcattattaatagtattattgttgattattttatcccacttacttaccgaatacgttgattattgttgttagtaagtctattgataattgatatgtattgagaatttgcaacataaatacacaatttgttaatatctaaaatttaaaaatagtagtgaaaatacttaaatttttaactttcaaaattctattagtactcactttaacagcttcgtgtgtcaattttttttatcggtcaatcaaggtaactgttaatagcaccatttctcgtgatcgagcagcatttgattgtgatatagtcgttcgagattctcaaggagaattagtgatggctaagtcgaacagttttgctggtataggtgctctggttttggttgatcgcattttgtacaaagaaaacgttaagctggattaaaactcaaccatggcagaaagtggagttggagtcagattgcttggtagcagttcaaactattcagaacctactttctttttttggggttattataaaagattattgtaaatttctagcatctttaaataacgttttttttgtttttattaaacaatttactaatatagttgctcacagtcttgctaaagtatcttattcttttttagatcgagtgttcaatataactgatgttcttattaaaatacaatcttgtcttttagttaatttagtaaattaataaaagttttatatttattttaaataataatatttattaatgactccatgtttaatgggtaataaagtctaattgaaaagtatgcaaaaagaaagaagtttgatatatatagatgcatgttggttatactaattgacatgtctcaattgtttggtggtagttttcatgttggtgaggaaaatatgcctttccctcacaataaaccaaatgatgacaaccaactctactttttgttgtaaaaagaagaagaagaaga

SEQ ID NO: 193816 - DNA, 2528 bp, Cannabis indica
tgtaatatgtaccaacctaaaaatgatgtcaatccaactcccatttcctctgttattttcaatcataatatgacacagacacacttgttttgcttcagttcgctagtcgctttcttttctgttaagtgaaagaatcaacaacaataagcttttaaataccataaataaaccaatgcaaaagctagtttttccctttatagtgcattgaaagttaggtaactagattaatatagtggttggttggagttcgagttggtaatatgaagaatcacaaaacgtttaagaaaggtttctagtaacttgtttttccagttttcctcaaggtcccaaagacccgaaaagcatagtttaaaacaatgatggatatatagtctttttgcagcttaggaatgtagaagtggagacgccaaaaaatgtttacctttctcctgtggtggtggttgaactacaacatgcatggttgtaactgtaccggggatgtcgcataaggggctacgacaatctgcaactgttctgctgttgtctaatattttccctccacttattagcttgacatcttttactgtctttggaccattgtccttctctgttgaaacagataaatttcatgtttagttaactccactcggccaaagttgtaatactaacacaatttcagataagaacattacactaattgatccaatgattttggtgatgaaagtgttaattactacattcacatagtctcatgttcaaaactataataggaagctaagtcaattgtgtaattcactaccaaaaaacgttctatgtcatattgatctctttgataaatacactcaagaaagcagtgaggattgaaaaaacagaaaataaagaaaccaagaaatgaaagatacagaaaagccatacatgggtcatatgacttccttgtgttgttacacaatcatcagagtaatagtaattttctgttagaactctgaaaatataacaatatgtagataagtaaattctgaagaaacacagtatgtatcagggtacatctctaacctttaggccattgggaaagtatactttctttcaaggttgcaacacttgtagctgtaggaaaagttttgggaccaatatctgatccatcagttaaccgaaacttgatctccaactgatcttgaatcacagccatcttcaacaattcaacaaactcagtagatttaatatataatcctttgaatccaagaaccaaaaatctggcagcacttggctaactctattggattttgccaatacttcaatcagatctcaaacagaaaagttttcattaaatcttcagttgtactcttcaaaactctgttgaaaaacaaaaggtaaaaaattgagttctttgaagtggggtttacataaaaaattgaacttgtaaagttgcaaatgaaataataataaaaataaagtgataaaagtcatgtatatctacacatattattgtaatgaattttaatcctaaagaaccaaaacattgagtgttgtgtgaaaattacatcagcagcaccgactatcaaattggattgataacaaacgaaacaaagatgtacacagtgacaactcttaattaactaaccaaaataatcacacaaaattttgatatgggtgtgcatagaaaccttaaatcaagccaaatcctgaactgggtcaactccaaaaggaccataaagcacagaagaaagaaaaagataaaaacttttgttgggttttggcttacttgactcaaaaactgatctgggtatgtatgtatatatgtgtatgtatgtatgtatgtatgtgttgtgtgttctggtttggcaccaccaaccagcgaaagagggagccggttcaaaattccaaagggaagaagaatagtggatgcaattagattttaaataatattaataaataagtgagaggaagaggctgtttcggagttttcaaagtcttctaaatctgtggtcaatgactccattcttgccttctccctcaaatctcctaatgctatggaaatggacatattttccctctttttaaagagtgtttaacccttttttgccttcttcccaatgtttttaccttaccaacccattcattcattcttcattcattatttcatcataaataatataatagtatactataaacaaaagcattatattcctcctcatcatcatccctcactacccaccaatcaactcatttcgtatcctatacaattaaatctcattacttcaaagtaaaatttgccaattggtattcgacgtagttgccaaagaaaaaataaattagaaagttgacctttttctaatgtacttatacctatgcttgcacaacattcaaaaacataatcaatatgaaataaattgtgataacatattcagagaataggatcataaatgaattgatcacactacatacaatatatgccttcttttcttgtttttactttttacaatgtctaatcttaaatatatggcaaagtcaacacagtgaaaagacatggttcatcgtttatatttatattt

SEQ ID NO: 193817 - DNA, 1721 bp, Cannabis indica
agagttggtaatcaaaccttattaatttgtgcttttattagtggtagaccttaatgtacgtagtatattatatatatactttgtttttgacactaaattggaccaattcccaatttcacattactactcaacttaagtggccaagtaccaaaagttaccaactgtcagcatatagaaagcaaacttatcgaatataaccatgtatcgttgttacaactactacacttgagtatgtgtaaacatatataacaaagttttaattaggtctttctttcaagtatatatacaactcacttttccaaacaaacaagaaaagattagaataagaataaatcttgaaaaattgttaaaaacagtgttaccaagttttgagtaactaaacacagtcatataaaaacatttgggtgtatataaatgagacagatggacaaactcagccgccaaaagaagcagagacaaaattctcagtatccccaaagtaatagcatattctccttggagtgcaaagcaattctctcacgaaacatttatgtttttataatattttttaagttcatcctttcataaaaaaataaataaataaataaataaataaataaataaataatattcatatttttaatattattattattattatttacattgggaagggtatttgaaagaagatgtataatattattaattaagttatatatgtataataattactttatttatttatttatttttgttattgcatgagttttggcgagggttacggttcaaattggaaatgattaaatattaaattttaaaattaaaagaataatttttttaaggaaagaaattcgaacttaaaatcttatactgtaatataaattaaaaaaaaattaattagtattagttttattacttgaaaaacaaacaaaataaatgggttaattcaatattcattgtcgctgtgtcctataatataaaaatcttgttattaaaatataatttttttttttgaaggaatatatattggttgagttttttttttcaaagctaaacattgtttaattattatgctgaatgagtggctgttgctaacatgaggaaaagtaatgaagaaatacaaactataaaatatttttctgaaattgtatagagattttgaagttgtctctcttaatctaattttaaaagttcttaacttagtatatcaaatataggatttttttttttccaagtgagaaaaaataattttccaagaatggaaattacattgaagtttttgtttcttttgtaaaatttagtatatgttcctcatattatattttgatgaactctgaagattcctttttggatttgtttttggttggtggaatgcttttatgattgatcgatatcttctttaccgttccttaggtttgaaccgcttgtggaacgtttctttttgccttttaaaagcgatttttaaagaagtgtttaaaaattctaccttttaaatacaaattccattcggtttcaaaaaaaaaaaaatacaaatacaaatacaaattccatttcaaaataataataacattacaattttccatttaatagctatcatttatcaatgttatcttaggaaattttggcagtcccccaaaaataatggtgcactttttgtattgtttattttgcccttccagataatgcatacaaaattatagaaaaatactaaggacattttatattttctatattgctctctc

SEQ ID NO: 193818 - DNA, 2176 bp, Cannabis indica
acttatacaatcaatagtattttaagcttgtatattgctggtggatttctttacaggtgtgggagctatttcgatttggagtgtagcagtgggagttgcatgtatactcggttttgctggtgggtttgcactcaggccttatatccttcctcatgtaagtttcttcttgcacttcaatgcaatgataattttgtatttgcataccagcataataaaaaccatgttcgtttgtagacagggaggcatcaggatgcgcaatttcagcgggacatggaagctttgcctaacccatctggagaaacaagttcagatactctgcttcgccatcagaagcgcaactgctaactcctctttagtttgctcgttcttggaaaggctcttttggctaagcctatctcatatatctcttttatttagaatagattatctagtcccccaagtttccccaaaggaacacgtatctttgcttggtagcgacagtgtcgataatagtagcagcagcagcagcagtagtagtgagacaatgaagtcattaaagtatgacaatcaacttaaggatttgataagttttgacgaaagctcggtgtcatcgaaccttgcatccacaggaatggttgaacaaagagaagagtatcaggagaggcgtgatgttgttctgtctgaaaatgggaagatagagaatatgatagagactaacattttgcattttgtggacaaggctaaagaaactactctgatagacgcagctgtgtatggcaactctggtctcatcagaagaagatgaagttgttgaaacttttaaagccttcctgctctgcttcttgttgcaatgactatgtcacatattaggtttgtaaataatccaacatgcttgctgcactgctttcttgtcagttactgacttaacttcccaaaaatatggatcatgctttcttgtcagtcactgactttattatgctttcttgtcagtcatgaattattaggtttgtaatcttaggcaactcaatggtaaaatctaaatttggttaaatcaacaccaaaagagtatttttttttttaatttcaaccacaacaatataaattacacagaaaaaaagtatattctttattattttaatttagaaatatacatatacattaagaaaatttaattatttaattactaataataaaaaaatattatagacaatcttatatatatagaatagcttttagtgttcgattggattaattttaatgataaataatactaaatttgagtttttagtgtgtgttgaagatgaccataagatctctattctttctctatcttattcatattacttaaataatatatgttttaatatattaataaaaataaaatataatataattgacatattattacaatatgtttaaaaaatgaatattatttctctacatgtagagatgtatctgaagaaaatagaagagtttacatcacttgttggaaggtgtatttactctattgttctttaaattttttaagaatttttatcttaaagggctattgggagtgctctaataatgtatttagttgttactcaaattttgaaaagccctcaaaattatgggaattggtgtgctgggcaaaacaaaaaagaatatgaattgtgttgtgctgatcattttataagtaggcttggcatggtttgtaaacttagtgtttttgtgtcgtgttttacctagattggtttgttttggactcgaatttgtgctcttttgttacaattaatgaattaactataaacggttaatcaatttgtgtttttgtgtcgtactttcaaacttatttcgctgtaaatctataattttagtgccatgtcgaaaagaccggcctgttatttaaagctttacttctaattaacaaaattgtttatagatagaaagagtatcattattgggcaccagtagtgtctaacaccttctataagtgatgttctacgattagttagtgatattctctaaacgatattttctcatgttgtatggaacccgaaacttaattacatcaatagcaatataatagcaaaaaatatgttaaacaccctttagcaattctcgaaaagaaaacaactgctgatgttgacttcaaatgacacaaattaaatcttgggcatcatttaggctctttcaagcatattaatagtgtttattt

SEQ ID NO: 193819 - DNA, 2424 bp, Cannabis indica
ctctctctctctctcatatgtggatggaggtatcaattgtcaaactctgtagacagagttacagcagaggttatcatccacacctgtgtagataagatgtgatcaattgtagtagatgtgaaaatcatgagacacaagtgggcttttgtgagctggcttcaatgttggctaatgcataatagcttttacattttaggttatgactgatgagtaagattctttatcaaccacatactctgtctataaactttcttgtaaaagataacaccttcttctccttaagttcacatcaaaatagccaaatgctgtataacattacttgtttgtatctaaaacgatagatattggagatgagaacattccatttgatatgatatcattggtttctcaaaagccccccaataatggagaaatgattgtttctctatgaaagacttttctttagcttcaaattcggtgtattgacttggacgcatcatgtggaaaattggttctcccttgtgcctttgggcctaaaatctctagaaaaaagaaaagtagaaattgcaccctatactttttttaacccatttcatttatacctttcttttcttatttttcttttcttttcttttcattttcacaaaatcatcgttaccatgtcgacaaacaatcaacatactatcaataagaagatggaaaaatgaaaaataacaagaaaaatccactcatggcaaattatcaagaaactatctccaaactatcgataacatgtcaacatgatgacaaacaacattcctcagaatacgtactgaaaaagtatcgacaaactgtcgacatattatcgacataccatcgataaatacattttacatgccaagaacatatttttagttgggcatttaatgctcattaatgttaggcatatattactctaccatttcaacaacttttctactctataaaacaaacttctatttcctaagttgtatatatttcttcttctttagccttagattattcttctccactaagttatatatgtctagtaattctagttctccactcctcttctcctctaatgggaatgaatttgattttgatgtaggagctcgatctccaaactgtcctcatactttcactatgcgtaacagatcaaaccatgacgagcagatttgtagaataatgcattattattgggctaagctagtgtgtggctcactatctaacgaagactagctgcaagacttatatgctaacgaaggacataacatcccctaacctattcttatcaatgttgaatgccaaaccatccaattgagagaaaaacgtaagcgacaatatcatcacattaatggaagagagcaaagaaaatataaggaacaatttaaatatgaaagggtggaaaacgagaagaggttggaaagcaatcgaaggaatggtgttctcttttctcctacagggtttctcgaagggtgccatcgtagcaaaatgacaatggttagagacgaaccggtggtgcctgggtcgttgtgcatgtattgcatgtatcaccctagctctgaagacttttaaattgtatgatcgttatcgtgatctttttgtctttatttatgttttaaagtttttacttgttttaataatttttttttcaatatttaatatgtgctagtcgaaaatatatcgacaaaatatcaataaactatcgtgatatagtcagaatacaatttttcgactattgtctacatcccatcgacagacaatcgtgaagttaagcaatggaaaatttgacaaattatcaatattcaatcgacatactattaaaaaataatgagcaaacctgattctaccaaattatcgataaattagctagaaattatcgacatactatcgataatggtcttctctgattttaactttcttatcatcgatatattattgaaaaactatcgataaactataaaatcacccaacaactgcgagaaaactaaatctcgctcttttagacaaaaaaaaaaaaacaaaataataccaatgcaaacaagaactacacaaatcaaacaaaaaagaactacatactatttccaatatttaagaaattatttaaaaaaatacttattcattaatagtgtgaatgattcgtgattcgttaagttgtcgtccgattgtccaacgagatagatcgagagataaggagttgagtgattgagagagagagatttcgatttttttgttttgttttatttttttattaaataaggataaaaaggagaaaacatgtaaacaaaataataattttgtaggaaagaaggaagtctaaattttaatctagagtatattttaagtatacaaataattctattaaaattgtgggaagttagccaaaaaaaaaagttgaagttgcgggaactgggaagccggctatatatagtttaatctttcttt

SEQ ID NO: 193820 - DNA, 844 bp, Cannabis indica
aaagcccagcccaagaaataactgcatatcggctctcggagaaattagattcgactcaatcagcacacttatacgagatcagtgatttttggcaacagtattgtgccactacaaatttgagtacaacctctttccttattttccctcgttaatgctacaagaaattatttatttatttactttggaatgccttcacgtaagaaaatacttaaaactggagcaacacagcctattaatcagtacaagtataatcaccatattcaccattcttgtcattatttgttttagttcatacacacacacacagaggagtaattatagctcaccaactaataccttagctagagattacaaagtctgaacaattagcacatagccaaatagctgtgacaacttactacagacactgatccagagctcttcttcctattccagggccaccatattcatctggctcatccatgatgccatggctgatcttattcttgcccataaggctagccctttctcttgatctttgtagctcacaaaatggcctggctttgctccttccacatcgaaatttcttagtgacaactcactgcaagatgtcggcacagctgggcccttataggccttgcagatgtagctcaggaagttttcatagtcctaaaccaatagtagtagtagtattagtactgttattttacaagggcccaattaagtagtcttttgaacctatgaatcattagagaacaacaaaagaaaaatagacttgacatttaaaaatcttactaggaaaactatgtcatgacctgttggcaagaataaagatgggattaacaacaagaagattgtgagaaac

SEQ ID NO: 193821 - DNA, 963 bp, Cannabis indica
atcacagcttcccatagacccaccaaaagttcgactagatccaatcagaagtgggcccagaataaccctggcccattaagggcccaataataatcgtaaaataaatctcttcagatgataagagtctcgatctgagagagacagaaagacgatgacctgaccaaatactatcccagtaattcagtaaaaataatgatgggcatttttggtataccagaaaaaccttgcacccaacgcgtcaaatcggcaaccggaaccggcaaaatcaagtcacttacactccaccgacagttccactcagtcaccttcaaccggttataaccggtcaccatgtccgtacacccccacaacgccacgaactcacatgccccaactccctcttaaatactctctctctttcgaccctctctgctatggaaggaagggacgtacgatctatatatatatacaaaataataataaaggtatagatatagtgagagaaagttgaaacaggaaggacagtgaagaaagagaaagtgtaatagtttattttgataatcccgaaagcttgtttgtttctcctctctcttgctgctgttactgactgccattgttggaatctgagctttggccaccataagtaaaagctttggtctttggtaacaaactttcttcaactttattttcttgttgtactcttttggctccttcttcttcttccttaatttgtactgctgttgaagttgacaacacacaattgaaaaatgtgaatttggggaaagtttatcaacaaaagaaaaaaaaaagctgtggtccatccattgccattcgctttcatggctcattagatcttgttttggcttttctctcattctctggtttttgtagtttcgtttcgaaccttctcatttcaagctttgagtttctgaatttggatatatacaagtgtatgtatattatatataacgacttttttttttt

SEQ ID NO: 193822 - DNA, 1157 bp, Cannabis indica
gtcacaaacatataatataaaatgaaacaatagaatggaaaactcaaaaatctctacatgaactttgtctaattaattaaccaaattaacgaaaatagtcatagtatggatactattcaacaatagtatctatatatatgagtatttttggctttttttacaaaggaatataatgttatgggacactataatattgtgtgtctaatacttatgatttaatattagcttttatgtattttttttcattagataagaaaaaaactaagaacatataaatgaagagtatgctaattaagttaatgcaagcataggtcataatatacaaaattattacaactatatataaggtacattttgaaaaatttagacgaaatttgtaatataattgacctagcaaagtagaaaatcaatacataaaaattgaggagtgtgattagaacactaaatgtaattactctaaactatgcaaaattatgtaattaccttccataatcattacatgatctaaacttgcatgttttcaattaaatatggtagcttaattagaacaaaaatgaaaatattccattcattgcaattggatatataataataataataattgtgacaagcataccataattaataatcttctaataagtttgttttatatatatacttccagaagggacaacttattattattgtaacacatatgaaccctatttcatcgttttgcaacttgtgttactcctctctctctatatataaaacatatatatatatatataaataatatatatatatatactgtaattattagatgtgaagtagcatttttgagttggtatacactataatattatatatagtgtagtgaatagtgatgtgggaagttggctccttcactgcatgggacccacacgtgggaaaaaccctagctagtgccacacgtgctacaaacaactgtctgtgtgtctcttctttaacaaaaattatttataccttttctttctctttcaatttatataatattgataaaaaagaaataacaaagtgtaattaataataacttattattaattatgagaatgatcatatccattgatcataaataactatatatagtttccacttgacctttcaaagttcgaatgttaagtagtatattatatatt

SEQ ID NO: 193823 - DNA, 1500 bp, Cannabis indica
aataaataatatttaaaatataattaacatttaaatgatataaagattttgtttcaaaaaaaatgatataaagataaaatataaaaaatttatgtatagtgtaatataaaaatttgagataaaataaattaaatttttaatgagctattttgaagacaaaataatacaagtaagtaaatctgaaactaatttaaattattttttttaaaaaaaaatacatattaaattcaaatttacaataactagagatgtagcttcaaattttttaattgaataatggcaaaaaaacaaggtacgatgcacacactttatttattattagtagtaataattagaagtagagtgaatattgagtcaaaaaaattcagtttatatatagatagaacatacaaactttattaattagaatatggagttacatgagtgagttaccgacaacttttcagaaaagtttaaattttttaaatgaaagaaatgagtgagtttatatataaataaatatataggaagagaagggccacaaaagaagaggggatcagatgaagaagtgactagtgagtgggggcatgcggtgtgactctgtgtaataccttcaaattttggtggtgttgaacctcaacaacgcattttcaaatttttattttatttgattttgattttgatttttctttcttttcattccctattcatatcataaccctcaaccctcattgggatcaaacattttagctctccatatcaataataatgtcttttagtaactttctatcagtactattttctttttattttcctgatatgataatttttgaatggaaacaagtgtaaagaataatagtgttctgtgtatccaaacacaattagtcattcagatacatccacacataccatattgaaatgaaattaatttataattgttgatgtgatattatatgttttactcctgtcctaattagtatcactcaaatataaaagaaatgattaatggaaggacagttggctttgaaagctaattttgtgattctaaatttttaggatgcgtaaacacctggacataccacactgactcaagggtctacactctacaatctacacgacctctctggctctctcctctcctaactttatcaagataagattgttcttattttctaattcacattttaagaatacatacaattcaaaattgactaattttaccatcatttttgctatttgtaaatttattagtgccatatgagaaaatatcaagttttcgagtttaggaaaaagaaaaagtagcaattaattaaaatctattgaaaattaacaaaaaataaacagtaaaattagtaacgtaccccgccttaacgtcctccaccgagtatgtcacttgggctgcttaatggactgatgactggtcccacgacaaacaccaagtacgcttcctacgcgtgcgtttgtcctcactcgcacgtttcttgagaaaacttctcaggaggtcacccatcttgaaactac

SEQ ID NO: 193824 - DNA, 1004 bp, Cannabis indica
aaacctcatacttttttcacttcattttctggttaagcaaacaaacaaaatcatttttaatactgcacaatctccacgtatataaaagccctttcttcaacatttctcagtacccaaaataacaacattaatgcgaattacacagcagatattgctatttcaaaaagtacttctgaacaccaaacgagacacgattcgaaaatcagattttaggctcaactttctcaactcacatttttgggaacgaaacttaaagtgaagagagtaacctgaagaggagggaattgagctgaaggagctgcttgctcgagaagcttcgaggatgagtggaggagatctgtccagctactcatgtcttgatcgttcgccatttttttctggagctcagtgaatgagagaaccaagagaaagagagggttttaagggactttctaaagccctaaaaatttcaaaactgcgttaagtttggcctggaaatggaaaactgaaatctggagcgaaaagaagaaaaaatctcacttcttttaagtttttgtataaacgacatgtcgtttgatttgatgaatttggctctcagcagccataaacaaacacgtggtatttgtcgtttttatgatgaaacgacaagttttcatgggaattagcttttttttttctgaaaaaaaataattagaatttttgccactaaatttttgcctataatgaatcatatctctgaatttttttcagtactattaaaagttttattcgaattattaagatagttaaatttaagaatttttgtctaatttttcaattgttgtcgatgtagtaaataatacttttgaattttgatatttactaatttataattctgaattttaacatgtacttaatgatgcgccttaatttttttatacattagataaaaattgttaaatatctcaattgttcgagaaaattttgaaaagcaaaaatcttatttactaattgggatattacctcatataatattatttaatttt

SEQ ID NO: 193825 - DNA, 959 bp, Cannabis indica
tcttgtgtatagtaagaaaatgatatatttaacattattattgctgatatttattagtttaataagcaattcaccacatactttaattcagaataagagataactgaaaagattaattagggtaaaattttatgacagaaattgatttttggaggtaattataagaaattagataaagaactttttctttttaacatattttcgtgcaacaacaatattataggtaggtctggcacgatctgcaagtatagtaatattgtgtcgtgtttggattcttgttgacgttcgggctggtccgtttttattttttaatagaccaacatattttttttatatgggctcaaatttatcttccatatttttgaatttttattataattaatgagctaaaattattaaaatatatgtgtattttataatttaaattatttttatatcttttttcaataataattacacacaatcataaaaaataattataattttttttgaatattactatcattttaagtaataaataaatattattgttattattattattaaattattgagctttataatgtatcgacgcgttgtacttttagcttgtcgtgctatgttgtgcctatgtccatattttttgtgttgtgtcctaagttgatatttttcgtgtcatgtcgtgtcgtgtcgtacctaaacacataattttttttgtgtcggatcgtgctcatgcctttcgagctcatatcaatttcgtaaaaccccgacaaatatttacaacattaattctttgctctattttttgtttctctaattacgttttactcttattatttttatacaacaaattaaatagttttccctccgttttttcactcatgaatattatgcataattgtagtcttttttgaaaactaaaataaatattcatttaattaaccacaatatttgtctttctcaatgttgatcttaacagt

SEQ ID NO: 193826 - DNA, 1697 bp, Cannabis indica
tcatatatggtatagtggcttttgtccacatcggtttgggcgatttatttattttgtactattcttgaagatattattttgtaatgaccgcgaagtctaactctttatatttatttaataattttttttttaaaaaaaaaaagaaaaaaaaaacttttcaaaagggaagatgttctcaaattaaattgtggatatatatatcgtactgagatataataagcatctggactgtgcttcttagatgtctctgcttgccgcatactggccagtttgacattaatttatattcttctttgagccattcccattttttttaatattacattacaaacactataattaagttataacatttaatgtgacacttgaaacctcttcaaaaacccacacaaaaattaattaatgtacaaaactaataaagccactcaaactaccaagaatcgatgtcgttttcgacaggtaggcctcaacacaccaagccgaaaacacattgtgaattaatactcaacccaacccatatatcaatgcaacaataaatggaaaatgtattggcattatagcttaggcgttgagttaggtgaaaataataatactaataaatatgaattacatataaaggtttcttcaggaatttggtcatttagcttgttatgtatggtagataaaaaaaaaaaaaactggtcataaatcttttagggttttgctatacattttaagttgaatgaacattgataatgttaaagggcgctctgtcgaacatgtcattattaagtgattgtgtttcctagagattatttttcttgttggctaaatgttaccgtaaaattatatatattttttaagtgtcttttttaaaagatatatatatctataatttttttaaaaagattacatatataattgcattcctttctatataccattaaactaataagtttggaaaaagatgagagaattggtgcagtataggagaaatgatgaaaggtactagtggtgttttagtacttttttatgggttaatattattattggaccaattaagtatcgagtctcatataatttaatgtaataacttttaaagaatattattagccaatcgcaaggaaagatatctagaaatattaaacactacgagcgcctaataacaatgttctgcagtatagagcaataaagaaatatttaaaatttcatttaatggagttcatgagccaacaccaaccccaaatgagatgaataatattaataatagggagatttcaaaatatttaatattggtttgttggcactggtaagttacctagcttatttattaaaagcaaaatccctacttttacaattaacacacattttcttttttaataaatattcacacataccttttcaaagcaaatattcacacatatttattgtacaaaatgcatttttcaaatttagctagtaaaataataaaagctacccgtagtgtctaatactatttaagatgttatatcattattagtataattaagtatcaagtctgtataattactataataacttttatgaaatatcatcaaccaattataaagtattacatataagtagtgctgaccacttgtgcctcattgcaatgcccatttaattatttatgaaatgtaaagagaaagtgtcaaagagaaattgaagcaaaaaaaaaaaaaagtgtcaaagatatatac

SEQ ID NO: 193827 - DNA, 1754 bp, Cannabis indica
ccacagggttaaccgagtgcacgaaaagactggacccagattcttcaattacaaaagagccaatcagatggctcctcctaactccattgttacagcttggagagctcgacacctcagtaggatcttcagaaagaacattaaaatccgccttcagcccaaggtccctctcactattgtcccaaggaaagtctctaacaacatccgggtgacgtctaacgattttgttaggacgggtgcagagtgaagcggagccctcaaaattcctcttcttgaaaggtgtggtgcgctcattagaatccgacgatggcttcactccaataacaccgccaattttcttaatttcatacaagtccaacttcccaaaaagcttaagatcatgaagtaactcttcttgggctttaaggaaatgagttaaagctctcaccttatcatcttggtgcacggccccactagcaaaaatctcatgtgtattatttttattcaccaaatccaccaattcacacccattcccacgtggcccatcattaccctcaaaattctccttaccaattaattccttaataacaatcggcctcactaaatcaatggacccagtagcccatttattttccaactctttcccacggcctggcccaccaaccataacaccctcactttcagaatccacattacatatcattttaggcctattactcaaaggaacatcactacccggcccaaaaaccccaaggcccataccactcttgtctttactcagcccaacttccaaaattccatcatcagtacacaacccacctttgaccaacggctcttcaggattaattaataattttgaggacttcaagcagggaagagactctgacttctttcccctatgattcaaattcacaccaacctcattaccattaacgacaacaaatgaagcacactcacttgaacccgccttctctttcacgccagccacgaccttggggacccaaacggcaccagctccatggtggtgcactgatcgaggtccacgagaagttgttttcgtctttctcagagccatggccgacgaagaagctctagctaccacttcctttccgacggctgggtctacgatcaaaaatggagcacgctaccccaaccgaagaccacgggcagtggctgaagaaaccctcttaagaacaaaaattttctcaagaaaatctttatgaagacgatcaggaaaccaaagcttttgataagcagctacagacaaaagagctttaacacccttaacagaagagggcaacaaaagctcagacgacgatgtaaacccaagcctttccattgtcgattggctcactaaacaagtcatagccaatatagacccagaaataaccatagcctcaactaactcaggataaagttcatccactttaaaacacaccatgcctccataactaaacccaaccacaacacatttatccactccaagcttcctttaattaccctctctctttcactctctctctatatatataaagcaatataattaattgattaatttgtagctaagtgccttaccataaaacaactaatcgcaacaagagcgtaaattgagatctgagtgttataagtgcaaagagaaaatttacaaaatacattattcccgacacggtttcaaacaacagtactctggcgcctcactctcatctaaacattcagacacaatctcaagccctcacgcctcactccctcgatctccctccaccatcgccaatccacca

SEQ ID NO: 193828 - DNA, 1705 bp, Cannabis indica
aaggtttaaaaaacccatactccccgtaaattctacaaataaaaaaggtcaattgttaaatacaaaaactaattacttaatacaaaaaaataaaaaacaaaatgagacaaagaaataaaacacataaacaattgaaagataaattgaaacacgaaaactaattaattagaaaacaatcacaacaatcaattgtattattaaaaaaattgacaaacaaaattggttatataaaacaaccaaattaaaaattaactcacaaaatttagttacatgagataactaaataaaaaaaccaattacttaaaataactaaattcataaagttacctcaaataactaaataaaaagctaattacttgaaataacaaataaaaaactaattaaaaaacaacacaataaaatacatctaaattactaaaaaaaaggtcgttactagtaatatctgaagaaaaaaattaaacatatagtataaaaacttaatatatgggaagaaaattccctaaaaatataaaattttaaaaaataccatataaaatttagctaaaaaagagtcatatttttgaaaaatatacatatattgtgtaatttaaatttgaaaatcttatgtaaatatatcacaaagtcatttatatattaacgtaacacattttttttaaaaacataatatctcatcacaattatatgtttttgttgatctattaatttgcttcaatttttttcaagatcttaatgttatattatttatgccttaataatgtaatataaattaaataagtgagacttgaaaaattagctccaactatacaaaaaataactcgttataatagagaatggatagggagttctctaaatgtaggcgactccctatttttttttttgttaaacttttttaataatattttaatccaaatcactattacttttctattatttttataaagttaatttatatttgataaatcaaaattataaaatattattaaaataataaaatactaattatcgtagagaacatagttgaagcaactataataaaaataattatctattttaattttttagctattaatttagctaaacaataaaaaataacattaaagacactcttaataaaaatatagaatggtgtatttagcaaataaacatataatatatttattatgactagggaggaaatagagtaggatggatagagagtttagaaaggatagagagtagaaaggatggagaggatagttgctagctctcctttgtattgtttggtgttaggaacttaggagtagagttggaaggatgtagggaaataaaaataaaattattatttttaatataaattataaattatttatttgaagtgtaaaatgatatttaatatggtttctgtctttttcttaaatcctttcattttttcaagagattgaaaattgtgtattaagagagtgcgggtcttccctttatctctcctctccttctctttccttcttgccaaataagggaatacatcatattagaaattttattataatgaaagaaaatcaagatgcattacaattttattgtaaaataatacaaaaattaaaataagagtttgaattaaaaatatgttacaacacacatatatacactatatatataaaagatagaagaagaagatacaacaacaatctggggcggaaccacatccaagagaagagtggccatggcc

SEQ ID NO: 193829 - DNA, 1832 bp, Cannabis indica
acttttatttaattttagtaaaagaaaatttaacatggatcaaagggcatgatttagtacatatcaaatttgaggggtatgatttggtaaatatcaaatggagcatggtttagtacataaacaattactgaaacaatgacaaaagtctttaaatctaacaatctcaataatttaaggttaatttttaacagccaaaagacatgatttggtacatgtccgaagaaaaaaaatcctaattagctattatattttgtcaaattttaacgagaaaatttgttaaggacaaacaaagggtccaaatattaatttttgaatgaattgtttagagagaataattttgatcatttcttaagagaaatgctatagcaatctttctgtctttgtctctctctcccctgtttcggattttattagttaaaatttgtaacatgtcagttagttaagtattggattgatattttcttttttcatcgttttatgaagtgtaatgtaaacagagctaactagaataaataataattttttagaatttatcaaaaaaaataataataataatttgttaggatttatttattaaggttttatttttcatttagaagcagggccggactgggccttaaggcccacttagcctagggtccaagaaaaaataaaaaaatatacatatttttagtagttttttaaaatatcacatttttcttagaaatactgtttcttcttcttccacaattctggcagtaagatgtgcggattcataattgtatatgatgctcccgtttaaaaaaatatatagttactttgattggtctcaagtattttgttggaattaaatgtatttttgctattaggattattggttgtgacttcatttatgttgaagattccggtatagctcatggctctccaatcctaatgagctgagtttctttttgtcattattattagaatttttagggtcgtttggaatgtcgtattaggtcgtattatattttatacaatatttttatgtaaaactatatgtgatattaatttttatagagatctaaatatataatattttagtataaatttaagtttaacatagtattatataaaaatataatatataatttaatccaatacaatacaatatgacctaatacgacgttccaaacaagcttttaatatctaatttttcaaagggtggtagtttaatattgctacctataaatggataaacatatttttttattagacaatagttttaatttttgttggtttgagaaaatttttcctcccacacacactctttatttcattataatttgaatatatgtgtaacattttaatcttgttagaggctaaaagtgtagcaaaattgttttaagtacattacctaattaaagtgttgttttctttctttgtaatgtaagtcttgatatactatagtggagtatcttgtcgttttgacaaccatgaaatggacgtaacatgtcgtttttagccatgcaaacaaggaaaaaataaagttattattccttttgactaagaatagtttaacacagccaaaagctatactacaaaatttaaaagtttcttctttttcatgcgttgaaaaaagtagtagattaattatatatgaaacatctactatactatagtactatatatatatacttctagctctagtggttgtagtgccagctcagctctaagcgtaggcgaactaggtcagtgcttcaagttcctgaatgctcaaatcttgaaatggtgaaaaaaaaattattaatatatagataaatattaaataataaaaaatatacaacaaatattgtttggtgtaatagttaaat

SEQ ID NO: 193830 - DNA, 2487 bp, Cannabis indica
gtctttttaccgcggattcatggtaaggagatcggagcccttgaagaaataaagcaaataggtgaggtgcgtgaacagttggctgatgttcgaaatcgctttcaagctttggagtcatcttctgaagtccgaataggacgaaaagcagaggttttaattggagaaaccatcatgagactgctagctaaaattggatactattcaggtaagtctaaattctatgtcgcataatgctagaattggaattttgtaatagttctaaattagttgtatgtagacatcgtaagttatgctacatttttatgcgagaaatgaacactttgaagggattttcacattattataagtacaagttatcttgttcatgaataaaaaatcttgaggagaatgtaaaatttagttcatgatgtttaatgatatcttgctagaataactcgatgtggcatcaaattcttatatattttcttatccttctacttaacagggtcttctcccaagtcttagagacatcagaaaatctttggcaaaggagcttactactctccaggaaaaaactcgactctctcatgatagtgaaagatgaaaaaccgaaagcagaggcgtgccctgttgagcttgtggaacaagtttccaagacggaaaataatgaatgcatgccaaagcagggaaagcaagaagaaacagaaagaaattcagatgatgtcctacggaaacattaatggtgcagtagaatctcaccaagatcattttctccaggtggtggaacctgaaggttaccgccaagaatcatcagtggcaagtgatctgaagcctaaggagactgattcaaaagccatcatggaacagaatgatgtggtgagagacgagtcgcctatggtttgtgaagaggaaccaatgaagtcacaagaaataggtaatgattctaagcttatgcaagctgatgaagaaccaacgacacaagaagtagataatgctcctgaacttgtggaacatcatgagatccctcttcaagatgaagagaatgattctaattcagaagtcagttcctgcaaagctgtcgatggatcaaatttaggtggtaaagaagataaccttttggatcaattgccgctggaagtaattgaagatgaacctgttgagtttgaaaaccatgtacaacaaactgaagtaagagatcgtacagctagcggggatgataaagctgaggagttaatggtggcacccgcacataaggaatgggagacggaagaactagaaaagttgcctgatgaggcaattgatggtgatgatcttgtatctcccgctgaaacggacaatcataatgaatgccaaggtacatgtgaagtgagctcatttgaagataagataccagaggaagtagctgaggagaagcctattgctgatacagatgaatgtgtaaaagttgaaactgaggagaacaaggactcagtgatgaaggagaccacacttttatccaaaccagaggaattgcaaacattgatctcaataggggaggagggaattaaaaatgttttgcatgaggatgaaagttcatcaatatcagcaagcactgagaaaaatggaaaagataatgagatgttgcagttagtcctcacagaagagggtattcaagagaaccaagaggaagagatggaagttcaagcagcggaccatataggatatgccactgatgagaaggtgaacgacaagtcgtctgagttggaaagttccaatgacgagatagcagctgggttgcctgcaacaccaaccttcattgaaaaaatggggagcataaacgataaacaacttattgaagagaacgagaaactgagggaaatgatggagaagctgatcgaacaaggaaaaaaccagctgaatgtcatatccaacctgaatggtaaagtgaagaacttggagaaaaaattgtcaatgaggaggaaactaaggactaaacagaacagagcttcaactcgtaaatcttcaggtgtcaaatgctcaaaattggggtgtgtaggagaaaggaacttggggtgaccgtttattcagtttgaaattttcgacaaagtgtaatgcaactttgtttcgacgcgggctttgaatcactttgtcatatgtctgtgtgtgtgtgagactttcctgttgtgtaatattaaagcataataaaaagctccttatttttcaagctattacttcggaaaccaaagagttcaagtttcttcactagttcactagttcaagtgtttctagtttcttcattttgagtctatagccttgctaaaagtactgcatataacaaagcccagtttctactgccgatattcatatctatattttggtttttatttgtattaatttcattgcattaattcttttagtagtttgtattgaaaatattgacactacagtttggcacgaagtatgttcattaagctaaacaaaaatgattttagaacaattagtagatttgcctgagcttatgattttagt

SEQ ID NO: 193831 - DNA, 877 bp, Cannabis indica
ttcctattcttattctcattcactagtaattatatttattaaattaaaaaagcaaacatatattaataatcgacactaattttatcttcctatacaaatatcacaattaaaaatgtatatttttacgcacatatacataccttaacggacataaggcaatctttgcgactatgtcaagtacggtatttacgaacttgataactttattgagtagcttttgaaccatatcaaagagtttggtcaaaaaatctgttctttctctaccatatgaaccaaatccagtcaagaaaattagggttgcaattaccatacacaatgttgggactttgaatcttgttgaccaattcttgactaagtaagatattgtcaatccaattatgttaacaagaaatgtaactccaatgctcacggaatagtgaatgaccgagtcaactaagcccatttcatcgctgatgagtttttgtaaggaaactacgtaaccagatttagccaatgatatgagaggtaatgaggcatagaccaatgttgtcttcttgtcttttggttctagggttgagaagaacaaaaaccctaatccctattatttaacaaaaacataattatattacataatcactaagaaagtacaataataattattgacataatgaaattgtaaggcaaattaagaaatacaaattcccaaatctaataattagaattttgaaattaagtccccaacttttactcattttgtattttgatccccgaacgacctccctttttatagttttcatctagtaatctttctcaattttcacccatttttttagttacaaactattcattaatttgtagcgaaaattctcaaaatcttaaaatcaagcataatattttt

SEQ ID NO: 193832 - DNA, 4516 bp, Cannabis indica
aaaataaaaaaaaatattataatagtagttcttacaaaaaaatataatagtagtcttttggttctataactgagataaaaagtcattagatctctcgttctcatcgaactctgaatgattcggctgctgacgctgtgatgtttgaggtggttgtagcggctgtgatgtctaaagtagttatagcggttgtgatgtatgaagtgactatagcggctgagatgtatgtggtggttgtaacggctgtgatgttggtgtccccatcattcattaatatgagtaggttggctgagcctggtgtgatggcgaaggttgctgtgatgatccacccatatcagtcgaacccagaaagaaagcagaaggatgctactgtgaaattcctctatacatgtatggatgtgtgtacggtggtccatacatgtaacggtaagggggtggagggtgcgatggttatggcaaaggctgcgagagtggctgtggtggatactaagactatgatgtcgaagatgtatgcatgtcaggctttgtcgttgaatgttgagaatgtgcaggggcaccttgagaaatgtgagtctgagacggttgaggcgctggagtggagtacttactcttaagcatattaaatattgctaactttgcagggtccatatttgatgggtcgatttgttataaaaagagattaaacatcacactaatgtcatttactaaatcttgtgaaggtgcctatgattgggtggattggacatgactagttgaagttgtacccttcaatctgcggccaattacacgaacgtgatcccacctttgaccaaatgtatcttcgaagaagctgacgtaattagatgatgaaccagaatcagagtttgtttgagaatgagttgctcgagctgcgtccaactgctcctatattaaatcaaaaaagtagaacaatatgacactaatattgagaaattataaagattaaattacaaaaacttacttaatcttgtttttcatattcattaacaaattgcttattctttttggtatggacttccctccatgtctcaatgtaatccgggttctcctctaatttatgaattaaacattagagattatacaatttaatataacttaactacaattatatttgaacttactaattcatggcacctcctagctaaggattttgttccttgggttgaaacatatttcatatgttcctattctttcttattttgttcagattgggcaagaaaagctaggttagtaaaaaattcacactgcctttgctattgttccatagttgttgaccttgcttctagccaacaacagtgagtcaaataataaagcgattaagtaatgtaattaaaagagaataaaaactgtaaagtgaacaccaaattttaaagaggttcggcctccgtaagtatggtaataggatactccccttgtattgtatcgacttaagagaaggaacaaagtgttcctcctcctgaaagctcttacaattgatctctgagtaattttttctcttagatctctcttttctctctagagtatattttgcgatccccttcatagtgaggataggtcactatttatagggacttaatgcatgagggatggttccgttttgcttacgatgcacaaaataagatattacaatggttctataattacaatatatgaaataggaaactagaacatgttgcccttttctctctgactcaatcccacaattatagggattttcttcgtgtctacacacaacgagattagtctttgaagtcgctatctcttgtaagtcgctcgacacaaacatgctcataactggtcggacatctcttctccacaacgttgctagatagctgactattacagatgctggatagtccttcataggctgctaaggatattttccttcgcctaggtatcagaaatatgggacacatgtcatttgatcctattaccacgtcaaggtgaaaaaaattggataatattttcccctaattctgcgcgggaccttattggttgcatgtggactttactcagcttggagtcttgtccagatgggtgacgtgtgtcctagccatcgaatggcgaaccgacatgactctgactttgagtctcttcaattctggctcatttaatactaattgacagttatgcctcaaatcatagctcaatatctgcgcttgctaacagttactctacttgtaatgagtacacaacgtatactttttgagggaattcaaagaatttgaattttgaaatgattacttctcttcttaggttgcttataaataatattagagacttttgacaatttcctcataggttctggtttgtgaaacgtgaccccattctcatttgcaagaaatatattttctcatgtttcgttcaacttggtatacacggtatgaatcgagacacacttctcatactttttatgtttctttttgtcttttggatgagtccttagactcatcttttctttcccatgtagttcgtggcttttgctcgtgttttcaatgtttgcttcggcattgcttgagttgggtttattccccgagctatattttaatacttttatttcgaacagagtttcctcctttttgacatagataagagcccttttattaaattcatttattgatttgactgggcgtccttgcaaataatcccatagctcgcctccaacagtagacaaatcagtagttatcccaacctggtgtgttgtcaactgatgctatcattccaatttttaaactttgctgttattgtgccaaagtgacttagaattgctttcaaggattctccaggctgttttttgatgtttgtcaaggatgaagcttttggtcttctatccctcgcaacttgaaattgctttttgaattctttagacaattattcccacgagatcatggaataacttgtgaacttatcaaaccaactactcacttcccctatgagtgatgtggggaaaaatatgcaacacaagttataagaaacattacttgttcgcattattatattaaagttattcaaatgtgcaactaaatttgtaatttcattgtattgtgcgacatgagggttcttgaatcctttcgaaaattgcgagtttaggatatcagggtgaaaaggttatgggtcttcatcttagtcataacctggaagctttccatactcgccatcctgatatttcctaaaccgatcctccaactaaattatcctttgctggatggagatcagtgggttgatttgtttgttcattcgctcgctgagcatttctattcaatctttccctgagattaggtgcttttatatttatttgattgtgcagatcagggcgtctttgatttattgatctcgcaaatctctatcattgtaattgctcagtactttacaactcggggagacataattgataactttaaaagttactcatactttcttattcgcctcaatattcatattgaggtgttctctcctcacgtggtgggttttcccttgtacgtgaccttgaggatcgagttttccctcatagtactaatagttagttatattaaatatggctatataacataaaatattatttttgctaaaaaaatattacaattctaatttaagcttaatacatacatatctttgttatttttttatcttatactaaatatgattatataatataaagtatttttttaaattacaatttaacttaaaatctattgtacatgttaaaaaaaatatctttctgttattattttttttagtcaatctacatattaaaaaaaatatatctttctattattagtttcttcttaaacaataaaaatagaaaaaaaaatatatatatatgtttcttaaagaatatatggtgatgaatatctttttttttaaaaaaaaaatacataatatttctaaaaaatgaaaagtattataaattgtaagtattaagattaaattaaaattataattaatcatttttttaaaatattattataatttctttaataacacttagattaaattctttttattacaataatattattattggataatataaaaaaaaaactattatacaacttaaaatatataataaaaataaaaattaatagaaataagtatatatatattatagaggttatattaacctaatatatatatatatatatttatagaaatataattaacaaatcctataattaatttttggaattcacaaactttaccaaccattaaattctacaaacaaatatgaacagattataaaccaaaaccacaaacttataaaataccatattaactaatcctttaacaaacaataatcttattatcatatacacatataagtattttttttttcttttgaataaatatacacatataagattaatcatattcaatgaaatctgttacttcgccgcaacttctgcctctctatcaacatctaattaactagtctattttctttacctaattatctgcattatacccttatcattctttttcttttacaaatctattagtatat

SEQ ID NO: 193833 - DNA, 725 bp, Cannabis indica
acaattttcacaaaaacaaacagttcaattaccattaacaaaaatggtgtcagaaactactattttttgaattgtttctgtgtgagaaaaaaaacccagaaattaaaccgaatgagattatcaaattatggattattttttattaaaaagagatgagaaatccagctatggtctccaaaattaagaacctacgagactaagttttgtccctggaaagcctcagatcctcgacatttgacagttagtcctgtttggctcgtctgaaaacaagatagaaagtagaagaaaatggaaaaatggaaaattttcacagaagaaaagaaaagcacagagaaagcttcttcttcttcttcgtcttcttcttcttctgattagaacaacgaaatgctctctcaccctttcaaaccttatattatataccacccttcataaaacgccgttacattataaccgtctaactccctgcaatcctgaccctccattcttcatccaacgcttctgatctcatctctctctgtttctcccgttacgtctcttaactttgacgacgttaatcgtactaaacggaatattttacgtcgttatgttatgttatgttatgggcctccttccttccattacattccatccatccatccacagcttttgtaataattaatttaaattaaattaaattttgcttgtgtgaaatgaaattgatctaaaatagtttttttattattatt

SEQ ID NO: 193834 - DNA, 820 bp, Cannabis indica
tgtgaatgttgaagtctttaggggttactctttgtttgactttgaattgtgtacaatgactgcttaaataattgccttgggtctctatcacttcatagctttttttctttcatttggacacggaagttgaagtggggattaatattttagaaaaagaaacaacaataataataacaataatcataataataataattaactcttgtattatcatgacaggtgcatgaaaaggaatttctgctcaaggatttaactgttgaaggattaattggtgatgacagaagattaggtgaggtctgttcaaagagagtgtatagaattcttatggcacaaagtggatctatcaaaactgatgatgtagagaatggtgctgctttttttgcacatcaatcatcctaaaatgttcattcttcgttgtaagtaatccatgtctttttttgttatccatgtctttatatttaattgcaagagaagtgctaatgtctttttcttttatccgtgtctttctatttaagttgttcatatttctctaaattattattactacaagtaaaactattataggtagattttaaataaaaaatcccaacattaagggcatgtttactaattcgcaaggaagaattattggaaagggaacgtgttcaaagaggattaggggaaggagttaaaaaatagtcatccttcatttaattaattaagcaagtgatttgtttgaattcgtgtttcaaatgatgttattcactgcataaacattagtatgattcaggtaaggttaactcagaatcctcactgacctgagctagctttaagtctagct

SEQ ID NO: 193835 - DNA, 2097 bp, Cannabis indica
agaaagatgaatgaaacatgcggtatcaaccattttcttcggtattcgatagtgtgttcacaccaatatatactacacatactagttaagttagcaaaaaaaaaaattatatatataaattaataaagatgtttgtaattgtatatatagcaaaccctacttctcatcttcgatcttctctagtactcttctctttctttttacatatttctctctccaacttcactacaactgtctagatcaaaaattccatgcatctagccttcccaataataaggtatacaatattattagctcatgtacatgatcactatatactataagtaacctatatatatatatatatatattaattgttaatcagcgaaagtggctgatcgaagagggaattatcatggtgggaagaggccctttccttccgatggtcaatcggaagatcagaaagaggagcaagaacccatcttcccaatttactcagctcgttcccagcaagacatgtcggccatggttgaagcccttgctcaagtaattgggagcaatcaaattaacatcaataataatcatggaaacccttcctttatcacaaccacactacataataatcaaccccaattatctcatgatcatcataataatcaaggtaatataaaagtctactgtcaataatattataattattattaaaattttaacatatatatgtgaagctaattaagctagtaatatttatatttatagatagatatatatttactagtatacatgataatctctacaagcaattaatctagctctaaacatttttatatattattttcttgattttttgtgcatcttttctagatctacatatatagttgatatatatcttgttttccggctttttattgcattatagaataagtacttttgcctttcattcttttttttttttttatgtatggcatggatatgttttacaaacttgtaagcttgtaaggaaagaaatattttagaaagttacatgttcatatcttctataaatatatataactaaaaaaatcccaataaaaagctaatattattagttctacatgatttatctaattagtatctcaattcatttatattaattaattaataattacaattatagattaattttccaactatatcattttagtttaaatgttgtatacttatttatattgtttgaaaagatttgaacttttttctagaatgcaagattttatacatatatgcataatgcgtagtacttcattaataataatttcttcatgatggatcatatatatatatatatatatataatgataatatgcatgctaaatgatgagcaagagctatatatatattgtagaatacacggttataactttttgtcttcttttttttctccctaattattagtgggaaatcaaggttagaacatataggatatatgtatgtacgtagttatcattattttatattagccgaccaaaataataatacatatttcaatatagtgtgcgtacttaaaggtactctttaattatacaatgaattttttcaaaattagttttgagttcaaactatacaatatatacaacacatgataattaatattggttggaacacgtattcatcacatgtgtgtgaagggaacaacaatgttgagaggagaagacactacagaggggtgagacaaaggccatggggaaaatgggcagccgagattcgggatccgaagaaagcagctagggtttggcttgggacatttgacacggcggaggcagccgcccttgcttacgacgaggccgctctccgcttcaaaggaagcaaagctaagcttaacttcccagaaagagttcaagttggaggagtagcaacaacatctagtactagtcctaataataatattattactaatcattatcaattaggtactacttataataataaccttagtaatactactactactaatcaagattatgatcatcagtcttatactactactgctcctcttccatataattataataataataataatgttatactttctcatgatcaacaaccgagcttacatcaatatgggcagtttagtgggtt

SEQ ID NO: 193836 - DNA, 1383 bp, Cannabis indica
cataatcgtagtcgtactgtctcggtggcggtgacctgaaattcgcgttactatctctagacccaaatcgatcgaatcgatcatcaccaccaccaccaccactaccaccgcctcgaccagctccgtctccagcacctccacttttcttctcaaatagcgccaattcgaggcgttggtcaagatacatggcgtaagtcctgacaaaagctgagtgatcccaagaactagaatgggcttcgtccctgaaatcagacaaattgagaagcctggtccctcttctggtagcgaacaagatctcttcctgaaacaaaggatccccttcattaagcaaacgatggatcagcatcaaagccttgagtgccacaatccagtcgcgcgtcttccccaaacgcttcgaaatcgccgtaacacaggcatgaacgtaacctcgagagtaagatgtgagattcaggatctctcttgtgtacttctcgctagccggatcatcgtcgtgactagtcgccttgacaatcgcaacctcaagctccggcgccatgttgctagccaccttagctattccaatactagtctggtccttcaccgccccaatcgctttccgaatcgtagtcggcgccatctccaacaacttcctctccttccccgatccgtacctaaaatatcaaaccactcaaaataaaaacaataattaatttttatctcaaaaaagaaatcaaaataaaaaacacattatccgtacataccggtagtgtcggtgttggtgtctagatccgccgccactaaggtccgacggctcaaaacgacgccggatccggagattacaatcacctcaacaactggtagttgaccaaaccaaattggatctggagaagcttgatagactgtacgacgtcgtataagtaactagtaaccaaaaggaaagctctgaagctcgttcgttattctatacttcttttctttctctcttagtttttttgggtttgttaatttcgtttatttctagttattttttttttttttggtggagttgaagtgttttgtttgagttggggattgggtagcaaagaaaataagtgcagaataataattaataaatattaggggagagatttgtggttagttgatttaagacatgaaaagatcagggccgttgatttgggtaaagtagctgtctttgttaggacaaaaggttgagccttgggcatctatgtagtactgcgtgccttattttagtggcaaatacgacgcgtacggcttacggtgattcggacaattcccattcctttctccaaattacatcacacgtggcgctcgatcccctgtcctacgtctctgacggtgacaatcctacggcaatcaaaaatttattttcactttttttttttt

SEQ ID NO: 193837 - DNA, 925 bp, Cannabis indica
gtcgtttttgctattattagattaaagacacaatagacaaagcctgtgtgagccttcattatataactctttccctccttcgacaccagtttgaccatttcatctaaacttttttctcttaatttcattaaccaaagatccaaaagcttcgatctttacattttttgtggaagaaaaacagagctttatagagtttgaaaaacagagggtggtgttgtaatgaacaacaacaataacaacaacattaataataataacatctctgaaaaagtgagcaaagatgaatcaacaaaatggattcttgagagaattgaaattgaccaaatgggtgattttccctctgaccaatcagaggccacagccacaccaccccaatgctcaaatgggatttgtttgaccaagattaataatagctctgggaagaagaagaatgttggacagagtaagccaccaaagatcggaagaatggcttctggagcttcaagaggccttaaaagtcttcgttttcttgatagaactgttactgggaaggaaaatgatgcttggagatcgattgagaagcgattttatcagcaccaagttaatgggaaactctgtcgagacaaatttggtgtctgtataggtaaagtttgaatttttatgtttgtataggtatgtatatgtatgtatgtttatgggttatggagtttgagagattttggaaaatggggttttgtttttttgtaggaatgggaggagattcaaaggattttgcaggagagttatttgatactttggctaggcgtaggagtatttctgcaaaagatgggataaatgaagatgttttaagaaaattttgggaagatatgactaatcaagaccttgaatccagattacagatattctttgacatgtgagcattcttactctctttctctctctctct

SEQ ID NO: 193838 - DNA, 999 bp, Cannabis indica
tctctctctctctcttcctctccctctctccctccctcccattgtctctctcttccttaaccagaataacaaaattaggatacatacatataaatgtgaacatgcatacagaagtacaagaacaaagtgaaagggagaagaaacaaaaaacaaaagagatgaagtaacaaaataccaaaatggaagcaatcgaaaattcaaaaaccaatttaagagagggcgtaagcagaggagtatatttcttatagtttgatcattataacttcatcgattacaagtgtcaaattattttatatttttttcctgctgcaccaaataaagagaaggaaaaagaatgccatttgctagggtatgccccccacacaaaatcgaacattgaatctaatgagagaaaccatgagactgactactcatacctgactagagttttaattcaacagaagaaaatacagctaagaaaaagtataatgaacaaggggaatactaaacgtcacaagaatttgaacgtacctatcaacctgatctttagtaaaacaaccaatggggttaataggaatctaactgaaatgaaattagaactttcctatcgattcgttttttaagtttaaagtagtaagtaattacgttatattttttattatgaggaataatctcaaaatgatatagtgaaaaacctggttctggtctgccttttattatagacctagtccaggatcttagctatatatagtcattgctttacaaatataactaacaaaagatgaatcgactaaccttttcgcttctctcggttatatgaacactaaggcatcctgagaatgcggagccgttgcagtctgcagctgacaccactttcactcctccacaactcaacttaaggacattacaataacaaactatgagcacgcccttcttgaaaggaaatgagcaacataagctgaaacccaattggagcttcattgcaagcaggataatatatggactcagctaacatacttg

SEQ ID NO: 193839 - DNA, 1244 bp, Cannabis indica
gaagatttgtttgttcaagtaataaactcttacaagcgagctggttcggcagagcaggctttgaagatgttttataggataagcgagttcgggtgtaaaccaacggtgaggatttacaatcatattttggatgctttgcttggtgagaacagatttcatatgattaatcctatatatattaatatgaagaaagatgggtttgaaccaaatttgtttacttataatattcttttgaaggctttgtgcaaaaatgatagggtggataatgcatgtaagttgcttgaagaaatgtctaagaagggttgttccccagattctgttagctatacaactatagtttcttcattgtgtaagcttggtaaagttgaggaagcgaaagctcttgctgttggatttgaacccatattgcctgtgtataatgctttgattaatggggtgtgcaaggaatacaaaattgatgaagggtttgaattgttagctgaaatggtggataaaggaatcgaccctaatgttatcacttactctactattattagttctctttctgatgttgggcatgtaaacttgtcttttgcagttttagctaaaatgtttgtgaaaggatgtagtcctaatcttcatacttttacttcattgataaaagggttgtttgtggaaggtagatttcatgaagctcttgccttgtggaacaagatgattattgatggattagagcctaatgttgttgcttataatactcttatccatggtctctgctctagtgggaatgtgaatagagctgtatctgttgctcatcaaatggagagaagtggttgctcaccaaatgttaacatatatagcactcttattgatggctttgcaaaagtaggtgatcttgttggtgcatctgagacttggaaccgtatgatgaattctggctgtcgtcctaatgtcgtagcatatacttgcatggtagatgtactttgtaggaattctatgttcaaccgggcgtatattctgatagagaaaatgactgcccaaggttgtcctccaaatacaatcactttcaacacccttatcaagggattatgtgggagtggaagagaagattgggctctagaggtgcttgatgagatgtggagcaggtatgattgtttgcctaacatcacaacatacaatgaattattggatggtctcttcaaggtgggaagatttaaagaagcttttgagctcattaggaagatggaggaaaagcgaatagaacg

SEQ ID NO: 193840 - DNA, 1076 bp, Cannabis indica
attgtactctcaatgtcactaatgtgtgtacaatatattatttgtgtgtaaacatgttggttctctctcttcattttcaaactcacgagttttgaatttatatatacatatttatattgataatgatattgaaggaacactaaaatttctatgtattttttttttgtctacatatatagcatataaccattattataaaatattatgttatttgtatatatataaatacaattaggatgaaggtagaaataaaatataggtgaggtaatttatctatttttatagtaaaatgttaataaaatttttatagtaaaatgttaatttattatattgctattggtaaaatttaatattgaatcacatttattgtatttttgagtgatgtatatgtttttgacacccataaaaaaatattactattaaaaatgctcttactattagattattttaaaacaaaaagtataaaagtgatgtgaaagaaaaataaaataaaatattatattttcaagtaatataaatttaacaccaataaaaaaatatccctattgaaaatactctaattgtggtgttagtccaataatatttaataacaatacttattttaatattatgtagactttaacatttaaaaaaaataaaagtatatgaagtttttaacttgtaatctctttaaattttaagaatactttactagtgtcactagctacaccaaaattttttatttagatattaaccccaattaactttgaaccaagctaaattctagtgtagtggaggatcggatgagtacaaataattttattgttaagaaatgcaataattaattaacaatatcactatgagtcttttttgtatgtagttggttttttagaaattaatgcatcatgaaattaaagagatgagtatagagtgtcactaagtcaacacgcggctaattttgagatgttcctttcaaatttaacacacatataatatatatcataaatcatgatataatcaatggaatcttaatttgataagctggataaaaaaaattaagaacagccatgggttctttttttttttttttttttttc

SEQ ID NO: 193841 - DNA, 1305 bp, Cannabis indica
aggggttcgaggtctaggccaggagtcaggttcgagattgggtctgatgctggggctcagaactgagttcgggaccgagcctaatgtcggggctcggggtcaaaatattaataatagaaaatataaataaattataataaaaaaatctatttaaaaaacttttgaaagtgattttcttttattttcaatatttttaaaattgtaattttcaatttttaaaataaaaagtaaaaataattctatagaaattaaaaattgataagaaaaatgttataagggcaccctaatttttttttaactaaacaaacgaccaaacgacaattaaatgttggagtccttccttccttccctgtcgtaaaaactatgtcgcctcgcttgaaaattaagtcgtgacccctgaatcgtgatgacattgtcggctgaaccttacactcttcggttcggataggatcctctctctctctcaatggctgtggctgttctggccttgaaccaccaattgttttgcttctcaaactcaaaaacaagtacaaaaccatggcttcccacctcaaaatccacccttacccatctaaaactcattcacagaaaaacccattattcctttatctcttttcttcttcttcatctacttcacagtcccctgaagccaatacagacactgccgagtcttgtgtcaatttgggtctccagcttttctcaaaaggacgggtattacttttaatttgtctctttgcttctgcgctgtaattccatttgtttgatgctgtattgtattgctagctttcaattgttgggttctgatgccataactggagaattttgaggttttgtggtagatgaactttatgctctcttaaatgttctttgttgagtttcttagatgatgcattgctcatattgattgataacatagaccaagtttagtttaatatgtcttttttagataatgttgtgttgttacgctttcttgctcatttaacaatacagctgcaaaatcgaagtaagttcaagaaccctgaactttggacactcaataaacaatgaagaacatgaaaacaacttacacacttgaattaaagatgtaattctatgctctctagttacaactttctgaaacaaaagaactctcaaaacttctcaacccaaaatttttgatataaccaattgactacgtttttttctactctctcactttacattgcatggtagctcggttttagagtcaatgatcataccagaaaaactcactttctgttagttactgaagatgaaagtcagagcaaagcagagagtgttataact

SEQ ID NO: 193842 - DNA, 3374 bp, Cannabis indica
ggaaagatgtacaaagacaatgtataagaggtcaagacgcccataattgattatactgtaaagaaaagtccttgtagaagacccacctaagaaaataaacacttcatttagaggaagtcagcttaaaaattattgtaagttctatagttttattagaagaaaagtacacaaacctataatacaatatgacaaattgtaatggcaagtggtaagattcatgccaaattgtaagtttagaagtattgacattaaatcacggcaaaaattatttgagcacaataatttttatatcattatatgcattagaccaccagttgcagcgatagcaattgcaacagcataggctgctgcgagacgattataaattaatacttaaaaaaaatgtctttacatatctaatatttaaactagaaattaaataatggtcaaaactcaccaactgaatggctaggtactggataagatgtacaaagacagctcaaagacatcgcacttcatataagtaactttgaaacacaatattggttattgtataaccaagtcaatgtccaagtaaagaggccaaagccacctgagaaaacaaactcttaactgagataaactcaatttttcaccctcagttataatccaaactaatcaataaaactgaaagccgaagtacaaaataataccaactaaaatcaataaccaatgcagaaaagttaaagacaaatggtaattttgagtagattgacataaataccaactaaaatcactaaaaaactcattaaatgcaagctgattacttaataattaatataatgagttaagaatttgcactatataatggtcttgcttcctgcaatccactcctccaagttatgtaatagatcaccgagtgcactaatggcactgcgctgcattaaaagctgggatccatatacaaaacacaagtaagacagaacaacatcaccacatgatccacccaatttggaatagatgtacatatctgtgcgtttcttcggccaactcaataaagacagaaatgggcgctgctttaatcctctaaaactacatgtagatgtaataagataagcaagcagaggcttcctctattttatccacttttctgtaagcaattgaaaaaaaaatcaattaagtaaaagaaacaaaaatattaataacacttgttggggctctatactaacaccgataaagtataaatcttgaaaggtaacccccagcgcaataatgttacaaacaaggtaacccataatttgaatatgattactacatcttctactactaaaatatcttagggtccagggagccttgagttattcatttataaacaaatgtattaaatcaaagtcagtatagaacttttaaataacacattgtataatgtaaacgtcatctggaagttgatcaatttgtttatgtgctgcatacctcctttgcatattgagcggattataagggacaaacgctgtgtgtcactgtgacacaggactctgtgttgactgaagtcaaaactgtgtgaactactatataaagtatgaaaagtatgactaaaaacttgcatgggacaatttgaaatgtccacaagtagttgcagactgcagtaaagtgactacgtaaactacaaatcctattcttcttcactaaaaaattgatgcaactacaatttttacctactgctgtgctagctataataaattataaacatagaagcttaaaaggtagtgttaatatatttttgtagttctgaacttctgaatgtgattttgtacatgaattacatataagtagggcaattgcatagtatacaattacatgtgaagctagacataacttactgatggcgtaacattttacttacattatgcaaattagactataattctgaaatgagactaacatatctgatatcccaaagaattgtataagaataaaactataagttagaaaacaaaataacgactattctattctacacactagttttattgaaatcacaatcacgtgtaagcaaaaaaaccaagttagcttgaaaattacagtgagccactttagacaacaacaagaagaccagcgagaacattattcattccaatttgtgattaaagaaacttttaagaatcaaaaaatcagactgagagagtgaacaaatcctttttgaataacactagcaaatttgacctatagcaatcttattaaaataaattaaactaacaggtattaccataatcatctagatccatcattaaatgccattggcataatcatttagatccatcattaaatgcccttgccaaaatcatccaatgcatacaaaaaaaaagaaaaccaaataaagtaacaaacactattaccatgaacatttacaaacatacaaaacacaaattgctcaatctatcttagctcattgaccacactaacaacaaccagtatagataacattacaaaattgatcttcaaatttcacataccataacactacttctgacattctccataccaataatagtattccatatcattgtgaaacataaagattaaacctccactactatcccattgcaaaataaataaaatcgcgcgggaattgcagtaaacacaaatcgcttaatctataatagctcattaaccacactaacatccagtaaagatacattacaaaactgatcttcaaatttcacataccaaaacaaaaacaacttctgatacaaacacgcaacaaaacttctgacattctccatactaagtcgtattccaatatcattgtaaaacataaacaataaacctccattactattcaattgcaaaaaaaaaattaaaaaaatcgcgcgagaaatgcataatcgatagatagaacagtagatcgaattgaaataagaacaaaaaacgaggttttgagaactcaccgagtgatgaagagatgaatgaacctgatctgaaactccatgaatatgtttttgagtatgggattgaagatagaaagatgagagtgaaaaacggagggagagggaattttgtttgtgaaagataatattttaaaaaataaataaaaataagatgagtatttatattttatagcgtgccgttttgaatttcgacccaaataaagccgagttgtttgtatttttcttctatttttatgaggaagccaagccaagattaggacgagagccacgctgcctcacgcgccgcttgtggatcggttttgacctgtttaggaattaagcgtggaatagctttctttttttttctttttttttttttttttgtaatataataactaattttattactgagaattaaacaatacattagttattaaataactctgttttttattaattaactaaaaatagtttcagagaaaattgatt

SEQ ID NO: 193843 - DNA, 2996 bp, Cannabis indica
gaagttgcaccaaactaaaactagacaaattatcccaaagaattttcctttcagctatggaatttttcccataaacttttgtaataaaaaacttagaattaaggccaatgactttgaccttgcaatgaatcagttgatcatcttcaaaatcacctctacatggacaaacttcttttgccataataacaaaatgcacccctcaatggacatactagtatgaaactcccatttagaaaaattactacacatcatactctttattttatcaccccgaacctttgattcaacaaagcagcaaagcctatcctattcaaacgacaaacatcctgaataaatctttgtttattaacttttttaatgcatctcactttctaactcaagatattacaccactccatttgggagagaagtagatttattatgaatctcatccaaaggctctgcaaaacctcaaaaatattacttattaaagcattcaaactaactccagaattacttttattatttttttgaattggcaaattcttgagaccttttatatggggagtaatccattggccaccattctatgaattatgattcccagacatcttttccacttctgtattattaccctcctcttttccttattatgctctatcgaactattaacttgtttagactaaattggctttacatcctctttatccagtttactaacatccatttttccttttccttggtctgtccttattttcttcatccaaactaggcccttgtcttttgcagaagaattaatattgtgccccagaagaccacatgcaacacaagaagtaggaagccattcatattcgattggctaacccaccagttgtcccctctcattgaagaaactaggcccttgtcttttatcatcattcgttcacttgtaactttgtcaaatataatcagattacccatagtgctcacaagggcactgagagtatttctacctcagcattgaagccctaagccatttcggcaaatccaaataggtactgttttaacaagcttgagagaattgaggttagaagtccagggtctaattaccactggttttttgtcaaaatggataactccagtttccaaaaccaggttcctagtagcttcatctctaaagctaactagggtgaaaccagagtgcattgttacttccgtttaacacccaaattttcccaaatccttttgatgaatcaaatacacaaaacatagggttagctctgagaacaacataaatgatcgagtttttccaattagaggcctcgacttctacctcatcgatgtcaattttagcaataacctgatcaccttgtttgattggttgagtaaacttaagcttagtagagggtgtccttacctaattaactttgaattagtctaagctttcttcgctgatgattgaaagtcattcacctcagcttgcccaagataaaattccatatcgattaaaatcaaattcatttgaaagctccaaatttgttaccaattccgacttagtatcgctttgagtttcattattattatttctaaaaataacaataataacataggttgtagttgtattaaaaagaaaaagtagaggtattttgtggaaaggaaatcttaaattaaaatacttaacacaagttacaacttacaagatttctttcttgttaaaaaaaaaattacaagatttctttaaaagattttttccatttaaaataaataaatatatagataaaaagaacactcagccggaggcgcgtgcatgtgaccgccacaaggacaccgggctaacttgcgcaccttgcctccctctccctccttcccaagctttctcaaaataaataaataattgcagtttggtccttttatcccaaacgtatatgaacgtaacctagaattttgactttccaacaataaaataaaaaataaataaaaaagctttccaaaaataaaaactaaaaagtgtgtgagagagagagaggtaagaaagaccgtttcgtttctctaacatgcgccatatggtattcacaaccacaaccgccaccaccatgccagcgtcgtcctccgccacgtcatcatcatcgtcaccgagttccaaggcccccaaatcttcaaaccctaaccctaactctctcctctgcaagcactcaccttcggccaccctcgacctcctcatcctcatcctcgtcctcttctccggcacatttctcgttacctcatacttctcctacatcttcaattcgctctctctccttctctccacctctaccttccatatccatctccaccaccaacaactcccttacattatcggcttcgtcgtcttcttcctccttgctgtcttattcgtcgagttctgctgcggctcccgatcgcgtaagtgcgataagcctggatgccagggtttgaagaatgctatggagtttgatttgaaattacagaaggaagacgctatcaagaatggttctaaggagatcgataggttgccctggaagggcggcagcgaagctaaccctgattatgagtgcctcaggtccgagcttaggaagatggcccctcccaatggccgcgctatcttgctgtttcgtacccggtgcggctgccccgtcgctaagctcgagggatggggacccaaacgtggtcggcggcataagaagtgagtgagtttggttttcttgattccactgtaaccgtttcttgcatttcatttgtgcaattggtaattttgaatgcagtttctgtgttaatttaatcaaatgcattttcaattcgtattgatttggatcgtctttttcaagctagagccttcaagatcatttattccatacttcttattgttcaattcggtagtactctaaaaaataacttcatttctataaatttttctatattagtttaggggtatctgaagattttatcaagaacttttaacaagtgtgttctctatgataggatagcatagaattaataattacgctacatatctgtggatg

SEQ ID NO: 193844 - DNA, 742 bp, Cannabis indica
atgttgggtgggtgtttgtgccagcacacatgttctcctttcatgcctaattctctcaaatgtctcctctaaaattttttgggacttcctgcaaggtgcagtacacctgagattgtcgctacattcccatcaaccggtggtggtgccaaccctttggggatatgtagatctcgaagccatcaaagccatcgtagtcggagctagtggagtagggagtgccagaggatttgttctgggaacttgagggtgacttattccatgagaaggatttgcaataccttgctatccaaaaacaatcacatattcatgaatgaccccctatctaatatatatgatgggaacctagacccattgccccaaatgccccactcttatcaatgtttcgatttcatcatttaggaagtcacattcattcattgtatgtcccacgtcccgttgtattcacaacacctttttgggtctctggaatttttctccttgaggcattctagtgggctacctataatgaaccatgttacatgttgccttatatacatttccatgagtgtccacaagactaaagtacctgatgtactttgtatcatactctttcttggatttctttaaggcttcttctcgtcctagacctcttccccctcttttgctcagggagttactcacttcttgctctgttaccccacttttgattatctacgtgccacactacatccaatttacactgctcctgtaacaccctaactag

SEQ ID NO: 193845 - DNA, 1880 bp, Cannabis indica
gaatatctcagttattcattgatcaatggtaaagtatttatacaagtatagcaacacaagaatcatctaacaactaatgacatcggcaacaataacagaataataaccactgacagttagttgtgtaacaaacgtaacacatcagtaacaactctgagctgtcaatcagctctaatctaacaataaggaagctcagatagtttttgttttcattttaaaatggatgacattgtaagctgcaccaaatcttaccctccaattttttagagaatgtaggctaacactatatatttattacaagtttctaaagaatatataaatcaatcaatttttttgtatttattgtgcttctccttttccctactaataaattacttacagcattttgggatcaaaccatgtaaatcattcacatgtcgcccaatttgagaactggcaagtatcgtgaaggtacaatatttttcatgtatttaaagtatgattaatccaaaaagaaaagtctctttgatcagttacttagagaacaaactaaagtgtagacaaattacactaccagccttattcaaaaacaagatacagcttggtgtggttatccatcaatgacattttagatcatatattctattgttattatacaaaacattcattctaacttgccaagccagatgcttatgcttttctataaacagagtaaaaatgctttaaaagaaaatgaccatgaaaaaaatagacttttgctttatacatgttagttattttagttaccattcaaggtttgaacaaacttggctagtgaattttgcaagtatgcttgatattcttgattgacattggactccagtaggttcaaacaacaggcagtgcttagaatttcagttccttttgaaggatgcactgccttgagtgtgctactactcgacaatgaggattgaattgtgctttgatcagtagcttgtatactgtttgtgctttgtgatgagccaagagaaggtgaccctctgtaatcataagccctataagtgagaacatatccttctaatattttcaaaacctgtaaaagcgttcacatttatttctgagaagattttccaaggaaacaatatgtcagaaaatgaacaaaaggaaaaagctattctaattgatgctaaaatcctaacataagaaacctttgacatccttggtctttgttcagggtgaggtgagatgcataaacttgcagcatacatcatacattctacttccttcttttcataatttctctccaaccgagagtctatgacctcatcgattttcatacttccaagtaatggggagccctgcagcttatagttttttcatgttaataaacaccaatagtattgatcttatagaaatttcttgttgttatacagttaacttgcccattctgcaacaaattgttgtcctgtttttcttgaaaattcagtgacgctgaatccacttaagagctccaacaaaaccaccccaaatgcatatacatcagctttctctgttatcaacccactctgtgtgtattcaggggctaagtacctacaaataataattcagtttataggcttgagatatgaaagaattgatagtttttgtaggaagtaaaagagtctagtaccccaatgtaccaataacacgagtctcctcggctgactgaccatctacttgccatcttgctagcccaaaatctcccacctagttatagaaaaaatattattacgatgaaggcttcaaaacatggggactcaagaaaaagtctgtcgaagaaattcatggaagcaaaaaaagtatattcaagtgaaaatactaaccattggtcatagtcatgagtgagagaatgttgttgggtctaaagtctctatgtacaatgc

SEQ ID NO: 193846 - DNA, 4075 bp, Cannabis indica
tttttttttttatatattttaatacttagaaatgttgttgttttgtatgtttattttcatgatattttgttctattttattacttagaaatattgttgttttagttatttcaaatttttagttgcattacacttgtaaagatgatatttttatggagtattaaacttaaataaaaagtaatatttagtttttacgtatttttttttatatatattttcaagataatattaaaatttaggtgtaattgaatatccaattaaacaatcgatttgacccaattagtaattagattggattttgaagtctaattggattggattagatgatgatttttcacatccaattggatcgaatgatgattttctacatccaattattaattagattgaattgggtgagaaaaaaaaattgaattagataggatgctcaactcttaacttataattggagaaacaaaaattttaaataataaacacatcatgattttccttaaaaaaaaaatagatacaaattaaaaatataaaatatttatttccatccaaaatataaattatttacataatatataatatatgttgtaaatgttttactatgcctcaaatttctttttattaaagtaaacaagaaaataataaatttttagtttaaacaaaaaataaatgtagtaaattataaaaattattctaatttatttaaatttttttgttgtcaatattgaggttcattcataaacttttagagtgtaaagataattttagtagttttttttttttttaattattattcattgaaacattgaaacataattttagtagttttcaatattgaaacattttaattcattattcatgatttttttccctcttttattgggttgtaaaattacatatttttcatctgttgataagagtaaaataaaaatactatatttgcacacaaaatttgcactgtttctctttattttttaagctgtgaatctttcttaacttgttttcaacaccttgctcgatcatgtcatagagcgaggccacgaattggtggactatatcccaggaatccgttcaactcagctatcagatatctcagagaatttttttgagaaagaagatagtaaaacaatgaaaataatgttagatgctgtttcaaaggtgtcccaagcacaatattttgtatcttcttcagtatatgagcttgaatcacaactctttgatgtgttaaaacccaaattccctttccccatttacccaattggaccacttaccaccattaatgaccctcaatttcatcttgaaagtaacaactatattgagtggctagattctcaacctcaagcatctgtgttgtacatttcatttgggagttttctttcagtttcgaagacccaattggatgaaattgtgtgtgggataagagctagtggtgttagacacgtgtgggtggcacgtgagaatgtgtcaagtatcaaaaatggttgtggtgaaatggggtttgtggtgccttggtgtgaccaaatgagggtgttgtgtcattcttctattggtgggttttggactcattgtgggtggaattctactatggaagctatttatggtggggttccaatgttgacttttcctataggtggtgaccagtttcataatagcaagcaaattgttgaggattggaagattggttggaaagttaagaagaagaagaagataatatgtgaagggactcatcatggtgatgatgatgagatgaatttagtaaggagagatgaaatttgtgagcttgtgaagacatttatggatcaagaaaataatgataggaaagttatgggagaaagaatgaagcaacttcaaaaattatttcaaattgcaatctctaaaggaggctcttcccataccaatattgatgcttttataagccacattttgcaacccgataaatactgacttttataagcggttagcagtttcttatattgaagaagtgttacgggtttgggctccttcactctcatcagctctttataattttgtattcataggcatacgtacaataagattttatactttaaatgtcaattgatattcagtactaatgttatactacattatctgtactaaataactacaaatttcaatgtacatcatgatttgttctgatttgatttgaagtatttagtattagatgcttaatattacaatgttgttctctttttcaaaaaaaaaaaaagaaagatattacaatgtgttgtttttcttcaacaacaaccatatgctcattctctacttcataccatatattcaaatcaaactctattcattggttcattagtcttgttaatctcagggagagttaatttaatgaaccaatcaataatgattcaagtggattaaggccttatttgctagggaagttaaggtggtcgattgtctagatggtgaccagcactactgtaccgaattttattagaactccgcagttaaacgtgtttaggtgagaatggcactaggatggttgacttcttgaaaagttctcgtgttgtgtgttgcccacgagttgacaaaaatgaactttaagtgttgaataaatatgaggttattcagcaaaaatatatagatattatatattatacaataatgagtctctctttttcaactactcaaataaaataagaactaacatttataagaatttgtagatggaggagctgaaaccataacacttccttcaagcataagcataacattcttcatagttggtctcaatgaaggatcctcttgaatgcaccataaagcaaccatcacaaacttctcaacaatctccatctccatcttggcttcatcatcattctcaacagacactcaactttcccagcttcatagcaatcacatgcccaatcagccaatattatttgagcatcatcctcaacatttgcttcaacattcttcctgcaacatatcagctccaacaacagaatgccatagctgtaaacatccaccttcactgtcacagccatgtttctaaaccattcaggagcaacatatcctttggttcctcttattccagttgtagttcgagtttgatcagtcttcaaaatcttggccaatccaaaatcagaaattcttgctgtaaatgagtggtctaggaggatgttttgaggcttaatatcacaatgtatgatttgagtgctgcactcttcatgcaagtaaaatagtcctcttgcaatccccaaagcgagttgctttctttggtgccatgatggctttgagggtccaaaaagaaagcttgctaaggatccattgctcatgtacacataaacaagaagccggtgttgtccctcgttgcagaacccaattagctttaccaaattcttatggtttgtactaccaatagacatgacttctgccttgaattcttgatcaccttctttcaccatgtgattgttatccaactttttcacagcaattaccaaatcattattgctgtccatttccaaaacccctttgtaaacaactccaaaagcaccaactcccaactgttccttgaatccattagtagctttttctagttctgcaaaaccgaaattcttcaaattcatttctggtatgggctggttcggtttagtcaccaatgttttgcgactaaggcgaaaatagaaaaccaatgaggttattaccaataagatattgagcaaagcagagctacttacaaacactgatccaatgactatcagtgttttttggtcatttgttttcgaatctttgttgttgcatggctttgaagcagcaccagtagtagtagttaagttcgcttttcttactttgtaaagagttttagttcctttgacactagaatccatcataccatttgagaaaggaaatctcttcttccaacaattttcacctccataaatggcaagaacacaaaaacaatcatgcaaacaagcatttctacactcatcctcagacatagatgaagacacttcataatcaccctcaggccaattcaagtaatcaacaaaatcaatattaaagttcttgtaatcttctaaatcttcatgacaactttgtagcttcgaaagtcggta

SEQ ID NO: 193847 - DNA, 1959 bp, Cannabis indica
tcttggaaatgaagagatatccagccaaaactccaccaagaaatccgcatccatatcctataacaactggtttccaaccaaaaccaatctcaaattcaaattcagattcatgatcaagactcgtgcttggtgtgacatcattactctcacattcctttgataatggaacaccacataattcttcgtttccataaaaggaagaatttggaaatgtacttatttgtgtgcctcgtggtatcaaccctgtaagttggttattactaaggttaagatacgcgagatatgtgagagttgccaattgttgagggattcttccagagagcttgttgttggagagatccaatgattcaacttctttcaaattctccattgacagaggaatgtgaccttcaaaattgttactcgatagattcagcacaatcaatgatttaagatccccaacagattttggaatttctccatgaaaattattgtttgagagatcaatgccagagaagattgttaagatccttagaaattccatttcaaagcctttatttatgacagttatagactcatggtagtacccattcccatccatgtacaacgaacttgacttatttgcactaatattaattgtattaatggcactccaattagcaaagtaatttgatgacaatgttccactaaaatgattgaaagagaggcagacaatttgtagttttttaaagcctacatacttattaggatcccatattggaccatgaaattgattggaacgcagtacaagaacttgcaaacttgtcaaattttgtaaccaaaaggggaatgtgccactcattcgattgcatgcgagattgagaatttgtaatgcactgcatttggttaaagattctggaagcattccttctaattgattattgctgaggtctagtgtaattaaactgcatccatccaaaaatgtttgaggctatctctccactgaaattattctgtttcacattcaacagttgaagaacctggctgaaactacccaagcattgtggcaaagagtcggttaactgattacttgagacatcaagaaattggagacgtgtgaaagtgcataacattgagttattccccactctgggaattctacctgataacctatttttggagagatccaaataagaaagtgaagtcaaattctcaagagataatgggatgaaaccctcaaatttgttgtttgatagatccaagtatgagatagagctcatggaacccaaacatggaagaatctcgctacttaagttgttattggacatatcaagaacatttagatcaattaagctgcaaaacattggatgaattttcccactgatgttgttgtttgaaatgtggagctcagttatggaaatcggcagaacatctgttaaagggtcttgaaacctgttgtgacttaaatcgagactcaacaacactttccatggaggcacttccaacacttgttcataaccagtgatgaaatttgtagacatatttaatgaatacaaggtctcagcccctatggtgaagaaccatttggggatcttcccttcaattttgttgttggaaagatctaaatatcttagctcattttgggtttgtaggaaaacaggaaattctgtgatgttgcatgaacccaaacccaaataattaagtttattggttatggtggaatttgttgttgtatttgtcactatagacagaccgttatctgaaagataaagatctcgaagttgactcaacttcgagaacatgctcatatcaattgtgccacttaagtaattttcactaagggcaagttcttccacttttttcatctcaaaaattgaggttggaatttgtcctgttagcttgttcccatctaaataaagatttgacagttgagatgacaaactgacatttggaatggtcaaaggacctgtaaactgattatgtttaagatctagatattgt

SEQ ID NO: 193848 - DNA, 1353 bp, Cannabis indica
atatatatatatctttatttatgttcctatatatgccatttttctcatttatataatgaattaatatgttgctaaagtaatgttgataatcacagttattattaattacaatttgttttaattaactagtctttaaaaatataattttaatccttatgttatattacggtatttattttatattacttaattaaagtatattttgtatttttaaatgagataattatcttataatttttgttattaaagaaaaattattcgttatttgagttataaaattattgaaattattagagctataataattatttaaattattaaattattgctctaggatctactacaaatacaaattgcatttgaattctcttgaagttacaaatcatcaaatgcaatgtctataatattgttctactagaattgagctattgggcctctatcattagtgatggtggactataatttaatgggccaacttgtagttattagagtactgccatgtacgttaaatacagttattgaaaacgaccatctcattataatcctaattacctatataatagacactatatcatgttgatagatgtacaattatcataatatgataataactttactgtgtgagcaatgtttaattatcgagtctatatgaaatattctaagcaacccataagtattattggctatgagttcactctttcgttgagcaatcaaagtaaaaatttatgattaagtaacccatcatagaatttgagaagaaaaagaaggtgaaaatattcaaacaagactgctatttgagcaaatatgcagccttagaatattccaagagcaaatcttcaaagtacttaaaagtatatatctaattgctactcaagtttgtttgttttgatattattgtcttggaaatttattagactttttggttgtttttggctgattgagtctcttttaatgcaaatcctagaaagtgtttaggcttatttacttcagcaaaattcatcataatgcaattgatagtgagaacaacaaatctagatcaacaagcaaaattgagatatttaataatatatatttatatatgattaaaaatgtatgtgtatttgatagttcttaggcccttaatataatcacaaacatgtttataaccagctgtttttgttttccttaacacattaatcttaaccataataggcatgaaaattaaatagcttatagatttacacattaaaaaaaattaagattaatgtgttaacaaaaaggaattaaagaacttcaaattgtggtgagaagaaaatagaaagaaaaaaaaaatagcagaaatcactttagaatactgagtttccagtcagccaa

SEQ ID NO: 193849 - DNA, 2357 bp, Cannabis indica
taaaataatatatatataaaaatcttaatgggtattctataaatgggtaaaattagaaaaatttgagtttttatgcttaatattttttatttaattaaaagatctctcacttttacatcatatgggctgagattgttctattggttgaaaaaaaaaattaaaaaaaaaaaagtttggggctgttgaggaggttacacagcctcgatatggtggggagccaggtgctggccaagttgaggaacctatggtcgggcagctcgtggtcgcccaagatgaggagccctcgccgagtcaaatagtgcgtcctaggttgaggagaattgggaggcggtacaagacttataccgtattcttgaacaaccccttaggttcttacactgaggctggtccccctttaaacatccttggtcatctatctaaggtcgggatagaccatgttttagaggaggcttccgacccttgaatcctcaagcacggtgaccagctatatcggtggatatctcccctgccttctatttctgctaagaaacttgatgagaacaaggcgggaggactattaggagaagttcggtgtgataggcccactagagactagctagcacatcgcctagcattcaagtggatggcctagttagagcatcatattggggagggagcggtgctacccctgcacccttacttttgagatataaccatctactttaggctgtctccaactcaaatcactcaaaagggcataaagtacctttcagcaatgtttgtcctttatgctgagttgggctggcaccatccctcaccctatgagatcaggtatttctttaatctaaaatccatttcgaggcagggccgatccgggtacttctatattagccagttgggctaccagtgattgggaacactaatatcaaagccttgtcaaaggttggacaatattctcggacttacttcatcacttgggacatcctgcaagtccatcaccacttttatagggttccgacttacactcactctattcccactctttaattgagggatagagctaattacattttgtccctccctgttgagaggaggaacatactcaggttggcttgtgaggccaactttcataggtagggcttgtaccctcttgtgtctggtgttgagggagttgcgggcacgtctgcatgcccagatgacaccccagtgacagaggaggcttacttgggggaacgcatacacctaatttagatgatgattttcccatctccaggcttgccaagaccatggataagagggacaggcccctcggacagcgtttgacatgcggagttactgttggtgatccttttttgttgattaggcctagagggcaagatttttccagccttgctcgccccatgcctgcctttagaggaaagggcaaggttgccattagtgatagtggctctgatgattcttcctctgagggtgattgtcttttagatggtagttgatagtaccaacttcttactttttcttacatttaatactgataacatgtattctaactttgttactttctatttgtagacatggcttccaagatgacggatctagtaggggaaccttcttgcaatgcttctttgattcgtcctcaagccaaggtggcccgaaccaccaggtcatctgatgccactcagtctccactgcctccccctcctccagggcctgctccggctggtcagccggtgattacggaccctcctttgaggagatctccaccccatgcaggcctttggacaagggggcccagacgtctggccagggagcctgttcatccactggtcagaggactgttgaggctgctcataactatattagtaagacttttcctatcattgatggggagcgtctaggagctagagtgcttgacatctagcgccctcaaagacaaatcatctgtaagttgtatatttaattttactcaaatttttgcattgacaggggctggccaacaaggtatgcaccacttaggggctagctggccaaggtctatttttttgtttaactttgttttcaggccatgctgaaggtcagcctcactcatgcaagggccaagggctctgtcgacgttcaccgggagaagctgaaggccaaggaggccgagcttaagatggagagggatgtgcatgtctagacatagactcacttgagaaaaactcaggacctaaataatgacctagaatgcttacttggtatcatgaaccaagaagtgacaaagtttgccactgaagcctccaggttggagatggagcttgagaacgagcgtcgggaaaagtaattggcccttgatggagaccaagccatcaaggacaagtgtttgggcttatcctctg

SEQ ID NO: 193850 - DNA, 889 bp, Cannabis indica
tttaggctatagttgaatattgataaggttatatataagagttaattaatccatacaaaaatataatatatacataatatcttgcgacgtacagaagagttttaagtgttactcatcccttccaccatttatatcactgtttttggtaataatatttcactctaaattccatatatatataataccaccatatgaacctcaacatcatcaaaatcataattgtgaccatatacgtaccccatataattaacatcattgccataacatattcttaattattaattcatgtgactaataatttctaaatatttcttgactttaacaattttaattcttcaaatcctttgtttcatttacttctacaaaaagcttatatttatttatataatgtgtggtagtggtacttaattataagtacttactcatcaagaaaaccaaaaagtagtactttaagaaaacaaatctatttatatatatacgattgttgtttgatattttgtagcaaaaaaagaaataagagaaatgcaaaatttgtcatgaatacgaatatatcctataatataattactcaattatttattattattattttgtaattaataattgctcccaaactataacccaacaaacaaataacgttttatttgattttaataacccttttttttaattgttataattattttagagagttcacactgcaaaaatacaaaaccagttaaaataattataaaattaatccttaatttacagcaggatccagctatactacaatgcactggggtaggggaagtgggacccacaggagaggagggactgagctgaaaatagggcccacatacccactttctacctgtccacgtcagcagctagaaaggaggagagagaa

SEQ ID NO: 193851 - DNA, 2372 bp, Cannabis indica
tgatattttgagcttaatttttctacatgggaaaatggtggttacaatgaggatattaagctccctcttctgattaaagttgaggaaactcgctggcagaatcgaaccaaataataatattgccaccactgagttaacccttaatttcccatttgaggtttcttttggtgtttttttttcaacttataattggttaatggttgattaggatgaagctcaatattatccaacacttgatctgagatactttagtatcgattgatgtcactcgatttgcttctgaatcatttaatcgtatttgctttatattttagtttttatcttcaatatagatctgagattttaatctcttgatttatgttatggatgaaaccttggtattgaacccatcaagtgatgaaatttggaataatcttaggacaccttcctacacagtttgccaaagctgtggatgagaacaaaaatccattctgatgttgatgttatgataattttagctttaatttattttttattgcaaattgattgaagctatatttttcttattttttatgtatcaaatgatgattatggatgtcaattctcacgacggtcgtctgagatttttcagtgatgataaacatccttttcttctgatgattctacattttttatgatgtttactttttgtttaggtatttaataatgttgagcatgatgatgattgttttattagtccgattatatatgaatggatctataacctcctactcattctgaatgctttcaacattatttctaccatcgaatttgtttcttgtttttcaacaatttgtaaaatgatattttttatttttaactgcaaaaatcacttcggacataaatattagttcgtcggacataaataataaactgaaacacatcttgagggtagctcaagtggccataagagggtgcgtgtgtgttggaggtcctggtgtggtggagaaactgaaacacatcttgctggatcatttgccttgtttagtagtggacaaagaaaagtgacatgaacaaaaggtttttattgataaattcaatttggcaaaataaagttggtgattaagatttgcacttgatattgtatgggttctaaagccacactatcattaagatttgcacgaggggaaaatgtgggctgcatagtaaccgtggttgacttgagaataaatccagtaataaagactacaatgtgccttgtttagtagggtggaatacaaccctaaaacttcaattgtggcatctgatttactccaaaaatgttttaggcagtcaaaatttaattgtattatttcaaaattcccgggccttggttttttgaatggcagactgcttatacttgtcaaacgagaatcatgatttaagatgctttaggttggaggtgctgtagtagttttgaaagatctagcagcattttctttgctgatcttcattccaatttaccaaatgtcgtagataaattgagatcttattgaggagaatgtgaatttttattgctttatgaaaattgtcaagccattgtacatttgttaagacaagtaaaatcaatgcttttttttaatatttgctgcaaaaaatgtcaattcaatatctgcctatcacaaaaatctcagctagccaggatgtaatgagatgttattgtgaagtgaatattcccttttgcaagttcctgtttcaccaaaaaggccatccagctttcaacgtgttctattgaatgggataattacatctattttagctttttcttaacaacatcaatcacctcttagacttgttctacgaaatcctgaaccataagaaatagaattttttaaagttagtgtgttcaatagacaagatgcaacctgctcaatgaaaccactatttggggtggatttagttgatgtgatagttggcaggtaagatatgttagctactattgcagtagcaataatggttggagatgcatcaaattgagtggtatatgtatagttggagtatatagtgcagtgacagagggaagcacataagtggcatgattgagttttaagtacccgtgtttggtaatggtgagctccaggtccatggtctagaaaggagagaaggataagactatcaatcccaattatacaagattggagacaaatatttctagtaacaattaaggttgagcaaggcaaatccaatcaaaaatacattttccacactaggaagttgagcattttaccccgaggcaatggcttagtgagatcaggaacagttcaaactctcgtgaaagtgcccgaatcctcatttatggaggcctcgacgtcaagataggtacctacctgcttcctatcacaaccaccatgtttcttgtctcagaattgggtgta

SEQ ID NO: 193852 - DNA, 2595 bp, Cannabis indica
aaataatattacaactctcgacaaaacatacacataaaatataaaatatggatatgaagagaatgttacaactctaaactttaaacaacaaataaaacacaatatataaatagcatatatatatataagtgacgcaagaacagttttaatgccacaaccacaagtgataagtaagggaaatacaaaatttgaacaagattttacacatttgttcaaaaacttatttcatcccaccacaagcacttagagatagagaagaatgaaaatcactttttggatttatcaatattataacgtttctagcgaggtgctcttgtgttacaaaatgaatctctctggtctctatttataatgtttagagaatcacatatgaaaattaaaatatcttcaccatattgttgttaccaacactttaattggtatttattgagataaaaacattggacaagaatgatagaaacgtgtttgataaactcatatacatttatatagacacgcccatgacccgcctaggatttttacaataagcccactattcgggtgaaactacatgtaataatctaattattgggcccccaagaagattttgtgctcgtgcgtagaagtagttggggagtaggggactataagttgtacaacacacgtgtcgccaaaaggttttaccttgcaaagtaaatgtttggaatacccgtctgacaaaaaagtgtacgaagtgcgcacactaccatgatctaacacatgggacaagatctgatcctacgtcagaaagaactgtctctgggcaatccgggttcattttcaaggtagacgtccgcatttcttttggggtggtcggcgtccatgactgaccctttgggtaaccttctaggtatcatttggtcatactttgaacttgggcatcttcagatcccggagggatggcaagcctttcgtgtctcgaatggcgcaataaggtaggagacatttttgtgtatccaggggtcttggcctgttcccggctcccgaagcttctccatgatctaatccaattgaggggacttggttaatgactacataaagccgtacttttctttttatgtcacgtgtctctccgaaaacacggataacaatacaaatatatcaaaaagtcatcatttgtgctaaatataaaataattttatatttttattggagatgattttaaaagttgtaacttatatatataaataaatatattttaaaaaaaaatcatattaatttattttcctaaattaatttggagaaattaccaattgtatggtattttacaagttatttttcatttttacgtttttatttcatattttccacttttataaaatatattttacataaaaacttattaatcaaaattttaaattcataagttttcttcctaaaataatcccaagactctccatttcttgcctttcctcttcacgcaatgaccaccagatttgcttacccaaactcacttcatcttctccaccggaccaccgcatcacgaagccaggtcactagagattgctaatcataatctttctcccctttctccaccatttgccaactcattggagattgcataagaagttgatggagattgacgatggggttgcaacttatattgcagcttgagttgcatttgagtttctgaagttgcacttggcttcaaatttagattgcggcttaggttacaattattggactgcgtctttggttgcaacttaagttattgtaaattgagttgggttgtgatttgtattgcagcataagttgcaattaggattgtaatttgttgcaaatatatttatgttttttgggttgcaacttgagatgcaattactttaattgtgatttaagattgtaaagatgaataatagaatatttcaaagtgaggcgattgtgggtgtttgtccacgagacaaattttattttgattagaaaaaaatgagaaggaaagaaaaaatatggtctgattatgattttggttttgtgagaagtggagaagaatacgtatttttgcattaacttttaaagtatcatatatttgtattaaatattattttatggtataaataaaaaatataacacttataaatgtacaaatgaatataataaaaccaaaaatccatcgaaagaattaaaaacgagtcctcttgcaatttggccgaagaagtttgaaagttcaaagtagtgaaagtttgtagtaatgatgtgaaaggtgtgtgttgtgtgtggagtttaacatatatttatgttttaactggttactactctctagcatactaacattatgtatgctctgaaatctgaattgatgcaaactaggactacataaaaaaataatgccaaaattttaggctttagcatataatttattagaaattctacttgttttttttttaatatctgaacaaagaatttctacttgtttattacaaaagaaaataacaaaatcagagttaattatgctattttccagaaaaagttaatttaataataagaagaataagaatgcagagaagttcccattctcccttgtctttttaaacaaaccatgacccaagacagatactacacactctctctctctctctc

SEQ ID NO: 193853 - DNA, 2517 bp, Cannabis indica
tgtcgatgctgctcttttcccgcaagaacactcttatggttatggtattgttgcccgtgatagcactggacacctcatagaagctaaaactgggtattttgaaggcaatcttgaagcttcgacagttgaggcattaagcatcaaagaggctctcagctggattaaaagcaagaattggcaaaatgttgagatcgaatctgatagtatgatctctgtccaaggcatccgtggaaatcaagtgataagctctcttttcgggttaatcttacatgattgccaaattttactttcctctttgccttccgtgagtttacgttttattagacgatcagcaaatcgagttgcccatgttgttgcacggcactctcattttctctctggtcgtagtatttttgagtataatgtatggtctgatcttgaatctcttttgtactctgaatacttataattcaatgaagtagctatttcattatcaaaaaaaaaaaaaacaaataaaagtaatttattatttagtaaatttaattaaaaaaacagataaaagcaaaaaaaacatctatatagaaattattcttatttcagacaaactaattaaaatttgttttaattaattttatgtcattcatgaaattttacacaattttttattaatcatgcatcttatagtagaaacataattatttaagattatcccatgtgtttaaacatttattgctttagagaaaccaataacatgtaaactacttagtaaaaattagttataacttagtaaagtaaaattaaccaaattatttaaaagagttttacataaactttagtggaagtgatgagaaatttaattataaataaaataggctcttctattatagatgaattaatcacatccatcaaagggttaatatgtattaattttggaaattaataacaaaactcattaatcctaaaatagtgagtgagagaaggagtacatgttaatgtaatttacagtctctattattggtcaacgccgaaggagtatagactagtctcgcgatgacttagttttcatcctctaaggaaggtattaatctatactattgttcaaggtttatctcttgtcaaaaataagaggaagtgatgtattttagtatgattaacctttaggcagcattactatgttaagtcataaaatctaaaataataggctacgctcataaagtggaactaagcttccatacggttagttgttaacttgatcaaacaatggtttatatttaaatagaaaatgtgagacatttatgtctcataagatgagattcgtctcataggcttaataaaattaatttgatcgatcctaaagcgacgcttaattatcgaacggctttatcgtggaaaaactaaacaactgtatatatgttttaattcttgcgttcatgcatttgtggatttttttcgaaattaaatatttattttgttttataataattgtatgcttttatttaataatgttggtttaacatacttacccatatagttctctctaattttcagtataactgaaaagactataatggttatgaagatgataatgagatacttcattatgaattttaaatttacgacatatcctaagtttaaagaatctaatgaaagtataaagtggtgagttcccacttataccttaactttacatcgttggagattaaaacaaatatttatattaggtaagatctaataagtagtttatgactacataaacgattaattaaaagatataaatctattacgaaagatttttaatttaaatcttttgaacattaaaactttttgcgacaatttactttttatgcaaagaaaggaacataaaggatatttgagctacagtatctctttaagctaaatacttatatgcaaaggagcttgctaatggcaaggtcaagtattatacccatatttcgagcaacaatatggtgttgacatatgtaatatagaaggaatatgaaccagcccgaattatacaataataaatatgttcagacaacttacctcataaaacacagttggtagaaatattaaaactctctttaaaaataaggttgagctatgaataataaatactgcctatataatcaagcttccaataagtagctctagaatttatcacgtaaattctctaacttattaattctttcttgcaccactatagatttagaattatactcttaattatgtagaacactctatatgttccacgatatagatgcactatgaattatctattgttataatcctaataattaatgatcctctatagatgatcgacattgagtaaggacaaatttactattacacccttcaatgtattttatcgttaaaatacatagctctctataaataatatttcagtaaactaatttaattactgaaatgagtactcaactatttatctctattaagtcaagctcgaaggaaatcatcattttacttctatgtctcgatagaagccatagattctgtacaatgattagcgctcccactcaa

SEQ ID NO: 193854 - DNA, 2153 bp, Cannabis indica
caaaataaaaaataaaaattaacctaataaaattcaacaatatatataaaaaaattcaaaaaaatatacatatatattacatatattatatatatgaacaataatatatattagcctaaaattttgttaacataaatgagacatgataattaatgatctgtattgaatgtctaatatatagaaaatatatattttattatatatttaatatgaaagatgaatttttttgcgtgattttgtaattaaaatctacatactctatgagtcattcttattttaaatttttttttcgttatatgtataatttgacagaatttcctctaagttgaaaaattgctcgtcctttaaacaacgtgattattgctatttataagaatgggagacatagtagttattttttatcttatttaaataacagttatgaaacgtaaacattccccacgtttcatatatctactaaaatgtaagaacaatttgtatgtaagtgctcttatttgtaataaaatgaataattatttatttactatttgaatcttcaataggcttttatcgaactgttcggttcacagtgacacttcacagaataaactgatggaaagatatatatgccttctctcaccctctcacccactctcatcctcactcaccctctcacctgctctcaccctctcgcccgctctcacactctcacgcatgctcactcgtcagatcacgtgtgagtggctcgatgcaagcttgagagtgccaaatgcttgcaagcccttgcacttcctttcatatttgagcataattccctaaatattaatctaatttggataaaaagatctataaattcttgtgcttcccaagatgtttgcaagccaacaagctttccaagatgcttgtcgtaatgcatttacttttcttggctaatctcggaaccttactaatttttaggattaacatttgctcctgagttcataagagtattttcaagtgctcttgtaagcttttttatgctagtcttcttattcatgtcttgacataagaagatttttcttttggggtcctaaacttttgagaaggtgaaacttttccttagggtcctagatcataaggagttgaagacctctatttagggtcttgcggaaagcgcaggtgtgagcctcgttgcctagtttctcttgtggacatggacgagacggtgcttaaggcttctttactgagattggcatattaattattattattattattacatgagggagatgttggttcgtcgtaccttcttaaccttaattttggaatttaagggagacgttagttccttgaatcttctcgaccttctgatggttgtaatcttttcattaaggaagtattgactcttagagcagtttcaacctcttctttgttacccattgggtgcttagggagctttttttcctttaaactttgctcaacctttttcatcattctctacattcatgccccgcttttgaatatttgttagtgcttgacgactaaggatgcatcgaccctatgggccagtcatcctcttatgtgttggtatggataaggacgtatcggccctgtgagctagttatcctcttattgcttataatttttgattgacaagcgtccttctcatttttagtccatagtactatttttactaagcgtctatttaagaccatttttggtctagccaactcaagtcattctaggattattttcataaggtagatttggtgcctcctcattgttattatcttggactgcaagggtagctaatcctattcttgaagaggcttttttggcaagtagttattgtttgtgttggcgtcgcccaacacattttattgttccaccattttggttactttggcaatttcaatcgacaattatagtaaacaagtagagtgtatgggtggagggcgatgagcatcgcatgtaagatgaaaattaaatatttcattaataaagatagacccacatgtaagtacctgggtgcagttgctactactagaggactggaggtcaacttaagtgttccctttgatttaataagacatactaaacggcataagatacttcagggagccaacctaaagaatattttctgattgtttatggtgaagggggtagttccgctttttagaatttcttagatattt

SEQ ID NO: 193855 - DNA, 876 bp, Cannabis indica
actgttagtttttttgttagttttttttttcgttttttttttttttgaactatcaaagttaaaataataaagataacaaaagttatacaataagtggggagattttttccattcaagaaaatttattgtctaccctaagtgtacgcttagcccatctatgagcctcaaccttaattaaagatgcggctgatataagagggagatgcccaaagaaaactaaacaatacaaatttaatattagaaaagataatcaaatacactgtctcactctctaaagttgagaccacagaaagtgaataaaaaaaaaaaccctctccatgggaagtcccacatcttgagcacaacccaaatctattagtaaaacaactgcttctgccagaaaaacttaaaaagaacctgcaaacgaaatagtttaaaagcaataagtacttttaatttttaaaaccgaaaaatattaaaatgtaattataatagagtcaactaagaaacccctttggtttgactctttatctaacttcatattgatatcatttcaatagtaacagaatgtataaatttaaataacctaccacgctgaagcggattatatacatatctattaattttgacaataactattaaaattcttttaaaatttatccaaataaagatccacttaaaattaattagttaaactatttaaattgcacccttgctattattacatctttttatacactcataaatagtttttaagcataatctttaacactaaaaaataatttaaaatgatatttactatatatttttgggaattgtatgtattaatccaatcatagctataagaatagcataatacttattggataatgcttgtgtagagatattaattaaaaa

SEQ ID NO: 193856 - DNA, 2394 bp, Cannabis indica
atccatctcaatctacaccttcggctaataaatattattcatctaataacttcattttccgcgaatctttacgccctgtaactctcaaggtattttttttttcttaataaagtaatttgagtctgaaacttttttttttattgaattaattgtgtaatattttattgataattgtatagtttgaagatgttggttatgaaatcaaattgagaagcaacaacggtaaaggaagctgcagcttcttaatttcaacatcatcatcacaactaaatgagtcgaaaacgacgtcgtcacgaatcgtgctgaacggggtgagtggaatagtccgacccggggagctgatggcaatgctgggtccatcagggagtggtaagacgacccttttgacagctctagctgaccggttaccgggaaagatcaccggcaagatatcatacaatggtcaaccattctcatgtttaatgaagaggaaaaccggtttcgttactcaggacgatgtcttatatcctcacctcactgttttggaaaccttgacctatgctgctctgttaaggctccccaaaaagctaaccaaagaagagaaaattgagcaagtggagtccatcattgtggagctcgggttgacccgggtccgaaatagtgtcgtgggtgggcccctgctccgtggtgtatccggtggggagaggaaacgggtcagtattggtcaggagatgctggtaaacccgagtttgctgttgctggacgaaccgacttcggggctggactccactacggcgcagcgcataatagcaacccttcgtggattggcacgtggcggtcgcactgtgatcaccaccattcatcaaccgtctagtaggctttacaggatgtttgataaggtggtcgtgttgtgtgatgggtcccccatttatagcgggtatgcgaatcgagtcatggactatttcagctccattggatatgctcctgggtttaattacatgaaccctgctgattttttgcttgatcttgctaatggtaagtcttccacttgttttctttttcttaaatatatattttgaatttcacttgtcaagttgtccaaatttggactaaatatagtatcttaggcttacccggaagactgaaaacatatacattatattagttttacatcacaattaatagtttatatattattattatattagacataattaatgtgtcaaaaaactttggattatttggttatatttcttaataaatgtgtggatggacacaaccatgtaaaacacaattctatattttactttcataaagttagtggggatgcaacaagggtcttttggtctttctcaatttgtcaaagtgtcaacctcacaaactgacatatacatagttaaaattgttacaaccaacttaacctttaaccttgtaaaaacatacacagaacggaaagaaacattcacccgttaaattatttatctcgcatttcaaaagaaataaaaaataaaaaataataataaaaaaagtatttatgtctcatagtacattaaattttgttttcccttagttctaaaaaaaaataataataataaatgtttttcctaccataaaaattttgaatgtaccaaaccgaaggggattcgtacacgaaatcgggtgccaattaccaaaggataagcattattattattattattatggaatcccttctccatactaaagtagaaacacctaatttaataattaaccagctagctagctagctagcttagcttttccatcaatgtatttgacagtggcctaaactatatgaattgattaatcatataataagtaaattgatttgaccctcaattatttgtttataataactgtatgcaatccttgctgttatggtttagtgtcctttgtcatgactagtagaaggaggctatgatgggataggttgtagtagagaagtaaaattgcaacctcttagatgtatatccatataatgtataatgtactaatatagataaaatagaaaaagaaaagataaatattttatgtaaaagttttaaattttcttttaatgaatgatgtaaaagttctaatttgtttgttggagatggtgatttaggggtttgggatagattgtctattcaaatgaagagggttcaatggacttactgatgaaatatatgatccactctacattttgggatctattttcttttaaagtttgcattatattctttcccatttttatagttgattgtttgtaaatatataaatagatatatgtgtaatatggacaaccgtcctttaaaatatgttttgactttaatattgttggagatgattctccaaccccaccacatctttgcctaatttattttctgtttctctcatttagtaacaaaaaaaaaaaaa

SEQ ID NO: 193857 - DNA, 2338 bp, Cannabis indica
cactctgctatgtcggtctcaatagaactaagttatctaggttctcagatgggaaaagcctgatcgcttctttgactatttagaactctgcatatcacacagggtgggtgtgaagttgatataaggcaggcagggtgcctgtacataaccacactcaatgacactccactctaacaatctcctggacccatttgggtctcatgcgcacacgagtcccacgcgctcgaactctctcgtcctccatgattttggttctcttcttttttgttgtcgttgtgtcttgcttagatggaggggttaagcctttcttttgtgtagcatcttctatccaaactttgactttctcttggatcactggtatgggtccaagtaattgggcctgccatttgaattgggctaacatcccatatatatatatatgggaaaattacattttacatacactttttattttctattttaatttttaccttcattttactactacttaatttatatccagttttataggtcatatctctattatgtacattagaaattttaattttgataagttatgtgaggatatttatttgatatttatataaaaaagggtatttatcaatttaaattattttgaatttatatttgattaatgtataatcaaaatggataattttcaacttatccctctatatattgaccttattaaaattaacaaactaaattatattttaaagtactcaaagtacaatagaactttgataatcagcatctgaaaaaagttcgtacagagatgaaatcggcctctccaataatggtcattccttattattttataaatatacatatgataatttcataaattaaagcaagcataacagaacaataatgtacaacaatcaaagtaattaacaattaataattaaaggttctgatcaaacttattaaacaaatatttcccattatttgtcaaattaagttaaactaatgtattatccaaatgctaataattaatatagaaaatgatatacatataatattcctctctcctacgtacatagtacccatgacccaactacctcttaccaaatcaaagctcatggcaaatctcacccaaaactagtttcttactaaccctctaacctagctcatccactaagcgtgcatgattatatattaattatattattttagttatttattatatagtacaactaataatctttgttaatttaaagccttgctagctagttgtactttgtctagtgaatgaaataatctatcatcatcaaatatcaatcatggaaactagtccacaacaccataatgatgatcatcatgaggagcacatttttcgaagtcggtacggggcggtggaggtgccggagaacgtgactttgccggaatttgtgctccaagggggtgaagaatatggtgataaagtggcatttgtggatgcagtgagtgggaaagagtacactcatggggaagtggtgagagacacaaagaggtttggtgcggctctaaggtcacttgggctgaggaaagggcatgtggtggttgttgtgctgcctaatgtggttgaatatgctattgtggctcttggcataatggctgctggtggtgtcttttctggctcaaacccagctgcacatgttttggaaattaagaagcaagtggaggactctggtgccaagctaattgtcactaatgcctccttctacgacaaggtacagtacactatacctaataataagctactactcttggcccatacgatagaattggtgaaaatcttaagacttttttaaaatatagcataattttccaacacatgcatttggtattctagctagtcaaacatatgcattgtactatttaataaagaaaattatccatcaagaaatgagaaaattatatgctttatagatcttcttaacatgtgttatatatatctgctatgactttgagtagtgtatatattaagactcttttggtggtacatgcattatattaggtggtatatggcattgtattatattatattaattgagttatatattttatttttatattataatacggttgaaatttaatttatactaaattattatacatttttatacttgtaaaagaaaattccacacatatatttttacataaaaatattgtataaataaggtataatacggtaaagaagccttaatttcaacaattctgcaaaaacactatacatgttttactattttcctttaagaatatacaaacacacttttgtagatgaatgtatgctttttatttatgctataaaatttcactttgaaagttagtatatatataaaagtgatgtaactag

SEQ ID NO: 193858 - DNA, 3117 bp, Cannabis indica
cataacaaaactcataatcattctatccaatcaaattttgccacgtaagcaagcttttacaactataaatacttgccatagttgaatttaacttctcctcacacaagccataacaactaagaacacacaacacaacaacaactaagcaatcacttcaattttcaggtcagtttatttatttatttttattattatttttttcacattaattctaaataacatgtcatattatctgaccgattgctgatatctacatcgtaaattttacagtgaaaaaatacaattttttttttttgcgaaatgggaaagacaataattcaattgtatggattcacttcaatcgagttacccgaaaaagtgaagagttttgtggaggaacacaccggagaaggaacggtatgccatgttgagattgccaactacatgaaaaaggcgagatcacacgccaaagttcaattcaacaactctaaatcagctcaaaccatactctccatggctgaggaaagacaattgtggtacgaagattcgtacattcaagctcgagagctcgtgaagaatactaaaccaaagagcatggatgatatcacattgctctttggatgtctggtttcaaagaataagttctcttatctttggaaccagaacaatgttagagttgaatttggtttgggattacgaaagctcgagttttatttcaattatggttgtgttgagtacaagcttgtgctctcctatgagaatatttggcagattgagctgcaccgttgttcgggacagagtaccatgtttcttgttcttcaggtttgctttcaaaaaccccttttgctcattctgtttttttttttttctctctgttcaattcagattgaatactaataggtaaatttctctgtttggttactggttactttattttgtggttaaaaatcttaaaggctagtgaaaactgaaatgattctttagttgttaatgtttgaggaaacaacttctagtagattgctatttttagatgtatagctttatgtaattatttatgtctatgtttcaaataaattttaatttttttgtttaaaaatttcacaaaaaaaaaaatgttacaaaagcactaaaattaaacaattatttgaaacaaaagggacaacaaaaaaacaaaatctgttatatttcttaaaaatgacagttagctacaattagtttggtacttggaagttggaaaaatacactaacactttctcttctatattatactatagttacttggtgccccaaagatttacaagaaagaactagctgttaagaacaacaacttcaacaagggtgttcccaacagaagctattggatcagagatgttgatttcactccatcatgctgcattggccaatcatcagctctatgcttggagattccaagcaggtttcgccttcccaatttgcgggaaggattcgtttactacaaagaaaaatcgaaaccacattttcggtggagaaaggagaacctttctccactttttcgagttcagattaccttgttcctattgtaaaaccacctcaaggaataaacttgccttacaagattttgtttaagataaattccttggttcaacacgggtgtcttcgtggcgaaatactcgatgaaaagttttataagttagttgatccaagcaggaatattattcctgctggatacatagagtctgctcttgacagactctatcagttgaaagattgttgctacgatccactgagatggctcgcgagccaatatatgaactatagtaaaacaggaaagctttttaaaatacctaacattgctttagatgatgggttagtttatgttcatagagttcaggtaacaccctctaaagtttacttctgtggccccgaaatgagtctctctaatcgcgtgttgaggaactacccgaatgatgttgagaactttcttcgcgtctcttttgttgatgaggatttagagaagatgcgctcaaaagacttgtctactcgagcaaagtctggatataaaggaaagcacacaagagtttatgacagaatactttctgttttgagagatggtattactattggcgaaaaaaggtttgagtttcttggtttctcgacgagccaattggatgataactcaacgtggatgtttgcttcgagagaagggcttgatgctgaagatatcaggagatggatgggggacttttcgggcattagaaatgtggcgaaatatgctgctagattaggccaatcttttggctcttctagagaaacttatgtagttgaaaagcatgaagtagagttgatttctgatattgaagttgaaacagatggaaacaaatactgtttctctgatgggattgggaaaatatcaaaagaattcgctgatcaagtgccgaaaaaatgtggtcttaacatgtttactccatcagcatttcaaattcgctatggcgggtttaaaggtgttgttgctgttgatcccaaatcttcaacaaaattgtcattaagagatagtatgtctaagtacaaatcagagaacaagaagcttgatgttttggcatggagtaagtaccaaccatgttacttaaaccgccaagtgattactcttctatcaactcttggagtgaaagatcatgtttttaagaagatgcaagagaaggctatagaaagactagactcgattttaattgaccctataagagctcagcacgaactacagctgcttttcccaacagagatcggaaatattttgaaggaaatgcttatctgtggttataaaccaaatgaagagccttttctttctatgatgctgcaaacattccatgcctcgaaattgctcgaaattcgcacaaaaacaaagatatacatcccgaatggaagaaatatgatgggatgtcttgatgagactgggacactagagtatggtcaagtgtttgtgcagtgttctaaccgcgaatccccagggacttttctcgtcgagagagaagttgttgttgccaagaatccttgtctgcatccgggtgatgttcgagtccttcgagctgtggatgtgccagaactacatcacatggtggattgtgttgtctttccacaaaaaggaatgaggtaaaatgctataaa

SEQ ID NO: 193859 - DNA, 616 bp, Cannabis indica
atatatatttatatcatataatagaacaaactttatagtagttttgtaccatcggttggatggattagcattcgattaattaactcatgtatttaagaaaaatatgtactcacgatatatattgaatataatatattaggctagtgtggaaattatatatgaataatttagttgcaacatgtacaaaatgtgtgcatcatgatatatctgttttccaaattaagacctcaatttatattaatatacatatatatatataaaatgttttttaatgtatatacaagatgagtacaaattctccaagcatcaaaagctttgtttaataatcaattgacccttattagatgccaacacatagtttaagcttgacaagtaattcttaatccatttcattcaaagcagaatactaagctctcagtaatgattgggtggggagttttggccaccacaaaaatcatcgcaaatattcggtctctctaaaaaacaattgcatgcatatataagagtgcaatgtttgtctttattatgtaatgtcactatatttgaattaccaacttatttaattagctttccacaggtttgggtataagtttctctcagctaattaaactattat

SEQ ID NO: 193860 - DNA, 2035 bp, Cannabis indica
ttttaattgcagcattcaactattttctttttgtttgtgccaaaaacacagctggctgtgacttggaaaagggtcgtctggagtcttgggttgtgggactcggttcgtgagtttgccagaatgtatgatgctgcaatgggtatgctcatctttgctcctatagcattcttgtcatggttcccattcatctccacatttcagtctaggcttcttttcaatcaagctttcagccgtggcttggaaatctccattattcttgctggaaacaaagcaaatgtcgatgtctaatcagtttggtcgttcttgccttttttcgaattcatttgagtttgagatcattattctttgttgtttttacccttttagttgcaaggattagtcattaaggtgctgtagctgtatatcctgttgtacataagctctaggctgtttctgacatattctcatttagttttaatttgttgatttgttttgtaatctaagatgatcacaaattgcaagatctttcccactttgcaattgtcgagttgtgtaccattttttgataccatatcaggctcacttctcctatttcagtgttcttcgatagtgtaaattatatgttgtattagaataattaattactccctttggtattattgaaaattttgacactttttatatttatctacggtaacatgcttaagttcactaatgactaatttttagcatgttcattgttacatgatttcgttttcgaaaactttgaatagttagtgttggaaaagaggtttaaatgtgatattaagctcataatggtattggagtatgaaacgattttattatttcgaattttttttcgtgttgtagtcacacaacacaatcaaagttaccaagagtctaacacagaaaacaataacaacaaattgtagaaactaagtaaacgaaatggacaaagacagattctttgaattggtccattcttgttcctccaagaggttctgctaataatgaaaattctattacagtctaatctctggtcaaaggaaaaccaaaggagtagaaactaagaacttcgattctataactgttttacatccaagaagttgaattaacactgaagcctcacaactcacatctcacatactatacaaaactctcatctcacttaccatacaattcattctaaatgtttcccaatccttctagtcaaaactccaagaaaatttctcatgctgaacccactagcaaattcacatagaatcgagtggggacagtcgccccctgaaacaaaaattagaaaaaaaatgtagatgtaatttaattaattacaacatatatttgtaattaaaagtgttatatactaacatagtattagcttttgtacgatgattaagctattttacatttatcttaatagtcaagagaaatctcaataatatcacttttttttgttagtttttgaagtctacttttatacctctaccaaatttttttaagcaaatattttattgttattattttttatttaaactatatttaattgtataaaaaaatatgtttatattttgaacatgttatatcatatagaaaataaaatataccctattttcttactataaaaaagactccctcaactaaaattctttcgccactggctgaatctcctgaaactaacaacctgaataaattggtgacatgctgctctataaaagctaccagcaatacctttccaaaactataacagaagcttaactaacaacaaaacaaactggtatcgatgtttgttaatttcaattttttgagaattatatttctataaattccaccttaattctcgtaagactaacttcaacaccacttgaatgactactactatttttatccattgataatgttcataaggtttaaataatattgaaacttatttgaatttaaatatttgtacctatatctgcaaggatttcttcactgagaactttttcaggtttaatagtccattcttcaacatttgatccgttacgaatatcaaaattttataattgtaaattatgtt

SEQ ID NO: 193861 - DNA, 1749 bp, Cannabis indica
gttacaaaaataaaaaataaataaattaattttaatagtaagacaaatagcaatttaacaaaataaataaataaataattctgtaaccgttacattttgagagaaatttttaacgagttatagtatatttgaagggaagcaatctatatagtagtgttataagttttgaggcaaataatttttgtttgaacaataaagggatattattaattatatatacataacagaagtaaaattattgcatatatatataacgcttattttttttatttaagtatttatattacaacaatatataatttgaaattcgaatccaaaaaaacagaccagtggttatgtgacgctaatcaagaaaacaaattcggtgctaatccgtatgatttgttatcaacaaccaacccgatgtaaattaattggctttaattagtcatatataaaatagataaatattacattttgcatgtgttgtgatttagtcagcgtatatacatagaattacttaatttactttttatgtataagatttacagtaataataattatttacagaattaaaatatataatagctatatataaactaattatataattaacaatatgtgaatctaataatgttccaaaatataatagttattctctgtggttggtacgtacatgctacatatatgctaatattaattaattaatgagaggaaacatccaagaaaaaacaaaagaaatttggtggaaatgaaagagtcatgactactattgatatagataattctttacagatatagttccattaattaaatgatattaataatatattaatctttgttctatgtttagaacatagaatcttgaaaaatgaggagtacactacacgtctctcttcatcaaattcttagtcttttttattttcaaccaattaattaattcaactatattcaagatttatatattatttatatatatggagtcagaatttcggattcgaagttatacatacagcgctagctagctttacaaataatttcactcttttttttctacttttttaatatatatatatatatatatatatatgatatgatcaaaaaccaaatgtactaattaatgttgaacaaggcaattaatttatatatagtcctatgtattataatttgtttcgttagtgtgtggactatacatattgtatatatactatggaagttgagctcgatcgccttgggcaagagaaatagtcaaattcaaaggactgcaaaccttttgcgactcatgaacagtagtggcctgtgtgtactactggttgattattatttttcattaattatcaattttaaattcaaaccccaataatgaaatctatgtagtataaataaattaaatacaacattgtgtcctattctggttttgtttttttttttcaatttaactgtaaattttaaattttattcataccaattcggtctcaacaatattattatactccaaatattttagcaagctaggaagattcaaacctcttattataataatatcacctagctagacaaaagttcttagtattataatcagacagcaaatctcttatcagaaataaaatggacgacgttacaaacattaattactaatgattccaagtgatagatgtattgtatatatacacatgaatgagagtgagagattttggggtttaataatggaggtttccaggtagaggcgagggatgggaggaggagatctgaagaggaggaagaagacac

SEQ ID NO: 193862 - DNA, 1486 bp, Cannabis indica
atattgagttgtgtccgtacaatccgtataatttcttttcttcttttttgttgaaggattacgttcccacagtgtttgacaacttcagtgccaatgtggtagttgatggtagcattgtgaacctcggcctatgggatactgcaggtaatatatatacatatagtatgtacacatataactatatcagatttattatatgtatatacataccgtgagattcagttcataatatatggtgtatattacaggacaagaagattacaacaggctaaggccattaagctacagaggagcagatgtgtttctgttggccttttctctgatcagcaaagccagttatgaaaacatttccaaaaaggtcagctttcctgattttcttgccaaaattggaacagttacatttcttttttgttcttattcaatcttcaatgacctctcatcattgtttttttgattattgtacttgtgggaacaaaacttggtacatataagaaattgttttatagagtaacttggttttcatatatatatttctatagatatatgtatacatatactttcttatttgtataagcacatgtattgtttgcagatttgagagatgacaagcaatatattcttgataatcctgggacagcaaataataacaacggcacaggcatgttatgatgattaattgattacattagaaacttatacaattgggcaatacttgaacttgatttattaattattaatttttgctcgtaagcattaatattaattgtgtctccagggagaagaattaaagaaattgattggtgccgtcatctacattgagtgcagctcaaagactcagcaggtaaatgttgttttcaaaatgtcaacacaccaaaaacaataaatgtatgtaaaatttaactgaagaaagcaatgtataataccgtctcttctgagattcattgaattgtgttcacaattgttttagtcaaaacatattatgtggattgtcattttaggaaaatttttagtttagctctgattcctttctttcttaatttccttctatgatcagaatgtgaagtcggttttcgatgctgcaataaaggtggctttgcggccaccaaaaccgaagaaaaagcaatgcaaacaaagatcctgctccttcctctaaattcgatccaatgatcgacgttaacattcaaatcattataatattaatttcttctttatataaaaagatatatatatatatatatatattactaatattatgcattcttttttaaatttcttttctctttatacgattttaatttcgtgataatattcgattgtacaatttctttttattttattgcttcttatcgaagaaagaaaagccagatgaattaattcattatatttttgagacttgaattacaaaactttattaatgaacaagaaattagatggcctaactccttgttctggagcaaatttggcaacaccaaaaatgaataataat

SEQ ID NO: 193863 - DNA, 679 bp, Cannabis indica
atatatatatatataaacataatgaaacatataaaatcattattgaataactacatatatataagtttgaattttcacgttttcatgatcatcatacttatatttatgacaatattatattattggctaattttacagtacattctctttttctaaatatgtattttagtaaatttttataccgaaaattttttagtttaatttttttttttataattgtgtatgtcataattacttaaaataattagtaaatttttaaaaaatttcgaataatttacaatgtcaaaaataaaatatatatattttgttgtacacgtaattggttttttcttataatacgtgtggtaagtaattatttaaactttatttttgacaatgtaaactattcaaaattttctaaaatttacaaccgatcttaaataactaatcataaaatttaattactttaaaagaaaatttaaataccaaaataaaaaaaaacctaaccaatttactacatatatttcctacattatatacataacaacaaactcaaaagccaaattagagagagaagaatttataaattatggaaaataatagttaataatttcatgtaatttcttttcttaatattcaagtcttcatcatattaatcttcttggttattaactagctatatatatctatatatattttt

SEQ ID NO: 193864 - DNA, 1459 bp, Cannabis indica
aaaagcgggttttcttgtagtgacagtaaaagtggaattcccaagtgtatttggcgatgggagaagattctatgggcacctaagatacaaggtttgttgttacattgttacagaaaaatatttatgatggttgtgtgtatataagcatggatagagcctttctcagaatagaaatcattcaggagggctgtttagaagggtagaagacattgtagaaattaagagcaactactgcttacaattgtggtgtctagcaaatactattgtcaattaacggtaaaacatgggaagttaatgaccttctattgtgattataattagcaatagcttttgttaaccttgagaaaagtaatacataatgtccgtactgcatctaatatatatcttggtaaccatgtgactgcttcccaatgttgaattttcggattggacatgaatctaatctactaagcacattataattaattcatagcaaacattgcccttaagataccaacactatcccatatggcacccaatattaaattgtgtactcataatggtaatggtatgtcactttttatgatgtttagcattttaagatgtcccttaacagtatgtcattttttatgatgtttagcactttaagatgtcccttagcattatatcccccttaagataacaccatctcccttttcaatctatcttttgatatttcaataccaagaatcttcttttctattcctaaataatttatctcaaactataattgtgcaattttttgtttcaactagctcactttcaaaatttccaggatttatacctttacgtacgtacgttaagttagcctcgtcaaaggtggtatatttaggtactgtaacttaaaaatgagtgtaaaatttacatttgcatgatcataatcttaaagtgaaagttatatatatggtcattttgctttgtaaaaaataattaagaatatagagttcactataaatactctagagtcactgtgatcccacaaatatatctttgcagattttggtaataaatttaaatgctgatctgccaattcaagaaggtcttaatttatttgttatttattttattttttgaaaaattgggttagaaagataggtgtgccaaatcatgataatattgtgagatccacccttcaataattctgacctcttgctttctcacttctttaagccattctggatcttctttggtggagaaccttagatctacgtggtgagcacctgttaataatgaaacactaataattttaattccactatatatgtttggcattttttttaattaaaaaaaacattgtttataatgtaccttctttggcaacaattgcaacaatagtttcagatatgttcttcagtaccctggcaaataataataaatcaaaataacaagtaatgtgagaaaagagttagtatagataatcacacacacatatatatttata

SEQ ID NO: 193865 - DNA, 3491 bp, Cannabis indica
gtgtattagatatcatggtcaatcaatacacattactaaaaaattactttgagtgacaacattaattttttttaacttttagtcataaactaaaaagttatatatgtcaataaacatggtgtttgatacaattagttactactttagttttaatcacaacaaatattgtgactaaaaatacatttagtaattataatttatattttttgtgactaatactttttagttataggtttttttaaataatataaatgatgatttataattagttaaacttttttcattttttagttacaaattttattgtagacttaaaagtaaattttttaaattgatggatcgttagataattttattacaatcacacccaattttttgatatacgaacagttatatatattcacaaagaaaaatattgacaaattattattcgttcattttaatattgattattatacattttaatttaataaataatatttgaaattgatgacaaacatatatcaatgtcaatgcgatggtaagtcaaatattaagaatggtcatttgcaaatgcaattacacacaaacacacataaacataaaagtgttttggaaactgaactgaaaaaatatcattattagtagaacaatgaaatacaaaatgtcttttattgtttaatttttgtaaatattttatttgtgaatcagaaaacggtaaaagatttgttatccttcatatggtgtcaataataataataataataataataataataataataataataataataataataagagttatttctctacaagtagtcccaaaacaagaaaaaaacaaaatcacacaaaagcttaaatatgacccttttgtttgtaattccaatatatatgaaatatacccgtcccaaaataattaaccccagtaaattaataaccatatctatttgagaagagggttatccttatttgtgatgctgcaagtccgacgtatctctccttgatttccagtcaaaacatttatatttcccattcgattcattgaaagggcgattgatagcttgaaatcttgaagactagcggcaaactgatcagtaaggtctttggtgtcctccctatagagcaactgctgatcaactccaaggatagcttggttattgttaactcttctatagaaggattctgtgaaactgtaatggctgccagattccgggttcaaatacaccagtgggtcgctttgccctttccttagtctctctggacactgttttctcaatgactgtaccaattcaggtttcatggttgggtctggtcttttggttcctttgaaattgtatagcctgtcttcgatgttacgacaatgtgttcttcccaatgtgtgtgcacctgatgaagatacaaccaaataaccaatatataaaatattgttgtgtttctttaatttaattaatagaccataaaacacaatagtaaaaaatatgtatcttaaaaattaccaagaagtgtaaccatgtctcgcacatctaaacctttagagttgaagtatgcaagtgtttcattgactgacatggatggagatggaatgttcactgatgaagcacttgatgtcattccatctcttcttccggtaaggatgatgtaagatggtccaccagactaaaaagaagaagaagaagaaacgatttaaaataaaatatatattttgagaaaatttaggtaagttaaagaaatgagtgattaagtatataatagttaattatagtctagtgtaccaaatgaacggcatctctagtggcaagttgaagaatatcagcacaagagaccactcctgggcacctttcttcaaggactttcttgatatcgtctattaaagcaaaccctccaagtcccctattttcaagggcagttttctcagattttggaccatttagaagaattgatgcatcacatccctacattattcaaccatcacatataaacaaattagaccctaaactacttttaggtaatagattacgctgtcatccatgtaaacttctcaaatccaagagtatttatatatattgaataaaaatggttaaatataatatatattcccattgtatagctagggactttattatatatattactatattttattgatatttgactttattatacaactaacggtatattacaatcccatagtttaataactgttatttaacatgcccactatatcaatacatttttcatattatttattcaatcaaaatatatatgtgtcttaacattttcttttaatgtaactttgatatattgtaatttagaaaaataaaagataaaggactgtatattaaatcacactaatacaaagtggtattatttccaatagcataagctcaatcaaccagcttgggaaataaagaaacttgtatgttttgggggtcatttccaaaacaattaatgttgcaaaccctaatttgagtggggaatttttttgtcgaattttggttttcgttaataatgatacatgcataaggttgttcatttaatgtatgtctctcaaactcatggctttttattattattttaaaaatggtgtaagagataaaagttggaatcactagggtctaataaactacgatgcactgtccttatttcccgggttacatcttacgtgcatggggacatacataatttaattagtatacatgtgtatagctagatatgcattgggaatatatttttattctttataatatacttaagagtattgctatgaggagtaatgtttaacagttacgtgttattttataattgattattgatactctttaaaattatattatattaaattatgctagatctgatatttgattgtaccaataataatatagcataagttgagggatatttctcttttatatatattaataaaaaatacttttatattatatttcattaaaaagtactcatttttgtgagtggattgtccaatatactcttaccatctacttaaatctagcatataatttacattaacttaaaagatataatgagaatatcatatataaatatgagtatattttaaaaaataataaaataaagataaaaattaaaataggtaaagtaaaaacaatataatttcctttagagcaatattgacgtatagaatagaataatagtagatattataaatatgtttatatacatatataaaattactaaaatgtaagagagagataaagaggttgcttcgtagtgaatttatcttggaaaccgatgcatcagaaattgtttaaaaatctttcctcttcatgatcttctcatgatttttattatttagaattataatgtgatctccttttgtactacatgagacaagcttattatgataaaattaatcacttcttagtaattcccgttagtcaatatcacacaatctatcttcaattgatttaaatttagctcaaaagatatattaagtcaatgttatattatttgatctaaattttataatt

SEQ ID NO: 193866 - DNA, 1059 bp, Cannabis indica
tttgcttgaatgagatacacatgattagttgatcaggtctcgttagctgactttattatatatattgctaatgagcttttcattttttatctatatattgcgaacaagtcgtgtagtaaagtgtaaagatttttttcaaggtctagatattagttgaagacaattaagtacaaatattatatttaatatttgagcatatgtagtggttatatatgtttgtaagtaatctttcggagagaggtgacaggtatatttacatagtaattgaagagagctagctagacagagaagtaaaacaaaatagtgagcttcgtagaaatttcacattaggttttttttttttttctttttttgagatttattttttagatgaaagatgccctatataaagaaggctgaaaggttgcagggtcatctccaattcaaactaaaatttcatctaaccccaacgcatgttttgcaagtttgtgagcaaaggtattggtagtacacttcacatgctggaatgaaaaattgggaaaatgagacaaagtgatcttgatttgagaaattaactctccaaataaagagagatcttctttgttggaggcgatgacgttcgaaatggatttacaatttgtttcgatctggtgtagagaaaaagcttcttcaagacaccaagatagaatttttaggagggattttgcttcaagactggaaacatcttctcactactacaaaaatcggctttaattacccatttagagggactctaaaagtttttagcatcccctcactattaattacgtgggtgactgaaaaagtattatttagtgactctacattacgggtcattaaaaccttttagaatttcttaatgggcgtcattgtacctttttataatctcacctaaagataacagctacacacaaagtgtgtcactgtatctattttttaatttattttttgaaaaatatattcgatcaaattaataattgtaaattttaaataataactttgaataataatattcagggaattcgataaaaaaaattggttttgatactaaaaggtgaaata

SEQ ID NO: 193867 - DNA, 2291 bp, Cannabis indica
ttttataccttgaataattctctctctctctctctctctctctctctctctcatgtttttactcctttggtgcaaattgttgaagtttctgaaaacttttctattcaagcccataagattaagaatttggaatcattatcataatgtgtttcaagtcatctccattgttcttcattaatattttcaatagacaatccagtttggctgatttttttctcaactctgttgcctctaccacccaacttacattaaagtcagtatatatcttttgtgtgtgagcatgactgtaaaccaaaactaaatattataccatgttcttcttctccttcatatacatgtatacacagacactccatgtttctaacgttgtataaataattatatacatgccattgaaaaagacacattgtttccttctgtttccatgcagacaaatggcaggaaggactttgagattggtgaggagttaaaagtggagtgttcaagtttttcgacgaaaggcattcccgttctgtctttgttagatgatgaataggtttgaatgaggctgttcagaatagtttgtgcaagaacaatttcacattacgggcaactagaaagacggttgatacgaagagactttggttgcaaagtgggacctgttcacagttacaaattcttccagaaagttaagactcattgaacttttgtaaatttccattaaggttttggaagatgtggctttcggggtttggaacggaaaaatacccttttaccagccctgagtataacaggaattttgggtcacatagtagagtcagctcctacttgaagcttaaagaatggcacttgtatgtaggttagctgttatttcgtataaaggtgacaattagagtggctatatccaaccttactcttcgaagttataatggggttggtgtactcatctttctaattcttgtggtcgcatatttaattatttatatttttttgaccttataaagtgtaaactgctattttttcaagacggacaaacttaattgtggagaaaggaagaagaagaacaatagtgtgtttagttaaaatatcattcggttttatcgaagataatttgagccttatatcatgtaatccttgcattttgctttagtaaaatataatatttatgtatatatttatacatgcttatttctcctttggttatgaaagtgataccaagcaatgcaagttacatttttctcattgtctagatgaagatgtgtatgactggtcctggtgtattgttttctttttaaacaatagtaacttcgataggtaacaattatcttatatattttattttattttttccaaaaagaaatggttttttttttgatgaatccaaaaagaaatggttaataatggtaataacaataaataacaataaatgtggtggtggtggagaatatccacacaatcgagtgttttagttgtattcggtcagtttggccatatttttaacaccattcacataaccaatccaaatataaactataacaacaaacaaaatacatttttttatttttccaataaaaattaaaataaaaaaaaaatgaagagaaaaagaagaagtggtaaataaaaaaaaaacaagaagagaagaaaaagaaaaccgtacagtgtttatcccatctaatattctaacagaggccttttaccatgaataatattgtttctatcattgtaagtattacggttaaattaaaattacaattaataacaaattttaattattaatattaataactaagtatacgcattttcaggtaatattaacttagtattatatatacttgtacatagatgcagtgttagactttgatctgagaaaggaatacacaggcaggaaggaaacaaattaagaaagctggtgaaatgtcttcttttgtagctgctatgcgttagaagaatctcgatagtttaatgtgtgaggaatgcatacaaaacgcctcagatagttgcgttgcatgcctaccctccgccgaggattgtgtcctcaattcccgatgcactgcgtgataatgctgattaattatgattttggcaacaagcccgatgtccgtggaaccaaaggtaccttacctaattaatgctacccccaacctctactccttaattacttgcttatttaacaacacttcccctcgtaattataaacccacactataatatgttatgattcagtttttgaggtgattcatgaaattatatttcaaagaacatttagatgtgtgtttggacgtaaagtagaattgtaatacataaaattaaat

SEQ ID NO: 193868 - DNA, 2331 bp, Cannabis indica
atgtattgtttttgaagattttttattttaattcgaaaaaaaaaatttaagcatattaaagttgggcgaaaaaaattagggatgtgacttccaaaacgacaacgttttcaaagattccttgaaccctaacagccttgctactccgctaagggtttaagcgacccactcctggccttctcctgtttctttcaatcgccaatctttcaacctcaaatggcttccttctgcagatccgctctaatggcgggttccaggtccctcgttgctcgctctaaagtcgtcactccgaaatcgctaaactcatccccctttgcctctccattttcttcaacctccggttccattcccagagcctccaggtataattgtttccgttcctaccagctcaccaatgatatcaagattctatttttatacattatatatatacatattttacactgtcctctctgtacaattcacctgcttatttatccaaacacataatgtatattgattctgatttgtgctgtaatattaagggttgttgctgctttgggaagcgttgattcattgatgccacttcatagtgccattgcttctgctcgtctcaagtctaacatcgctgttgattccaccttctggagctgcctttctcaaggtactatgtctatatagacataatatatgtgttactaactatttatatttttcaactattaggactatcaaccctctttttttttgttttgggttgaattgtttcttggtgtcagcaaagcccttttatttatttgatcaattttatgttttgatgggtagtgaacctattagagatgatttgtgagagctgtgtttgatttattatgtgcctcttgagtattttgtgcttctcagggcctgccatatataactattaacagatatgataatatgcagagagagacagaaaacctaaagtacatcccgtttggcttagcttctataaatcttgtattaattttaaagttcttttggaagaagctgagatttgtagcttctttcaaaaggacttttaagaagatattttaaaattaaaataatttacatgattcttaatttactcacagaagatctttttctaatgatgtctaaacactttgaaaagtatttttcattaaagaaagatctttatataatagttatccaaacggtaaaaataagtcaaaccttatacttatcttatacttcttctaagtagaatcttagccaaatagagccataaatattctttgaaaggccctttgccccccattaatattgaagataggaacagctaacttttgctttaccaattgtaagtgtatttctgacttgtttttctacctcatggtataggacttgcatcacccttgtgacaaggcccgaagactatatgagacaataagtgaatagggttttccttctatgtcactatgtgaaaggcaaaagaatcttcaattactgaaatttggggctatgtatcgtacattttatttgaactatttaaggaattacattctaaattgaactttggtatttttgttttcttctgtacgtttgctttgaattccatactaatttgtgcttagtgtatggttatggtggatgtaatttttaaagatgagccttagcattctaatgctgatatatgccattctttctttatgctaccgactactgtgtttagtaaattagtatcagtattatttttccttcacatttcattaaatgcaagggatttataaagttgactaaatcatggttacaactggtttttatttataagttggcacttggcagaaatgattttagaaaagggaaagaagaaggtgacatcttaaaatgtatcaatgtgtggagttgaaggaagaaagattgtaattatcatataataacttaattacaagtcattcaagaaataatgtatattttgatgtggtaaggacagaaaaaacaccgtagttaggactttgtcacttgatggatccttatacaggttcctggtgcagaaactttaagataataatagaggagtctgttgtcgctcaggactaattacacttacctctgtcagttacagttagagtaggtgttatgccctgtttttttttcttcctgaaacaaggttttatgtcctttcatatctgtattttagtacctgttagcagatacagaactggaattgattgtattgagaaaaaggtttttcgtcggttacaggttactgaaatcggttatgattgagaaaagagttactttcattgatactaagcttatcttgaaaaaatgtggaaaacaagagaattataatgatactaatttactaaacac

SEQ ID NO: 193869 - DNA, 2908 bp, Cannabis indica
ctctctctctctctcacatacatgtatgttcttgttgagttctcgtgcagggcttattttgatggaatatgtcaaaaagaaggttaatgagaagtcactggtgtcaggcttgggagaatctgttgcattcatggattcttgtaatctattgaaatgtgaagtcgaaaatattttggagagcgaggagatacaaatatctatagctgctaaattgaaaaagagacatgcaaataggtcagtggatctcactcaattcctgctttagtttggcttgtgaaatctcaggtgtgcaaatggggttattgaagaataagaaataagaaaacggatccttgttgctcttatattatgtgatgtatttctaaggataaaaagaagaaaagataatgcttcttgtttttttattctaccaggactgcctagtacttcacttttagacctgggctactgcgcttagcactgttagcttgtgtatctgtatgggttatcacattcgctagtgcatccatattgagaatccaacatgtcgatgttgcatagatacatagatacatagatattactaatttaaacactcgactgactgaatagttttagataaatgtttcttaaaaggtggagttttatatgcctagtatgctgcctgctgttctcagaatcttgttgttatgtttagttgcaagttctttaaaaatatttgcctcttctcttgaccaaattttagctcacaacttgccatggcttctttctcattagctcatactcactattgctaccatatttgtagatacatttgtgctagatatgttgagattttcatcttgtctttttatgctccaagcatatataagcaccttcatattacaaagatgcctcacaaattctaatcattttgtcttcagacttttatcctagctcacagtttcagctagttttgtgaaaatgtgaaattatttttagaacaggccattttcaattttggtgtgagatcaatgttaggcattctttaatagtttatgtgcttgtttttatttatttatcttttattcttttctatgtcagaaaacaaaaagacgccgctgaaaatcagaggaaacggaagcgtagagaagaatagcaagaagtggtaagggatctctaaattagaggaacagcctcgtcaaattttggtacagtactcaaatctcttccctaatttgagttgttattgtttttgtgcattcatttctttctacatacccttaatggagatgagttgtcaattttgctacttttgtgatcattcattgtatatgaaataaaaaaaaaaatcatcattttggttttacaatgtgcaaattccataatttgaatgtgtgtttactatacttggtaagctcattgttatgtaacaattatattctaacctttctattctatctctaccggctaaaaaaaagttgtattggtatgtattgtcttatgaacttttatctgcaccaatatcaactatgacaaaattgtaaatgaaatgtgttcttgtgtgatggagtgttgagtgtggacattcaagttttctggacaaatccttaaggaatatttttttatctagaatccaaacattatactgaggattagacaatgtatccaaatcccaatccctcatatcatctccaatggttacaccaatttagtgtggaatctacactaatttggtgtagaatcttttgtttttagtacttcaataactcacactaaataataaatatatcactaaataaatatattttacttaaaaagtcttacattttatatcatttacattaataacttaaaatatttaatttataatataattatatcatgactattagtaaagatttaaaattttaaaataatttaataagataaaatattttataaattaattaaacacattttttttaaaataatattgaaattttatagttgagcttattatacgcgaccatttttaaaataaacaaataaggattatcttaaaaagagcttaccaataatataaaacattttaaaaatattagattctcaaaaaatacttaagttcataaccaatgtttattttcatttatgcttgtttttttgttttataactatgttttattttatttaatattaatattttttttactgttattatgtattttcaaatatgttagtgctttaaatcaattattttgtaataaattttaacttgaggactaaaatgtaagacttaaaataaaataaaataagggttcgaatgtgaagaaaaagttttaaaccaaattggtgtagatttaaaattcaacactattaatggtgtagaatttagtgaacaccaatttggtgtcattggagtgaaatggtgtaaagattctataccaatttggtgaaatagtgcaccatttcaccaaagtagtgttgagttttcacactatttctcttaaatgacacaccaaattatgggaagaaaatctgttgtccccaaattagtgtgggctctctatcccaccaatgattttagtatacattatctatacatatttaacatattataaattctttaacaaactataaattaaattaatatatgtaaaataggtatagatgatgtgtcgtgaaacaattagtgggaacagggtgggcacacaaatttggggcaacaattttttttttccaaattatgcaccaaattagtgttcatcaaattctatactattaatgatgttagattttgaatctacactaattttgtgcacaaatttttttttgttgcattctcacccttattttatttgatctttaaatataatcttatattttagtcctcaaattaaaatttatcacaaaaataataattaatttaaagcactaacatatttaaaaatttcaaaataacaataaaaaa

SEQ ID NO: 193870 - DNA, 796 bp, Cannabis indica
ttactttcttcctttccttccattttgactatataatattaaggtggaagttgaaaacggtcaaaagtaaaaccctttttcagtttacacacataaaatcttattcacaatcttatccatttgaaacatgatttgaactttagaccttaaagttgggtcccaacttttattttttaaatataaatatatatcttttcgtttgaataatctttaaataaaaagaatgattattttgttgtaagtttgtaattttatgtatatatttccatggtataggtatatataatatagtgagtgagtttattacctgtagagagtcgccgacattgataaaaaatgagtcttgatcaggtgggactgaaatccaactgtcatccctcaaagaaatttggaggccagaagtgttgttggatctcagaactgaaatgatttgtgggtctgtgtgctcaccaaacccaatcacattcccaccttcaacctctggacatggcggatagtgattcagtctgaaaacagagtcactctgttcatccattaacagcttactcagcacattcctcggctgaatcttcagcccttctgccatcagttcaagaatctcacacgccattttcttcactgccagtatatagtcatccaaagcaaaactgcaaagaaccaaaaaaaaaaaaaaaaaactatcagaaaatgaaaagagaaaaaaagagtgtttttttaattggttctgtttaaagaattgtattgtaccgtagcttctgtgggtcttcgccaaaaactgattaaacctttcagaatt

SEQ ID NO: 193871 - DNA, 2361 bp, Cannabis indica
gagtttttgtgtacctggctttttatagttcatggacttaatgcatgatatttagctataataagtaggaattttctgtaactcgttactgattgaattcctgtttttgcaggtgaatgtgagtggtcaattctgtggtgttgcagagatgattggacctgtcgactttaacagggatatggatttactggcagcaagataaatggagtgggagcttccctgtgaagtggcacatattaaagatgtcccaaacacccagtttaagacatatcatactggaaaacaacgagaacaaaccagtcacaaatagcagggatacacaggaggtactctctctctctaaatttgttgttgtttaacactacttgagccatttgtatgtatttttagttggggttgatcctgtagttttcgggatacatagcatttttgcatagttttatctaacctccttttttttttccttttcctgggcagatcatgtttaagaaaggtattgacatgttgagactttttaaaaatcacacgttgaagacttctttactggatgacttcatgtactacgaaaaccgtcagaaacttattcaggaagagaaagccaggttactcgttagaagttttgaaagtccatattttgtaccaacattgggtccgccccgcaagttgaactgtgctgttgagctacctcagagtaaaatagacaatgttgataacccaactgatgaccctagtaactcgaaaaaggaaaatatttcttcctccgaaccaaatgtcacttacacattactacaaaatgagaagaagtctgagaaaaccagtgttgaagcagcaaaagacaatgtatccaccttaaaaattggttcactcagtatcatcccgaagcccgcagtcgactctataacttcagcttttgatgtcacagttggttcagtgcctctgaaactgaacggaaatgctgaatcttctggcattttaaccgttggaacaattccgatcaatcctaaggtgttaatgatcgagaaaggaggattagttgggagaaagggttcgcaacaaaaatgattgatcagagttgttttttcttcttcacaagactcattttgttttttctttttttctcagggacaatggaacttgagtactcttactcggtcgtagttagaggcaaatggtaaattgaaatactgagtttgacaaatgcttttttttattcttcttttttctggggggttattttgtccagttgtttctgccattgtgcccaaaaatggcagtcatatagtatgaaaatggtattcctttacctttttatttttttggtggagggtctatgctgcctgcattgtgttgttgtcccttgattctcaaagcaaagtgaatacaatattacattttttttcttctttttaaagtgtattttaactttctggttttgatatttcttgctccaataaaaataaatagccaatacaaacatttaaaaggtgaactgtaagagtatctgtgtacctgaaaacaaatatcagtaaagtgtgtgaatgtctactcatttgaaaatattctcaacttttgctttcagttttattgaaactatataatttcgggttgttcttttgaatttggtacacaatttcttttatatgtgaagatagttgttgattgttatctagcaaaatttagtgttaaatttgatttgcacaaattttagtataggttgaattcgaacgttttaaatattgtcccagaacatatggcaaaggccacattttcgacaagttatttagataatatttatcactacatattattttattagatgtgagaggttcaatttaaacatccaactacattcggaattaaaccgaagacctcaatcaccattcactctatctaagatttgttggtattgtattattttgggagtataaccatctagtatattgtattttcatgaaaaatatatttggtattttgtgtttttaataatatttaattggtactttatatttttaaattatacatatttggtacctaaaataaaatttaatcaatacacttttataaatttaaccaaacagatctcaattggtaagtttaattgtattgataaaagttatcaaaaaaatttgaacttaatgtaccaaatatataagatcttaaaatataggatactaatttgtagttagataaaatataagatatcaaatgtgtagacacctaattatttttggttaatactattgtgttttagtatgtaatgtggggattgccacttctgttctccaccagatcgtgagttcgctattgaaaccccaagtttgagaggattaactcctgcgatctactttctatgtactttct

SEQ ID NO: 193872 - DNA, 3157 bp, Cannabis indica
taaataaaaaaaaaaattatatgaagattcagtttttttcaaaataaaaatattatgcaatagtatggcatttttcctaaaaaataatacatttaatagaaatatcattccaattgttttaaattttagaatgggttgaggtgttaacctgaggtacccttgttgggtctatgttgattttgtctttttaaatgtttttttaaattttaactgcttctctttctgtttttccctcccctttctagttttcttgatgtttgaagtgctgattttggtaactggtttggatctctttttctctgtttggatttttgactagtttgctgatgaattctttggagtcactaaattctactctttccctcactaaagaggaaactatcacaattaactcgcctgaccatgtctagtctccctcaattgtccactctactcacattcttttggtccgtgtgcttactgaaaatactgtgtataaacttggtttcttaaaacaaatgtcagggcattggagaggaagattctcagttataatctttgaatgtaagagtgataggtttcacattggatttggttgtgcaagtgataaacttcgagtcctcaataaagaactatagcactttcaaaattatttaattgttctgtactcaccaagggctctgcaaaatgtgtcaaaggaagatttgatattcacccctttttgggtccagatttatcgactgcctttcctgagcaagtcctcaagcttggctgaagtacttgggaacattattggtgaatttttgaagtgtatgaagattctactaatgaaggttgagggcattttttgagagttcgagtaaagttaaatgtaaccaatccattactacggggaaagatgattaaactgtcaaatatacgagatgaataatgggcagttttttgttacgaatgtttacctgaattttgcttcgaatgtggtctctttagtcatccttttgaaaaatgcatctctttcatggagcgaatggatgatgttaatgatgatgatttaagtatgaaccttggatgaagagtttaaattaccaaccaatacctatgacaaacatcacactaatttttcgaagggaaattcgcggccacttctcactcgacttggacgaaagtctctggttacctctctcccttaattatttgctcaatatcctccccaaactaaagaccctacttttaggagaatgctctacttctcaacagcccacactacaactaccttttgcacagcagcatacacactctcgtgttacctttaatgtagcctcttctcctattattgcagagcacggtatgcatccctctaattcttttcctccaagatctttagcctctactcaatctttttccatttcatctccaccaacagttactgatctctctcaaatttacatcctagatataagtctgactgcctcaaacttttttgccacctatcctccacaaataccgtcaaatttcaccacaaccaaatctcacacacctgttatgaacatctcctctgaaaaaatatttaccacaccatcttctttagtctcgatcacttcccaaacaaatacctctgcaggtttctgtcacaccagtgacaaaaagaatgttaagccaaattgttcttttaagaggcaacatgatgttctctccatccgtaaagttctaaaacgatgtcgtggtacccctaatttagcaacttcatcttggtcagttgaagaaggctatgaacctaatggttctgctactttagtggattttgatggttccatcaactctatagcagaggttgctatgcaaccccacaaattaccatgaaaataataagttggaacgcacgaggactaaggaacccaagtgcgttcaagaatttaagattgcttattaaacagcaatcaccaaatgttctcttcattgtggaaacaaaacttagtagtaataatgttactcgcttcaagcagtcacttaatttctataatggacttgaggcgccaatagttggtctaaaaggtggcctaatgctattgtggaaggatgatgttgatgtcactctccagcattatggtgacactttctttgactattttatggctgttgctgatggtagtctctctttctacttcacgggcttctatggtgcaccaaattctcaaaacaaatcagcttcttggcttcttctaaagcgcttcgatgaggttacttctcaaaatccttggttggttattggagattttaatgaaatcttatcgaactttaacaaatcaggtggccttcttcgaaatgaagctgaaataaaccctaaatctcattatcttcacacaccctcccgtatctatctatctctccctttgtttactgcgcgtggctctggagtgaccacgactaggtagttgtgctccggccatgactttctcaacccaagaaaatccaaagccccaacatctctctcatctctctttcccttttcccttacgtgacgatactgttaggtcacgatggccttctccaaaatatggtggtccaaatagaccacaccctaaagcttgcaacacctggaaacccgaatggcggtggtttcccccatttgttcgcaccccatcaaagaggacgagctaattggaggtgacaacccttctctccctctggtttcctcacgtggtcccaacttcgcacgactcctacatctctattcttcttcccaaatgacgaacgacctaacatcgccgacgagccaaacagaggtcaccactacctgggtttttacgggatttgatactaggcatttcaaaaattttgtattttcttgtttgaagatttaggaattttagttatgttttaaatgtatgtttatgcccatttattttttactgtccagatgagttatagattttgattaagttttactaattttatttcttgatttgtatatattttgtggtattttgttatattagtttacattaattcatatataatttattaaattatatcattaagtatatttttatcaaaatataattaattaaattattataataaattttataatatataattgaaataaaaaaataatattttcttttttaaaaaaaaaattaaatatagtgacaatcagtaagagtagctaatactttac

SEQ ID NO: 193873 - DNA, 1045 bp, Cannabis indica
ttattgtatagataataaattaatctataataattaatgtttgggctagctttcattccatgtttatgaatatttaattagttatataatacgagttgccacgtgcatttaactataattataagagactagcacacatcattattatttcaaatcttctgaaagcaaatattattaattttaagaataataataataataataataagaaaagggtagcaaaagatgttgtcaataattatgaaatatataataattttgtcaatttttgatcaatttgtcaaagttacaatgatgcaatgctttagcagacacacattgaaaaagaaagaaagtaaaagaaccatatacgaaataagaatgtgaacactgaaactataaatatatatatatagcatgtataattctctcaccaactacaaaaccaataattatatatatatatatatatatatatttatacacaccaacctttccttgggtaatttgatgattgactaggtagacaaagaaaataaaaacaaagtagtttaaatttgactactttaatgttaatggttgatctctttttccatacttgttttcttgcaccaaaagttaggactagctagcagaagccaaaactttgaataaactttattacctcattatatacctaacatttataaatatatttattaataagaaaagacaattaattcttccctacttaaaaattaaaatatgatctttttttattcttttttaaaaataatgtatatatatatatggtgcttgcaatctcctacaactatattaatccttattaataaaatcatatatgtaactattatttataaatatatatattaagaaataaaataaaatgaccatgtggagttttattgcctcaatgattatttgcaagtcaactcatttaaccaaataagatcaaaccatatatttacaaagagtcaaggcgcgcaattacatgttcaattagtatataattagccactctttcacgtgtttaattatataatttcatatataaaaaaaaataaaa

SEQ ID NO: 193874 - DNA, 1648 bp, Cannabis indica
gaggcgggcctaatcatgccccctaagtccccatgaggatcctatcttggaactgtagaggcttggggaagcttgctgcagtcaaggcgctccatacggtgatctgaagtgaaaacccagatgtagttttccatatggaaactaaacaatcagagaactttatggcgaatctgtgggaaaaccttggttttttttatggtaaggtcgtgtcttcggcgggagcctcgggaggaattgagttattttggaaacaaggttggcaggtggagattttaagagcggagcgtaatcagatcaaagttttgtttggtgctaacggcccctatcctccctggattggagccttcatttatgcgcctccgcatcgtgaagatcgtaaggagttctagactgaatatactgaagaggtttttcactgggattccacatggattttaacggaagacctcaacaatatagtcaacctagaagaaaagacgggggcagacagtttactttgtctgaagggtggggtctcagggattttattttcaacacagagtgcattgatttggaagctactggagccttatacacttggactaatggccatgatttggttggtctcgtgaaggagaaacttgatagagtcctcgggtcggtggattggtatactttgttcaccaaggcaggagtgaaaaatctacctatatggagtttgaatcactctccggccatcgtggatactcagatggactccgaagctattaaggccccttttaggtttattgatgtgtggacgatggacccttcgtgcaagaagactatagaggatgcgtggaccattaatgttaggggagtgagaagcttcgtgcttaactgtaaacttcagaatactaggaaagccttgtagacttggaacaaggaagtttttgggttttgtaagcacaagaagttgctacttgagaaattattagttgaggtgcaaaacatgcctatctctttggaaaacataaaaattgagaaagctattttgatggaaatggaggaagtggaagctagacaatagagtattttcaagcaaaagtcctgtgaattgtggctaaagcagggcgacaggaactctaaattcttccacaagttgttaatagtgagaagaaagcagaaccatatttgggctatctcagaggatgaagctaactagatcgagggtagaaataatattggtgagtattttacatcaaagtttgaagagctttatgcctcctcgaatccagcaagtttggatgggttactgagttaatcggtagctctgtcactgaggaagagaataggatgttagtggcaattccttctgccgaagaagttagaaaagtggtgtggagtatgcctcaattgaagtgacctgggcctaatggcttccttgggcggttttatagaagatactgggatattgtgattggtgatacgacaaagtttgtccaagattttttttccacggccaaattcgtgagggtgaccaatcggctgtttattgttttgattcctaagaagataggagctcgaagatttgatgagtttttgaccgatcagtctatgcaatgtggcctataaaaattatctcaaaaaattatagctacaaagattgagtaatatcttacaagataaa

SEQ ID NO: 193875 - DNA, 680 bp, Cannabis indica
accctctcttcattaaaaacattaaatatacttaaaatcctctattaccctcttaacaattctagtacattttaaattgtcaaaaccccaattttatggactcttcaactctatctctatcactgtcattgtcacataagaaaataaaaagttcaaagcaatggtctccgaagatgagaaatgggtccaattctattcctcaaatcatcaaatactgttagtgggtgatggagacttctcattttcttcgagtttggctcgttcttttggctctgcttctaatattgttgctacttcactagacacctatggtatattcaacacccttttctcttacttatgtccttttcaaagaatctatttgcaatgcatgcgtccaattattaagaaaagattttgattttgaatgatacgtgtttgtattctttttcatttggtatgaaactgatcacgttgttgagaatcccctttttttcactagagggcaatgaacatgtcgttactattaaatatggtttgattgtacaagattctttctctttatttgaatacatttacgtcttttaattggattaagaatattttcatctctgttaacttgttcgggaatccgaaaagatttaattgcaatatagttattttgtatactattttgctttttttagaagctacaaactcat

SEQ ID NO: 193876 - DNA, 891 bp, Cannabis indica
ttttttttggaagggcatttggtaggatcatatattcctaattcatactgacacacatttttttatgatagtggaactcaatctttctcctttttgtactatttttgttgacattgagtttttaaatatattatttatgatggatgaattattgtaagcaatttatagtagtataatctcatatataaagattgtaatgaatttttgtgaacacattgtagagtaaaaaactaaataattgactttaagtttgagtttattatgccaagttacttacctttaatttctttagcataatcctatttttgttttttttccctcccaagtagatgttgtagttaagaagtacaaggaagcaaaatcgaacttggaaactttgataaacttgggagcatcccctatacatggtgtgaatgcaactatgctgaagacttatcgtaaacttagaaatcggaaattcgatcgcattgttttcaactttcctcatgctggttttggggcaagggaagatgacagcagtgcaattcagtaagttgttttgattacatttttcttatttggcttggttttggtgagagtatgcttgcaatatctatgttattataagtaaaaattaggaagaaagaagcaaaatatatggcttgtctattgttcttcaaaccatttgcttttgttctagttattagactagtaaaagtaggtcgaaccaatttttgctatgctttcacaaggtctaataggctataagtttacaacataaattttattcttgcatttgttgtttcattgtatgtgttcacattgcctgtatttgttgtgtttatgggcttcaaagatttttttttttggtttctctttggcaatgtatatccttgacagcaagcataggag

SEQ ID NO: 193877 - DNA, 819 bp, Cannabis indica
aaaaaaatcccatgaatcatataaatatccaaacacccagattagattgcaagcaatccaccattctaccaaccccgagaaaatttggagacaatgcacagaagccattagtcaaaggtaaccagtgttcttcataaatatcaatctctttaccatctccaactctccaaatagccccaacgcatcatataattcctttctccataaaatattttatgatacaaacacttcaaaacccgagccgccaaggaagaagggttctaatacaacctcaaagcttgtttagccaaaaggattttgttgaaaagtcttaaatcctaaaacctcatttcaccttcatccttatgccaacacaatttcttccatttgcaccagtgcattttcatcttcacatcatcacccccaccaatatcttgcacacatgcaatgaatatttttcacaaaacctctcgaaagcttgaaaagggaaataatataagttgggatggattgaatgataactttaatgaggatctctctaccaaccattagaaaaatattagccttcttttagatacgatccaggatataattaattaaatatcgctgacttagttgccccaacaaaataaaggggcccaaatatacttttcgtggcactcaacccccaccaccccaagagccatggtcatcacaatcttattcgcctcataaatattgggacgaaagcagatagctaacttctcaaagttcacactctaaccagaggccacaccatacgaagacataagaagtttgaatctttcacatgccaaaataatagctttttttaaaaaaaaa

SEQ ID NO: 193878 - DNA, 538 bp, Cannabis indica
tataacaacttcagtttaaacccaatgaaagatagtcaatggtcaacccgagagctgctccaatcaatacctacaccatgtatgtattactttcattttcagtggttctccaaagaccaattgttgttcttttattatttgaccttgtgttagtacatacttcatcaatttctctttccaatcataattaatgattattcctctacaattaatctataaaagcagagactgtgccttaacattctccaaagaaaatatttaagatagctctagtttcacttgtataagaagttgtttgctagctatagctatctccatccagtcatctcttccgcagctggtataattaattaacaactatctatgataattttcatgaatcatcatctttgtttttttggttctcactctactaaagataaataaaatttttatttacaacatcatcattattatgtataatattattattattttgatggtaattaaatgcaagatctaactagtacttattgtgtacgcaggcccggccctgggc

SEQ ID NO: 193879 - DNA, 2967 bp, Cannabis indica
catactactattggatttaatatccagttcagatgaagacgtttttttttttaactaaaatcaacctttatcatcctctctacttatctatttatgacgttgattaaattctagaccgaagctttgattctccaattttacaactggaaaccccttggttgctatattcaattggtgtatcatcacctattgactgatccctggcatgtcttctggttcccaagcaaaggacttactcctccacctacgaaagcacattatttcttctctttctttttcatgcattcaggctcctacaacatcgtctttttggttctgaaagatcaagtgggatttctttaagtttgtctactgttatatcccttacactcttctccttctaggtgcttgaggtatgctagtaaagagccctctgattgctatttcttctattctgcaacaatttcttgttttacgtcgttaactttcctcatcaaaatacaacattttgtttcttttgacctttaatgtcgaatacttgagctacattaggggttgggcatcttaatatctaatggagagtggatgcttatccctgcatttgatgtaattatcctctcccgattattgcattgtagcctaatgttgccttgattacaataacatcaactttcaatgtccttgtagcagttgtgacatcgaaccctataactcccattgtatagaattaattgttatcaaagcctttttaaaggtttgactcttaaacttaataggttactaattaggagagttcttgatccttatattattttcttgatcaaccaaagtcaaaccttataaacatattattaatcaagtcttagcttcatctcaattaggtgaaaaaattcttgcttgaccaaattatgcaaattattatatcacacaacgtgacgtggcatccatccgagtgatacgtgaacattttaaaacctggatgggtggcaccacgctcagcatgtcgtctaaagtaagttattcctcataaattgtttatttggacattaagcaggaacttccagatagggtacaatataatatcctaaaaacctagttatgaaaacttttgagttaagacttgcttttgatttctgtcacatatagattgttgtatggttattgtatgtttgttccatgaactttggaatcaatttgttaggtttttgtgggattttaagaagttaaaactcgggatttcacgtttcctatagaaaatgagagaccatttttagaaaaatggtctaccatttttccctgccatgaaccactaaaaaggactttctgttttctaatcggcttaccattttgttggtgtttagaacccccattttcatgttttctcaatgtttagggtattggtaccctagtgacgtatagggggacttattgtgatgaattaaggaccttgaacgagttaggtcaactgattaatcgttcttttttgttgttgtgacatagggcccaggatcgttaatctttctccattcatgtcagtcgacacctctgaatcaaaactcgaggtaagaaaagtacatctgcaccacatagcatgtcaagatacgatgaagattgttttaaaacttgttgaatatgaaagtaatgagacaggctttactcttatgaaaacaacaaaacagtcattatcattatgaaagtaaggtgatggtcgttaccattatgaaactaatgagatagtcattactgttatgaaaccaatgagaatatcattattgttatgaaaatgagaaagcacacatgaccgctatgaaagaagagtcatgaccccaaactaaaaccattgttaggtttcttacttgtcgattatctcattagataacgacaatgacatatgggggatactggtggctacgtatatgggttgtctggtttgacaacgaaattaatatttgaatacaagtttagctattagggatgttttactagattgcatccagagtatttatcctttaaattagtgtttatggcttgcgtcatgaggcaattagttcttccttattgattgttgtatacttatgataatcattttaagatttattcttgtcttaacatggatgatgatctatttgatttatgatgttaattatttttttgctaactctttgtgagtcacaggtgttttgaggtgcaggtaaaggcaagaggaaactaggccagccattagatgacaatcttctccagaaaaagtacatatcgacttactcgactttcatggctaaggttttaggtgttgttttgagttgtacctgatgtgtattgaaaaacttttgtaataggagatcccggaatcaaatttttagtgatgtcatcttgttcatttctatgttttaatttttgtgaaatttttattattatcacagatttgattaaatcactaatctactattacaaaaatatgctttaaaacaacacatgtgcgtccctaggtattagggtgttacaacatgatattagagcagccatgatttaaaggtcctaaaaacttgtcaaatatgtacatttggtatgaagaaaggtcaactcgtgatatattaagtgttttgtatttttttttttgttctattttttatgaagcatgctagaaaagtaatttagtataattatgatatgattatatgtgtgggatatgcttattagcattgatatatatttgagttctaaatggttggaacttggagatcacaggtgcaataagtcatgcaaccacaacgatcaagatgattaaatcgcgggatgggttcaaactaggtggtgagaaagagaatccaccagtgcctcagaattgggaacaagtttttgctgctatgcaagatacagttagatagcaagtggagcatattcttgaatcgagacagaaataggcttgtcctagacctattttggcacctttggcaccttaggtagtgcaaaagaatataggagaccgta

SEQ ID NO: 193880 - DNA, 420 bp, Cannabis indica
agtgcaactctatgtataccgatattgccatttctcatatgttaactacatggcaattcataatatatgtatactaaatatgtgcatatgggtatttatatattaatcttacttcaattttgaattcaggtttgctagtcaccctgattggaaaactacttgaccattgaaggccctaagtcacattagcaataaactggtaagtgtctattctaaaacacttaatacatgcatataaaatctagggtttttctactgaattgcatgatgaaaataacctaaaatagaacacatattttgactctaaatttcttttaaccctaaaaattagcaaggaaaattctcgagattaatcaacaattagtctcgagaaagggaagaaaccatctttaagagtcagccaagtaaggttgatggcca

SEQ ID NO: 193881 - DNA, 1589 bp, Cannabis indica
tgcaccagcatataaaccccacacatatttgactaatgtgtcgtttatcataaatgagttattcatatcacaatgatgatattagtagatcggtctaaatcctgagtattcatgaactcttgtttgttttcattaggttggctcacttgttgaagtttttctgataagattatttttactacttttattttgggaacttagtaacatgaattgctgggaacatgttatacaataagtggaatctaagctttccaaaatgatcaaatattagttctcttatagtgctaattctgaaagtgactacagttagagccaaatctatgatgagaattatagattaattgttcacattgaattaatagtacataaggaattcaagagataataagaaaggtaaaacggtaattttgaccaactataattatgaactaataaattagaggatgaactaataatatggattatataaatggactactaaaataattctgtaaatataattttatgtatattgtcaaaagagtgtaattctatatttatagtggaataaataatagaattaataaactaagttattctattaatgagttcaagttattggagcttcgaaatatatgtctgtggttcctagatcaccctataccatacagtatagagaaaagtttaatttgaggaataattattaagaaagaattaatttttatgagaaattatttttgagggtaaaatagtaattttaaataaattattatttgtataataattaaatttatttaactatctaattattcacttaaaactatatattaattaaatataatattattattaaaaaatattatgagagagaaatatattattttaatgaaaagtaatatttatttaatccattattattttagatattaatgaaaattaattagttattatttattgtaaaataaataataaatcttatttaacaataataataatttaggagtaaaagtgttaattatttattgaaagttttatatttatgtaatgttcaaagttgagaagaaatatttaacatcatactaatttaagaatttttggaccaaaatttatgagaccaaaatacatatctatttaaacattaaataacaatcaaataattgtaattaccaagttattcgaccatcaaacttgatctatgtttttttgttaattttttttttagaaaaaaaaaaatttaatgggctgcatcacactaaaagctacattttcaatttttatttttattattttggctagaaacaatattatattgataatgagaaattaacagctattatattcctaaaaagtaaaaacattctcgatctcttccaatacatatgagtttagaaaaaatacatcttaccaaaaaatcatacttacaataatacccttaaattatttggtaaaataaagaaaatcaataaaaaattatttatctgacacataatatgtactatccggttgcaaaccggctttaagaagtcaaaaataccttagccataatattttttttttgtcttatttgtggtgttacacacctcaagatgaggtgagggacttcataagtc

SEQ ID NO: 193882 - DNA, 1898 bp, Cannabis indica
acagcaaaattattatatgactgaaattattgataaacagtttgcaacaatacgactagtatacttaattaaaaaaaaaataggagataattaagaggctaaataaataaatagatattgatacgtaccgctgagatctgatttgtgaaagcccaaaaggtgatgtaagaaaggccatgagctgtgaagagagtcataaccatatgccccacccatatgtggtacttgatgctcccctccgacgtcaacccgaacaccgccagtaccgacgatccacgcgccaccgggaagaacagaaacgacaggcagatgttcccaatcaaccctaatctcagtcctgaactctcaagcttcgattcccatctgccattataattaatatcatgtatggtgtatggatattaattattaattattataatatttttttttgtatataaattatattgccgactgcttaattagtgcttacagtttttctccgtcttcagctgcggattggagagtaattttggcaaaactattttgtaagtaagtagaaaaagaccaaacgaggagtgcaatgaacatgacgaagaaaccaagctcaattcccgtaacgattcccaaagggcctttcacaaccataggctgtttccatagccctaagatcttcttttgttatcgcttctgttatatatatatgtatgtaattattattagttaattaataatttatgtttgtgttcatatatatagatcattaaattaaccaaaagtgtacctttccggaatattattattatgatcattcaaatgctttcctagatggttgtagatgcagcccaaaacagcgaaaaataagacgggaaatgtgtacagaagaagagtcgaacctgtattatatacaaaaatattatgagatatatttatttaaattaatacaatgaattatgaaatggactatatataataattgtaatcaatacttatatcgaaccttgtgttccgaaatacttggaggtattaaccttggacttgatacgaggctgccatttgagcttataggtgttggtgggcattatgatccaaagaaaaaagaaacccaaaatcaatatgatcattaggagcctcatggctgctctgatcgtacggatcatatgttgttgatgagaattatttggagttttaatcaccactgttggatccatctctctctctctctctgtgttgtagaaaagctgacaatatattaaaagaagtctttttttgtatatgtgttgagaatgttagtgaatgttgttgtgtatttatagggaaggaatgttagatatcatataataataactgttaatcatgagtaaatatatatatgattaattaataacaacaagcataaatatggaattaatatgtaattagaagcaaaaaaagacaagcagcatgggtcatgtttaccaactatacatttagataaccgcattaataaaaccaaatagttttatttttctctttttgttcttacgtgagatgacgtggcagttttgccaagtggggtatatcttcaattctcattacaatcttaaagtcaactacatttgcaagagtcatgcaacatttcatggtttaaacttaaattgcttaaattgcattctcttgtatatataatccccttttcaagagtcgctttcataaattatccactcaaagtctcaaagagaaaattaattaaacaaattaagcaaattaattaatcgttcattggtggtgaagcaatccaatttgttgttttttttccaaatatatattaatatatgtcagtagtcattattatatgtggtactaatctctgaaaatgacagtacgtacttggtggtgtttaataaatactctaggtagcttggtagatgatccaagtt

SEQ ID NO: 193883 - DNA, 2858 bp, Cannabis indica
taactgttataactgataagtaagtaactaactaacatttaacaaactacttaacatcccccctcaaattgagctgagatagaaagactaagctcagtttgtcccttagtaatttgaatcgaggagctgatagagcttttgttaatatgtctgcaatctgatcttgggcaggagtgtgcttcacatgaagttgttgctgcattatgcgttcacgaacaaagtagaggtctagttctatgtgcttggttcttgaatgaaggacaggatttgcaaacatgagtattgtactttgattattacaccacatagtgggaatgggaagcttgggaaaaccaatttcagcaagcagagattgtagccacaccacttcagcagttgcattggcgaggctgcgatattctgcttcagtgctggagcgagagattgttttctgcttcttggagctccaggaaatcaagttggaaccaagatatatacaaaagcctgaagttgatctcctgtcgtcggggtcagatgcccaatcggcatcacaaaatccttggagagacagaacagggcacggtttgagcagaagaccatgatcgagagttcccttgagataccgaagtatctttttgacaacctttagatgagattctagaggattatgcataaattgggagactctattgacagcataagcaatttcaggtcgagttatcacagcatattgtaaagcaccaacaatgctgcgataagacttaggatcagcaatagggtcactgttgtaggcagacattttttcaccaccactcatgggagtgggtagagaattggcacattccatcttggctttgcataacagatctgttatgtatttcttttgacacaaatgtaacacagatgacatttgatgcacttgaatccctaaaaagtaatctagagtaccgagatcttttaaggcaaattgggcatgtagatctttgacaagttgtgtaagaacatgggaggagctacctgtgatgattatatcatccacatagactaagatgaaggtggtgtgacattcagtgagcctgaaaaatagagaattgtctgcctttgcagaggcaaagccaaacaattgcagggcattgtgaagcttgtcaaaccaggcccttggaccttgtttgagcctatatatggctttgttgagtttacacacaagatctggagattctttgtcaataaaaccaggagattgagtcatataaacctcttcttgaaggtccccattcaagaaagcattgttaacatccaattgcttgatttgccatcctttagataaagcaattgtgagaatgactcggattgtggttggtttaatgattggactgaaagtttcagtgaagtcatgaccatattattgcaaaaaaaccttttgcaactaaccttgctttgaattgagctgtggaaccatcagcattttctttttctcgaaacacccatttgcaccaatagcttgttttccagggggcagaggtaccataacccaagtttcgttcttctttaatgcaaagatttcagtgttcatagctgaattccaatgaggggatttgagtgcagaagccacagtgagaggtgtggtggaagctagaagaaccttgggtttgtatgtgccaaccttggcacgggttaccataggatggttgttggtaatttgtggtggttggacagtagagtcagggggttgttgtataggtggggggtctgtagatggttgtgggggttgtatgttgtctagatgaggatgttgctgctgagtaggatcagtggtaattggctgcagctgtgttggtaaattgacagataaaggagcagcggattgctgctgttgctggtgcaaattaggggctgttgcagatgcaataggagagggagcagaggctgttgctgatgcaaatgagaagctggtgctggtgcagatgggtgggatgcttggctagcaattggtatgacagatggaatgtcatttggtacatgcaaagaagtagtagcattagtagatatagtgagataaggaaacaaaaattcattgaaaataacatctctagaaatgttaattcggccagatggagatagatatttgtaacctttgtgtttcaaactatatccaagaaaagtaaattgctcagaacgaaactcaaatttatgtttgttgtagggtctagtgttggggtaacaagcacaaccaaaaacttttaaagtattataatcaggttgtttatgaaataatttgtgcaagggagtgtcatgagctaaaacaggagtgggaagtctattaatgacataacaagttgttctaacagcttcatcccaaaaggaaagtggcatagaagcttgagcaagcaaggttagaccagtttcaataagatgtctatgttttctctcagcaacaccattttgttggtgtgttgtaggacaagaaagcctatggctgatgccatttttgagaagatatggttctaaagcttgaaattcaccccccccccccccaatccagattgaatagaaataatgggcagattaagttctttttcaatttgagttctaaagttgataaatgtgggtaaagcttcagatttggcttttaaaagaaacacccaagtgtatcttgagtaggcatcaataaaatgtatatagtatctataaccacatgaggatagcataggggaagggccccaaatatcagtatgtatatgttggaaattattttaccaggatcttagatctactcacaagtatgttcattaacaccctaaatatgaactttctaaaacgatgaaataaacacatataaagtttaggaaaccttacattgggtgcagcggaatataatg

SEQ ID NO: 193884 - DNA, 2196 bp, Cannabis indica
attttcttctttaatttaacaaaagctacatagatttatgatttagggttttctattttaaggtgcttttaatgaatatgattaattatgtgatatatacatttgttaagtgttttataaatcataacagtttattcaaatatacctgtgtgtgtctgagtttccccagtcatcccaaccttggggcagtatagcacttgatatgtaactgaaagcaaagatgacccttgagtaagctccccatggccttcctaacaaggcagttctcacaccagagatgttgcaccccaagaaaacgaaccccgtctcctccgatggcgactgccttcgttgcgctgtgattgatccagttccttctgccaacgaatgaatatggcatttctgcaaatatacatacattcttataaaagggatgtaccgatacacctctatctgattgagcattgaaaaaatatcttattatatacctcaaatagagaagctgcgttgccacaaatgaaatcagtggctccttcaatataacagttgctgtaataatgtctaccagtatcatcaagtaaagtatcttgaaatgaaacgattctacaaccatagaaggctgctttatcacctgatactctcaacgccacagctttaccacttgacccaaatgtgttctgtaataataataactacacaatcaattacttcttttttcatataattttacattaattactactatataatatttatacctcaatggtaagaaaacgtgcaacgaaatcagaagccaaaacagagaaagttggagagtcaaatatgtcaccaccatcattccaagtgataatagtaagagaaggtttggtaccactaattgttatgtaaggtttgtcagctggtacaacaattttctctttgtaaattcctggcttaaccaaaataaacacaagctcattattattggatggaactgcattgatagcatcttgtatcttggtgaagtcaccttttcctgattggtctacccttaatagcactgctgggctatttaaaggtatttcctcccccaacaccacaaaaccacttgatgaaaatgccaccacaataattattggtaataataatatgtaattgacaaaagacatatttgatgttggtttgtgaaatgagaattagtgaagaaaggaatgaatgtttggttgtgttgttataacaatgtgatgattttgttgggatttataaggtagaggtagtcatatccataattgccatagaatgaggagccgttttcttgatgagaaagggtttggttggaagaaatagaagtagccggcggcatgaacgtcaccctattacatttaattaattaatcaattataagtaaattattatatgtatttaatttagaaagtgatctcatcaatgattgttatgattaggagattaaatgtatcattggaaattgaattatagttcgactagacttgtaaaacaattggagtgtttcacaagaatattggatcagatatagctagctttgattcattgtttgtctgtaaatttaatgttataataatcattaattaatgtatgacgaattgtgttattgggaagggttggattggacttcttgctgtataggctaccacatcatcagcagcaataatagtgtcaactaatgatattatgacaagtgtagtaaagtggctgacttttttcatttgactttatgtttcatctagagacaccaacacacgatttagtttgggaaacatgcaagtaattttactttggcttgtgtaattatttttttcaatttttaatgatttcttttgtgagaaatgttgaaaaaaggagattattattattattatttattttcttctagtttgaataagggagttgtcatttattattatttttttttgagagatttttggtttgtagccggtggagttggtttgatattttatgttaaaaaaaacctagtttacttagagcctcctagatgaattaaaatagctcaatgtttaaattatagagaaaatttagcttctaataagtgaagcaaaccttaattattttacatattttttagctcaatgaatactgctagctaaatatgaaaataactattcattaagctaaacatactttaatattattttcttaacttttctatatatatgtgcaattagggatgcacacggggcg

SEQ ID NO: 193885 - DNA, 835 bp, Cannabis indica
ttctatattgtttccaataagtataatattatcaacataaagaacaaggaataccactacattacctataatgtatttgtacacacatgcttcattgacattttgcttaaaatcgtatgttttaattgtttcactaaaatagatatttcaagatctagaggttttctttaatccataaatgaatttaaacaatttataaatattttgatctccccaatctagcacatccccttcgggttggtacatataaataaattctttaagattgccacttagaatagcagtcttaacgtccatctgcaaaatctcataatcatatgtggcatatatgaacaagagaaggagaacagacttatgcatggccacatgagagaaggttttgtcataattggtgccttctatttgtgtatagccaaaatgctctataggtcttaaccattccttaagcattgctcttatcttgaaaatctatttacaccatatagatttttatcttttcaagtaggacttcatactcacaaatttttttggtgcacatgggatacatttcttgatccatgaaatttttccacttgtctgagtcaggatcatccattgcttcttcgtatgtcaatggatcgtccttgtttgtgtatgagataagaacatgtgtctcatgttcgcaacgaacaagctatctcacaaccatcctgctatgaagatataccaaggttcccattttaggaattatggtaaccttgattggtcgtttggctagtggtattggagttaacggttcacaattctactttccttgataatcattttttttttggtttgtgatctctcatataat

SEQ ID NO: 193886 - DNA, 1906 bp, Cannabis indica
cactacgttgggcataaaccggcaacccaccgtcccccgccgtctctaccttcttcaggaggatttgtggtcaccgcttcctcaggtatactatttcccctatctccgttagcggccgccgcttcaacaagggcttccaaatgaatctctgtaccagcgagagccggttcaaagttatcctcccccggaatgagaagagctctagcctccgcttgattttgagcctccagcacctcccggttcattctatcttgttcatatatctcatattccgaaaaacaatccttcttacgagatcccagccgaatccacgggccatacatagggactgttctattgaaatcatctgcaatcaaccttctttttcttctgcaataaagttcctcatgccccacaataccacacttataacaaacggagggcatattttcatacttaaaataacaccacagactaacaccttcctccataggtaagaaaagacccacaaacaaaggtttgttgagatgaatgctaacctgaagccggatatattcgttcgttgggaatccatttcgccaaagtcggtcaatcgacaccaccgtcccaatcttctttgcaatagcattcgcattcttctgagtccagaacctaggaggcacttcatacactcttacccaaatgggtgtagagttcaaatccgcagatttccatctaccatcctccggcatcgccttcaccaccaaaaaaccattaccaatcgtccaggggccattccgaacgatattaaccgcttcctgcttcctagtgagttggataataaaagtattaaggccaacttcaatcagtttccagccattggcaagtctccacttccttcccagaatagatctcagcaaaccattgaaaatagttcttttagaatacagttttgccaccacactcttttccaccacatcattcccaagctctgggttctcatcaagagagagcttgaaatcttccactccacagacctcaacttgtttatcagtcgaactactcgccatactcaaaacttcaccaacgctacaaaagaacactgaaagggaaacaaaaaccaaagcacacaagagaaaaccagagcaaaatatcacacagatacaggggaataatgagcacacactcaaccctagatcaccagaggatcaaatacagcaaaatcacagggaaaaccgttacctccactcagaacacgtacaaactcgtcagcccagtacagcgaaatgggaaaacgcaagctgtacggagagaaattctccaaactgtacggagagcatttttttaattataatatatgggcaaaataaagctgttaattaattataataattaccaggtatgcgtgtttgcattaatccataatgagcatatggaacatgtgcagggtccataagattctcaatcatcacctcatatctaaaaacatacacaaattaaattcacattatacaaataattttacatataatgtaatctaattattaaaatctcattggcttacccataatgaaattctctatttaatattgtttgagaaaatgatggatcatccatttcagcaatataaggtggtttttgctttgtaataatatttttatatttgggatgtgtatttggccaaaaccatacaatgccattctgtacagtacttgggtaaatagaaacacatgctttcttagaagtgtgaacctgccttatgataaataattcaaaagttagtatttaaatatacaaaatactaaaaaatatctaaaactatgtaaaattaattaccatatgtaatttaaaattgaatatacatatataactaatatcattaataatacgtggacatataatttacacacaaatatgataataacacacttataagtggcaagtaata

SEQ ID NO: 193887 - DNA, 1351 bp, Cannabis indica
cttctgtctcctttcacttcagatggatgaacttcagtattcacctccatcaacatccgacaagcttccttgggatctttcttatgtttcctttggttgaaaaactccaaaacctctgcacacgtatcttgaaaccttatctgtccaatcccatttggcagcatgaaagggcaaacaacgacgagatacaacatgtagtcagacaacaatttactcacgtctcggtttggatcagcactggtttctcttcttggattactcgaatagtaacattggtcagttgcaatgtgccataaaagaatgctttggtcgaattctaactcaatggttgaaccaaattcatcgtataagttctctcttttgaggacatggtcacctctgctccgacataattccttgcagcccctgaaatcattatcgtcaccactagatttctctttcagctgcttaaatattagttcctttaaatgcttggacacatctgtcacgtacatgtgtatgtatttctcaagccatttatcaatgcttaagagctttgcaagaaccataagctttggtggctcacttttgagacatataccaatcaagttgtactgtctcaacttatttgaccacctatgcctggaaatgaatttgtatcgatggactgccgcaataattttcttgtgcttacttagccacagcattgtccagtctgaagtaatcattacaattactgcgtaaacctctaggattattgctccaaccaacaatatgtaagagatatttacatcagttctcgtgtatgcttctttattggtgaacttgaatgcaaaaagtactgaaattgtggaagaaaaactgatgcaacgaagaaatgcaccagtccatgagtggatcaaggctgcctttgtgtaaaaggtatcgtacatgaatcccagctccacctcaatcacttcaaaagccttatcagaagatatgtgttggaagaaggatctgcttttggtgatctcatgataactgaggataagatcagcacaaagccgtctgaaagttaagaagaaactgtgagctttgcgaaccaaatccgtgcttgaattagtacttctcctgatttcgcgatgagtaccccttgcttcgctagcttcgatgactgtcgacttaacatgaaaaccctcttcttttctcagacacagctcctccatgtatctggcataattaggaccagggtcaggttgtggaagcatggactctctgaaatgctcgttgctggctgatctcagtgcccaagtcctctctccaaatttgataataccagctacgaacattggaatcgctaagaaattcagcatattggagttccaggcccgga

SEQ ID NO: 193888 - DNA, 769 bp, Cannabis indica
actttacctttgcagctgaaaagcaggagtctttttttagccgtcttgaattgagacattctcaagaatggttaggaaatcagtggattcagatgaaagaaagggcagaccttgtgcctgttgtaagttccagtttagaatttaagagagtcacacaaatgtccgatcatgtttctgcccaagttacaaaattcgaaaacaaaacctctggaaaagatgaaaatcagtacaaggattcaggtcctgaaagtgacaaagattataggaaggataaagatctcaatatagttttagatctatcaaaggataatgtgttttccaaattgaagtggaagtcttccaagaaaagacgacgagtcagtggttgttcttcccaaaaattgcatcgatttgatgctggtgtatttccaactcgcactcgggaaagatacatgatttcaacctcgatgaaacgtgatcatgagaactgtaagtacgtgggggattctctcttcacctcctcctctgttgtcccacatcttactagtttggttatgtctaggtgagagtttgtaagtactaggatctctctctttcttttctttcctaactaaattttccatttttctattctcttttagaatacacgaccctgccttgcatctgttcgatgcgaccacggtccctcctagtctcatgtaactcacttaccaataacatgtaagagaaaaaaaaaagttttactctgtggcaatcgagtctttattttgttctcacagccaaaatagtt

SEQ ID NO: 193889 - DNA, 2856 bp, Cannabis indica
tttttgaaaatgttgagtgtgtcgatcaatataattttagttgccaatatgttgattgtgctattgtagttttttaaacaaatttgaaatgccagcttacttccaaatcctcttcatgggacgtcctcaactaccttttcatcggcctctttagtagtgcctgatcactcggtgaacctcttggacgagaataacaaatctaagcccgtgatctcttcttctgtccgagcctctagagaaaagagaagcactgtcgtcgttgattctactcctgcaaagagcaaaactgccggatcgattaatcttggtgttgtggttcaagaagttgctttaacttctcatgccccttcgacaacacctgccccttcgacctccccaactgcttcaccaatccctattactctaccagttcctgctactctagagcctccaaaattttctcatgagacgccctcaactacctctgcgccagcactttctgtacccgatcactcggccaacctcttggatgagaatgaaaggtataagctaatgatctcttcttctgtccaagcctctagagaaaagagaagcactgtagtctctgattctactcccacaaagagccaaaccaccaagagtaatctcggtgttgtgattcgagaagttgatttaacttctcctgccccttcgacaacacctgcaccttcaacctccccaactgcttcgccgatccctattactctaccagttcctgctactccggagcctccagatcttgctcacgaggtgcccttaacctcaacaccggccctttctgtgcccaaccactctgccaacctcttggacgagaagaaaaaatgtaaactcatgttcccttctgtgcaagcctctagagaaaagagaagcactctagtctctgattctactcctgcaaagagccagaccaggtcattaacttctgtcccgtcaacaacacctgcacctttgacctccccaggtgcttcaccaatccctattgctctaccagtcactaggacaagcacaactctgagtgatcaccatgctgactccttagcttttccttccatcaatagtgggagtgcttctgtgaactcaactactgttggtggtagcaggaatctttcaaaataccagctggagatgacccaacaatatgggaaggccttcatgcaagcgtctcaagggatttcaaaagaggagtggaagatcgctacgagcgtggagggttttgatcttacctcttatacagctagacatgctttgctggttagcttttaatatgatgagttgttttcacagttctttccattcccatttctaacattattttatacaggcggcagtcgggatcacgcgctcaatgacccttgccagtgaggcagccgaaggggaaaagaatcatctcaagaacgagctgttgaagatgaagcctttggcgaataaggccaaagagtcttttaatcagatttctttagagaaagaggagttaactgtccaatgcttaagccaacaagctgaaattgaatccttgaagggtcagaatgctgatcttcaaaagatgcaggttcgagttgctaaagttgaagctcgtttagctgaagtcaaaacattgagacatcagattgctgagcttgaagttttgcgagctcgatctgctgaagttgaggcccgtgctgctgaggccgaggccctgaaagctcgagcagaagaaagtgaggctcaggtcgctttgttgacaaagaaggtttgcagcctggagaggaactgcaccattctcacaaagaagacaaacgacctggagcgtgatcttgagcgaaaagccaaaatcgaggaggaagggcgttgtgaaatcgagaagggacttagagagctggagtcttcgcgtgattgcattttagctttggctactcgcaatggagagctcgaagctgcacttgttgcagccaagaataactctgctcccgctcttgatgaagttgctattgaggagcgtactgtcgagagcttgctctacaccatatggctccgacagccgaattttgatttctccttccttggagaggctgctgttcagactgtagcgggttggaaggttgagaactgtagacccagagatgctgactcttagccccaagcttttttgctttattattattattattattattttgtaagggcttgtctttctacaaatattattttagtaaagacatatctttggtgctcaatgctcataaaaaagagtaccctttttgttataacttatatatatgttatatattattggatatggtgcttgtgcttgatgaggcttctttttattcaaatgctttgatctttttgtaattttgcggctgacaaaacttacttcatcttaacattcatccttctctgttttggtataacattatgccaaaataatattttagatttttgttttatttgtgatgccaagttaggttgctcgtagaattcttttgtaagtttcagtactcttttcgcctactaatggttaatattgtgctttttgagtttgaattatgataagagtatttttgagtttatgatgtggatgaaatagtttctattttgaatacataggtgttttgctcatatactttggctacccttgaactatgttaaatagtctcaatgaactatgatggctagtgatatatgatacttctagtagactttactagaattgtttttaaataattaaatattttactctcgaatgggatcctcatcatattttgcattctgaacttttaagtactcctaaaaggaataaattaaaggagaccttaaatttaaaaatttaattagtatatattatttttttcaaaaaaa

SEQ ID NO: 193890 - DNA, 1321 bp, Cannabis indica
ctctgaaattatttacagtggagtcgaagtcccggaaagaagggttctcattttgatccaaacagtgacttgtttgttgagagtgaaaggaaagacatcatcacctccactgcatgttggactgccatggttgctctgctcggtgtgctctcctttgtaatgggtcctgttcaactcattaagctctatattgttccctactgggtactttttcttttctttatgattaatacagttagttcctttgaccttggaagaaaattcctcttgttttccttctctgattcccttcaaatacagatttttgtcatgtggttggacttggtcacttacttgcatcatcatggccacgaggacaaacttccatggtatcgtggaaaggtattgaaattgaaattgaatatacacacatacatatatattattttagtaccaaaccacctctctcataagaaatatacaaggaatctttcaactatgattacttatttagtcaacatagcaaaaaccaatcaaagtttagtgctttagccatgttgttaagtatatattattttacaaaacaggagtggagttatctaagaggtggactaactactcttgaccgtgattatggatggatcaataacattcaccatgatattggaactcatgttatacatcatctcttccctcaaatcccacattatcacttagtggaagcagtaagtatcactaaaattttcgttttttgatcttggcaactctcattctttgtgtcttgatcatacaatttctaattttgttatgaaatattaactcaacagacagaggcagctagacctgtatttggtaaatactataaggagccaaataaatctggacctttaccatttcacttgcttggaagtttaataagaagcatgaaaaaggatcactatgttagtgatacaggggatgttgtttactaccaaactgatccaaagctatatgggccttctgaatctgactcttccacatgaagtaagtaaccatttaattatgaagatttcctgatctgtgaagtgaaagctcagtaagcaatggattcatttgaggtctgaatacagctatccaactctgttttaacagtagagcttaggaaagccatttgtgtcctcacaattttccttctttcttccatgtggccaaaacggtggccttatattattagatagtggtgtcttgtcctatttaacgttgtgaactgtgctttcactagttgtgtacaatgcaattatgaaataagtttttgcattgttttagagctgtaaatctttcttactctcttctctctctctct

SEQ ID NO: 193891 - DNA, 1726 bp, Cannabis indica
cctctacacactgaattagattttctgattaagatctttttctccactggaacatcatcttcttcatctgattgcgccaggcataatgaatctgcactctttcgcttcatcactgaacaatttccatgatagaaagcatgacctgcacaaagaaagcccatgataaaaaataagaaaaatcttaaacctaacagacaacctttaagcaagcaaagcctccttcttaactaaatagaatcaaagcattacatatacctggatcagcagctgctttctcaggtgccctgtaggagtaaatttgctcaaactggaaaagaaaaagagcataaacttgttgaagttgagcaggaaacttcattttgaggccatctattttcagggcaacagcaacttcctcccatttcttgtttttggtaacctgaagaaagcaaatatcatcaaaagaacaaacaatggtaaagttctttagatttcaatacaaactcatgtgtttatgcctatggtacacaatcttccaaacaatatttgggaccagttcagtaaatatgggacaaatgtcataacataatgaaataaacctggtaaaaaaccgcctctttgaacgacttctttgtaaaatacatgcaaattgagtagtgtttctcgaacatttagcctgccattaaaacaaaatattagaaaaagggtattaaaagcttacagaatcaattaaaccctgctacaagaacatgcattgatacaaagactacaagaatttcaaattaatgacatataatcagatagattaccataaatcatacatatataagccaaattagggagataaaatcaaatttataagataaaaaccacagaaagcaagtttaaaccaaaaccccattaattttcctgccctttctcaccaaccaaacaacagcacaagtataaaaagaattttccttttccaaaaccccatttaggaaaactgtaccaaaaagaaaaaataaaaaattggagacttacacaaggttgagtccagatgactcgtacatctcatacagcttcttgtaaaagctctcagagttttccagcaagtgttttccatcacacacagaaaatttcatagtcgagccattagagaactttaacccgttgattgggctctctggagagtccccattaccgttctccatttgcatgcctggagagttttcacagtgagatcttcaatggttactttcttctttcacagcaactcactcacactagtcccacatcgagacaaaatgaaggtgtacagtaggtatataagcacttcacaagtagggtgaatcgtaaccgttgatcatgacaacataattaaaaagacccacgtgtaggaaatctaacgactaccctactttcaatgtggtttttcttttttagtgtttcaatgatggttttaattaattattaattattatttttattttttaataatgattctgagttaagagaaagtaacttgactcgttcagaaattgtgagtagtctaactccatccatgtgatgtggcattgcctaaagactatgtcaagcctaaccagcctcactctccacaaaaccctctgacaaagtcccatactcttaactctttggtctttaaagtcttagaccactttggtatggtggagtgcattgtactagattatctcttaggattacattccattggattgggactagattatacagtagaacctctatt

SEQ ID NO: 193892 - DNA, 1485 bp, Cannabis indica
agaaaaagttaaaaaaaaatttatgtctacccttttggtaaagaaaaatgtacccttttgtcaattcccaatgtaaaagaaaagaaagtatctttgtgttggaatctatttatttaatttgtcaaactctgtggaaattggtccaagtatctgacaaaaaattggtcccacattatactttctatgccacgtggctgatagttgtgctctcatattagataaccttgtacatgcaaatattatttatctacaaaatccaattatgttttttaatattttcttcaagagtaagagtagagtgaaccttatgacaagaagctaattttttgaagaaaaaaaaatgtattacttaattgtttgtgtttttagtagaccacaccaaacatgacttttggcttttgggtctttaatctttagcaaaaaaacaatagtacttatttttgtttgaatctgcttcactttattaactctgtctagctgagtgaattgattaaaattgaatttatgaagcttgttttgcctttcaccatttcaacccttattaaaagcctgaaaacaaagctttttatagctgataatggaaagcttctgttttattatctatttttagataaacaaattgatatttagtgtcaaatgctagtactttttaaacacctgaagttaaaacttattaattgtataatccaaaacccctttaatatatataaacggtattaaagttacagctttttctttgacaggaaaaagtggtcaaccattgacgagtctctcatggtccacaaggctcagaatcgcaaagggaacagctcgaggcttagcttaccttcacgagtgcagcccaagaaaattcgtccatggcaatatcaaaccctctaacatactcctcgacaacgaatttcaaccccacatctcagatttcgggctcaacagactcatcagtataaccggaaacaacccttcctccggcggattcatcggcggagctctgccttacttgcagtccgtacaaaccgagaaaagcaacaattacagagcccctgaggctcgagtcaccggaagcagaccgacccagaagtgggatgtctattcattcggagtagtgttgcttgaacttctgaccgggaaatcgccggagctttctccgaccacatctacttcggtggagattccggatcttgtgaggtgggtgagaaaagggttcgaagaggagaccccactttcggatatggttgatccggtgttgctccaagaggttcatgcgaagaaggaagtcattgcagcatttcatgttgctctggcttgtacggaagcagaccctgagattcggcctaggatgaaaactgtctcagaaaatattgaaagggttggatagtaatttacattatatatatatatatatatatatatgtgagcttcgtataattaagtttggtaagttactaaaagaaaaattaagagaggcgattcaattaattgatcagc

SEQ ID NO: 193893 - DNA, 3439 bp, Cannabis indica
agtatataagtaagtacatatactgatatttttcaatattgggagatttttaggtatgggcattatataactacaattttttctatttatatcttaaatatcatatgtttattatatattgataataaaatttaaaataattatatattgcatgcacacgcgtattaattaaaaaatacacatagtgtaaattaattatttaactcttattttccgtaatataaattattttaccaacaagtaaaaaagtacgtggtctataaaaaacacccaaacttttttataaaatatatgtatatattaccaaaacagagccacataatactaatattacgtaaccttattatgtcattataacttggttactttactcattgttatatatataaaaaaagtattaaatatatatttatataattcacaactcattgttataacatcccaaaaaaaaaaacatatttcaaaaatgaaaaccacagagatgttagtgaaccctactcatcactcaaactcatctcaaatcctctaccgacggccgccgctgcgaaaaacttttgttcagggcctagatggcgcaacgtcgtcgtttcgaatactctcactaccaaaacgacacaaaaataatcgtcgtataacatgccctacttctaccataagagcgattagtagctcgccgagtattactgataattttcaagaagaagaagaaaaaagagaatcagagattgaagaagaaactatcgccgttaaggcggtggttaccgtacaaccaacggtcaccggtttcatcaaaagccttgggttagaccgtggtcttgatgatatacaagatttgcttggtaaaacattcctcttggagcttgttagtgcagaccttgatcctagtaagtatatataaatatatatatttatataaatataaacatacatataattatttgttataataaattggtatagtagaccctttagggttgattttatactttgctttatgtatttaaattttctactaattaagtcaactttctatttcaacttctaaacctaaaaatttatatcgaattattttttttattattaactttatgacagtgttcgtgataattttaacataattaattcctgtaatttttttttatttttttgtaaaaaaatttatagtaatacagagagtttctaatattcccttaaaaaagttcatttcgccagctatatctcgtatttgtttttgtattgagaaaaatttattaatttaatttttttttatgatcccgtatgttgtaattttttagggctatttgtaaatttttagaaaattctaaataatttataatgctaaaataaaaattcaaacaattcttatttaccacgttaaaaaagtatatgtgttcaacaaaatatttgaattttaattttaacactctaaattatttgaaattttttgaaaatttataattagttttaaataattagactaatttcttttaactaaaaatagaaataaatatataaaaagattgaactaatcttttaaaagtgtactataaaataacaaaaaaaaaagtactcctattcacacttaagtttgatatgagttatttgagaaatgttaaagggtattcatatagtgtttaacactcttatgtaatttattggtataatttaatataaagttatacttattttattttgataattattataaaaaaccgttaaccacttatatattcgattaatttgggtgtatagagacaggagaagagaaggagacagttgaaggatatgcacataaaattggaaaaaaagaagatgggattaaatatgaggcaagctttaaagttcccattaaatttgggcatattggagctattttagtagagaatgaacaccataaagagatgtatgtatcggacatagtccttgatggcttatccaatggtcccttaaatatcatatgtggttcttgggttcattccaagtttgacaatcctgaaaagagaatattctttacctccaaggtctgttatatattctctttaattaattactcattaactaatgatatttatgtgtaattaattaaataattataatgcatacagtcatatttgccgtctcaaaccccaagcgggttgagaagactaagagacgaagagcttgtgaaattgagaggtaacggagaaggagaacgaaaacatattgatagaatatatgattatgatgtctacaatgatattggtgaccctgatcgaaagtttaagcttcagtagaccggtgctcggtggtgaagaacgcccttatcctcgtcgatgtaggactggacgtccaccttgtgaatcaggtatgttctcattaaaattgtacaaaatagaccataaaatcaattattttttaatataacaaatttgaacccaatttctaacactaacactaacagatacaaaataatataaccagtcttgtcgcaatataatacattcatgtcagattattattaaattttaatatagtaaaaattataagctgattgttcaatatattattaactaaaaaatggaaagaaaagcttaaaataataacatatattttggaagtgtgaaaatgatatactgaattaacatatgatatgataaagaaataagtacaataataggtgtggtgtgtggtgttgcagaaagattctaattgatggagagaagtaaccacataatattaattctggttataataaagtaactcatataaataaactcacaaacttccaactttcactttcactttcattatagacattttgtcttttattccccaattgactaatacatatggatatataatatttaatggtccacaccccacttactaaaataaaaaaaaatatatatatatatatatgtaatttttttattttttattttatttatatgttatatatatttgttgtgactgtgtaatattaatcgataaatctgtgtggtccgggccgtactatatgtaataatagtcccctccttaccctacttataatgtaaatatcttttacttttttttttttttctagaaaaagaaaataaaaataaataaatatgtatcatttgcctttttgatgaaaggtcgtcatatgatagagatactataagatcaaatatacatcaaaagatatataattgaataataaatattccataatagggtggggactataatacaattgtttttctttttttttgtgtttgatatttttttttttgacgcggtgatccaaatcacacatgattaacaaagcagcaatctacaatcggtggcggcacctcctcgaaccaggatagctcattgtctaaccgaagagcatattttgccaagccatgtgctgcagaattcacattccgagccacatgggacaaaactgctcccgggagtttagacaataaaacta

SEQ ID NO: 193894 - DNA, 1670 bp, Cannabis indica
atttataaattaaaataatgtatttactatggcaaattatttgtctcgaaaatcttcacaacaaagtgacaaactttctattatattctttatttttattttttttagttagtagtctttaattaaaaaaaaaaacaatataaattgattgcaaaaatattagaaaagaaaaaaaattgctatgatatatacagtaaaaagtaaagaaaacaacaatttcaacaagatcatgatttattatctccaaataatctaacaaatattaattaacaatacaaattaatatcactgtgtaattatattatacagtacgtatagggtagaatgatttaaaattaattgttaaatttgagtgtgtaataatatagttaccaaaataatatgacttttaattgaggagagtggaagtgaaaggaaagaaagaggctgtggacaagaccgagtcacctccgactcaaacgccaattccttttaatggcttaagctaagttatagccaacactcaaaaattcatatcaataatttacaaacatacaatacaacacgcacattcaaacaaaaaacacaaaataaaaacttggtaataacatgattctgatcaaacttgagtgatattagcaaggaatgccaaacaaacaaaagaaaaaggattagctttacttttatattattatcgattataataaacaaaatcaagtcaaaataggtaataagaggaaagaaaatgaagcagtactcaagttggaggaggaggaagatggagaagagagaagaaggtcttctgcttcatcatcatcatcgtcttcgtcttcatcgttgttgttgtcatcaacaacgttgataacatcatcatcatcaccatcatcaccgccgccgtcgtattcgaagaaaggcgtaaatgggtttgatggggtgtcgattttagagtcggcagagcttcaatatgccccaacaggagtggtggggtcgacggatgatgaggatggagatggagataataaagactaccctgccattaccaacttccatgatgctaagactattttcattgttgaatcctccaagctttggaccattgcatgccctatagccttcaatatatggtgtaattatggcattaattcctttaccaatattttcgttggacatcttggcgatgtggagctctctgctgttgccatttctctctctgttattgccaatttctcttttggcttcttggtaaggaaaaaaaaatactttctttcttttcttcatgtttatggtcttgtgagttttgccatattatttaatgcatgatctcaaagaaaaagaccattaaatgtaattacatgaataattatttggttaattgtagcttggcatggggagtgctttagagaccttatgtgggcaagcatttggagctgggcaagtagacatgttaggagtttacatgcaacgttcatggataatcttgttcaccgcttgcttttttctactaccactttacatattctctaccccaatcctcaaactactaggccaagaggatcaaattgcagagcttgctgggaaattcacaatacaaattattcctcagatgttttcacttgctatcaattttcccactcagaagtttttgcaggctcagagcaaagtgacaattctggcatgggttggttttgggg

SEQ ID NO: 193895 - DNA, 1205 bp, Cannabis indica
ttatgttgtaaaaagtgtaacgttgtaatatatagtgcggtgcgatttgaatcgtgtttattaaattcaaaaccacaaacctcattgcaccactcggtttggcaaaaataccaacacaactgcactgcaaagaaattcaaactgtatttttaatgtggtgtggtgcagtgcaggtagtttgtgcagtgtggacggtttgatgaacacctttagtattaaacttaataaaacatgatatttagtttttatttatttatttttatatatttttatgttaatattaaaaattagatgtgtaattgaatatttaattaaaaaaatcgatctaatctaattttaaatttaatttgagatctaattagatcagattgggtgatgattttctaaatctatttattgattagattgaatcatataagtagaaaaatattaaattgaatcatatgcccaactttaattttaattatacgaaactcattatatattcaatcaattaaagcctattatgttccattttgaatttattctttttttcttttaactatgatgaaaaaaccaatgagagaggttaagtcaatcatttggtaaatgaaataaggaagatgtgaagaatatgcttccaatggtgtggcatataatatttgcattttttttaagagaaaataattatgggttggtgttcaatttactatatactctattttaacagagattactataaaactagtaaaagatacctaaccaatcatttgttaaatgaaataagttagatgggaaagaatatgtttcaaatgactttttcttttgtgtggtatataataattcctaatattatttttaaaaacgttataggggcttgtgttagatttattattaaattatataagtcgtcaagtttggtggacatgtgggtttctttactctaaaatatgaattataataacctaacaaatataaagtagatcataaggattttgaaaaaaatcatgagttaagatctgcatcatatgagattaaattacatcacaacatacaaccagctgcagctgttcttcagtgtatacataaatttatatatgtatctttttaacatatattataaatgagctagctagtagattttacagcacacaccctcttaatcccattgtatatatcaaatcaaatagttgtgtttaatttagcataaattatatatttataaa

SEQ ID NO: 193896 - DNA, 3277 bp, Cannabis indica
atccatctcatcagttgcaactgtttggagctgaaaaacgaaaaatgcagaagaaactatatgacaaaaggttgcaagagatggacagaaattataatcattacaaatatagctgcgctacctgtttaacaagtttgtaaatcagcttgtctaatgtgaataaaacatatgactgtgttccaattatagctcgacaatcatcctcaaattttgtgttgtccgaagaaccatcaagcagattgtaaagagcattcatgaatctatgccataaaatacaatgcttcaaataaatacagtgaatgagctaaggctgatggaaagaaaatgaaatccgtgctgacctagcataaagatcagtagagctggtatcacttgaagccctccatttcctttcaccagaagatgaattaatttttgcggactgtattctctcatataatgtctgccaattagatacaaaggataatataaggttttcttttgcattacaaaaagatgttaattatagaggtgttcatatatttaaagagaacatgactttatacctggtgaagtctgaaaagcacataaaaagagtcatttccataaaaaacacgagaatccttctctttatcatgcaaagatggaggaacatgctttgctagaggcttcacagtcagtagaaaacgttctgaaaaaggtaatgacgttccatctccatcaacatcatgggcatctgccattccttcagcctcaccttcactctcagccttagtatcatgttcttccccgtgctcttcacgagaacattcttcaccatcacccgactcacttacagaaacatcgccattctctgaagcattttcactatcctctgatgacctctgagcactttcctcaccttcatcatcagcatcattttctcctcctgcctctccacaacacaattcttctactccatgtccagtttggtattgcctgctagcagcaccatcctttgccttacgcagagcttccaaaccagcttccccataatttgcaaaattatcctcctcaaaatccccattaggagataattcaccttcttctctttcaatcttaaaatgcgcaacaggttcttcttgatacctatgattcctggtgccttctgtcagatccccatttgaatgtaaaataacaggtctagtcgaatcaccggcctgatgtgtcaatatggtttagcaaattcttcagcacataagcaacatatgtgtgtgcgtgtaataatatctgttataatagttattccataaatctggctagacatgctccaaactccaaccttccactagtatgcaactaactaaaaacttgcaactcaaatcaatttcacacaactcaacataatcactgttgttgacatattaaaaagaattataaccatattgctccaaaccacaaccttccattagtatttaaattaactaaaaactagcaagaactcacaaaattttcatacagcatcatcactgctggtgacatattaaaagaattatatccaaagcttacctctgatgaaagcaactcaagaccaccaacactagcaccattactgggtctggagggagtaacaccaggaccttgcattaaggaaaaaaacattacattgcattaagaaaggaatatagcaggaattgcaagaattttgttaagtttaagtactagaaagacaagtttcaagggctgaaagcttctgaaaacctgaagtgtcttctaagttggttcttccattactttgctctacaccaatggcatgcaatgcatttgaattaactatttgttcactgggaaggtcttgcttggtgactccaaatgcttcatcagctgtagatgcattgctctgcactttactatgtgcagggttattgcacgtatcatcctttcgagcacgatccacatcaacagaattatcttccttattgccactttctccattagcatgccatgtccgacaagaacttgactgttcaggtggaatattttcatctccatttctaccatgatttaactgtttggaattgacagtagtagcagtaacaacaccaccaggactgccatcactctctcctaaacttccagcagaacttttaacatgagtttttgttttgacaacatcttctgtgtcctctgcaccctgaggtcgagaaggaacaccaagcatgggttccaggaagtttgtccagattttcattactttatccaactgttctgttgtgcaaacttccccacatgaatatttgatgagctgatacaaatcttcatgaatctcaggatcaggatactcaaattccaagttcggaattataggccgtctatttccagcagctatagcaagaagaacatcatcttccttccgcttcttctcactgatttcttttatctctgccagtaaggctggggggaaagggggaatatggataataagctatatgaatgtctagtgaaagttaaatggacaaaaagtttatggtcataaatgataagtaaattaaaaatttgggatttaaagtgtaccttttgtactcaagctcttcgtgtcctgctgcttgaaataaaagctacgatgatcaagtgacttgtgatagttctttgcgtatatatcagcccatactttattgtaatcagaccgacattttgcccactcttcttgtttttgcttcaaccgatttaatataataggcaatgcatgagaagtgttcttcctcaccacatccacaacatcaagcccatggtcaccatacaaccgttcaatgcatctcatattgagagctatagtaagacaatggaagaataacattagaaaataaaacctcaaataaatgaccttacataacagaaatacatgacatccagaagactaaaaatttacctgtgaagtgatcttcaatacggattggactatctgtctttactgtattgttattgatcttttctaagagttctaccacacgcttggttgttacattcacagactctagcaacatgtccagttcaaacctgaatacaatgatagaaaaacataaacaacagcgacgaaagaaataaacaaggtgcttgtaaagaaaatagaatcttaaggccgattggttgactttttttttaattcggcccagctccagcccctttaaaatatacatgattgtttgtttgaatgaaaagtcgaggtctgaactgaccttagaccacaaaagtgaaaacagcacaatgttagactgcgattgtgaagcaaacaagttgggtagagataattgtcgtgatg

SEQ ID NO: 193897 - DNA, 1969 bp, Cannabis indica
ttttttttttgttgtatttcatcttggccgtagtttctttttatgttgttagtaataagaagaattaagaggagactatagtaagaagaataagaagaggaaactataaaaagaataataataaacggagactataatagtaattagtttggatttggatctattttgttttacccatttgtcttttgttggttacgggaggtcttgcatcggtgtatggtccaatccacaccaatttgttttgaaatgccatgtcaagttacggatttctgttgatgcttatgagaaacatggcaatttgtgtagtggaattcatcattttttcttaaaagagattttataagaactatgtagatttggccttgcaaaactttatacttgttcttgtgagcagcaactcagctttatatagttgtaatcagaaactgtagccagctattcgggtaacatttaattagtctgcatcaatcttttgtttatcatcttttgcaggttccacgttgttgcttatttgcagcaaatatggtggtttgaagtagatggggtggtgaggttccattttccggctgacatttatactctgtcttttcgccttcaccttggaaggtttttcaaaaggttaggacgacgtgcttgcagttttgagcacactcatggttgggacatcaaaccggtgcaatttgaattgtccacgtctgatggtcagcaagcatcatgccagttctgtttagatgagaaggagcatgatgaaataaatggaaatcataagcggggttgctggatagagtacaaagtaggagaatttattgtcactaattctgaaccagaaactgaagttagattttcgatgaagcagattgattgtacgcattccaaaggtggactttgtgtagattctgtgtatattatcccgagtaatctgagagaacgtagaagaaagggaatttgatgtagctatactcgtcgataagtttgttaatgatcgaagaagataagtagtcaagtttttccatatcaacttatacttctaaatgtctttccgagttttagagttattcatcttatttgtattctttttcctttcccttttttgtaggcatatgtatcctcctgttatgtagtcttcctttcattgaatttgatccagttttgtttcaatctataccttttcagattaactgtcaaaatattactatatactatttgttcatcaattctttttctcccctttttcagttggtttctgtaaagtatttttttattatcttaggatcctaatgaatactattctttcagattttcatcaagagatgagatattttttttatactatgcttattgatagacatatatatactataacacttgaactgactcagcttcttgataagaactatgacaccatttaaagataagggcatagctagaagaattataagcttttctattttgaaccaagttggcctaatttttagcattcatacttgggaaacttatcatggttggaagaaacacattatgtttggtaccactcttctaacaatgaactctttggcatttgtccacattaccttaaacagaactgttaaccattccaacacgtttgtatcttctgttctttgaccaaattattgagaactttgttcataaatatatatctgtatttatactgtatatatatatatatatatagacagaaattggaaaaactaatgaatgaacagagcaacatcagtcaaacttttgggagtgtcttaactcccattgatattagtgattaagatcttagattaaagattctttgtgcctcttaacttggattttttttttaattctaaatcatcatccttccaaattatactaaaggcacctgaagattgagttattgtagctgtaaaatcatatccctaataactattgacatttaaacactaggcctgttgttattattacctgtaaaagcagcaaa

SEQ ID NO: 193898 - DNA, 1308 bp, Cannabis indica
atatatatattaaacaaaaatatatcatgtataatatgtattgatcatcctagcttttaaattatgtaatatcatatagtatgcattaaaaaagaaaaaatacagccacacaaacgtaagataggcaagtaagggaagacaaagattatgagagaattgaaattaaaacataagaagcaaaaaggattaaaagaaaaagaaaaaagagagatatgaagagaagaattacagtcgggtaacccggttatcagtatcacaagtgacatggaaccaagtacaaggatccaccaaggttggatcccaactctccaaaacattatttgggtctttaacagaccttctcaacgcatacagagcatctcctgttcatacatacatacatacatatattatacaaatttcacacaagacaaaaatcaaatattatacaaggtaagtagtattatttcattcatagtaaaggttgattgaaaaatgttaccttctacgttagcatttgttggtactaaaggccacgataaaagagctaaaacagctgtaagtagaaccaagatcgccattttcagagcttggaagaagattaagttgggtttgaaaaagctttcaactttgaggtactcaaagagtcaaagggtcaatgttggtaatgggtatttgagattttagagagagagagtgtgtgtgaacgtgttgaggagagaaaggaatcaaacatttgggagaatttatagagcccataaaagtagaggagtgaggttatttgctcttttttcttggcaaatcgctgtaattaattaccaaaactttttttttttttgaaagacaaaccaaaattttatttaaataagatcggttctttcttttctaatgatttttattaaatataaaatctttttaacattttatttattcatttaaatatttttctttacataatttcaatacaaatttaattactatattgcttttggggtaaatttgtaccttgtttattgggatacaattataaagtttaaaccaaatataatattaaacaatttttgaattcaatttactataaaatttacaccaaaccaaacaataaaactttaaagtctgaataaagaaaattaagactagaagaacaaagcttctgcttcaaaagctataaaggtatgatcattttatttaattttttttcaccaaaagaatatctacaaattataaaaataaaaataaactagtatcaaatcttttaagaatgatatgaaaatttcacagaagaagcatttttaaatgcttgtaaaaaaaattacagctaaatcctct

SEQ ID NO: 193899 - DNA, 1218 bp, Cannabis indica
tatatatatatataaattagtttaagaaattatagtcatgattcatgttattttatttagttctttatccatgaaaatgtaacatacatatatagacttttgtttgttgaggggtagcttcttgtactgtacaatactacttagaaatggtgaaatttctttctgggtggatataaatggataaccttgtagctgtataacaccatttattttaaaagttgtattgattgactaatcatgatgcccttctccctgaaagtacttagaatttataattcttcacagtgcctataattgcttcactaaataacaacttcacctttgtagattttgaacttttcttcttaattcttactttttagcatttagcttcaatataaagacaccctctaaggtattcttttgtttagctcctcatgcctgctgagcaatgccaattttggcccttcaataagctgctctgtgatagttgttaatgtttctgttcttccatttgtactctggagaggcatatctgtctaataattaatcaccattattccatatagtctatttttgcatattggtactaattatgctgttttctaataaatgccagctccttgcaatttttatttttatggtttattgatggttgtgctttatccaaagctaatgcagctactgtgaaatagatagtactgaccatctccttgctggtttgcatattggtactaaataggctaattatctactaattaccatctttggaagaaatttatggtttattaatgctagtgtctttccaaagtgaatgctagctactgtcaaacagaaagtatcaatttttttttgccacaatcaaatatctgttggcttgctgatgtcaattactttaattcaatgaaacaggagaaatgccaaatggagagctccacaagcggctgttcttccaaactttcatcttcctatgcgcagttttgaagttaaacacaggtaaactataatgttttattttctgaactgagttatgttttcatttgtttcatgtgcataattgcggcttgcctttttccaaatcccaaaattaggatcatttgaaccgtgtgcatgtttgatgttcacacatgctctctaaagtagagttttcttaattttttttttattttaatgtttgctgggattggaaatagtcagtttttttgggctcgataccttttttattttttatttagaaat

SEQ ID NO: 193900 - DNA, 2249 bp, Cannabis indica
gtttcaaatatgtttttttctctacattatatatgtgctgatattggttgaaacagactatttcttctttctttttcctgcaaggattggttggatgtgcaaatgcctattgaaggcttcattgaataagaatcgagtttggaaggctgatataattggaagccaagccaaaatagctagaggtgtaaataggacaacacccattccataatcatatgctttagcaatgaccctggcaaagtcccatattccagtgtcatctatctttggccttacagcttgagcaatctgaaccaacaaaaattttcatttcgaaaacaatctagtaagatttgaagtctgatataagtatgaactgcatatagcaaaaaagggaaaatgtgtaatgggtgtaagcttaccgtgatcaaaccccaaccagttggcagaaatgctaggcagcatactattaagtccctcaatgatagttggcagattttagagagcatgattatggtggaaagaacagtaatgaaaaggcctgctttgaacagcctaaacctgagttggtagttagtactcaatttttttcttccgatgttcaccgtctgcatagcatgtttaaatcatcttactgccaaaacaactataaactctgtatggcaaacttggaacatttgatttgtgctattcaatggtttcaaagacatttgtctacaacttattttactgctatagagagaaaaaatggtaagagttttctgatttgaagtaaatgcaattttacggaaagcatgaagaaatataccttggctaacaggaaaacggcaagaatcacaatccatgagagcacataaactaggacatttttgctctgctgggagatgtcaaggtgataaaccagaccatattgatacaggaaaaaccgaatagaaaggagtatttcaaacagcctggaaaataatcctgaacaacgaagatgagcttgttcatcgttccaccatgattgccaacttttgtcttgttgaatccctatgccaccttgctgcctgatccacttattccagtctttccagtcatctacaatcttttcccagctaaatccagatgggttaaacaaaaaaggtccaaacaaccaagtgattgacataaaccaaacagaatatgtgatcaacacataggccatgctgctctcataggatcgcctaaacagatcataaacaatcaagaggagcagtagttcaaatcctttaacaaagtggcttcttgagtacaatctatagttctcagtgaagctggtatggaacaccacaaccttacgcccggtgggtctatatttagcacccccatgcataattgtccgaccataatgatgagtttttgttccaagagcaaaagtgaagaaaacagcagccagctgcaattgcataagaacaaaatctttaagggcagttaagaatcctttctctagtccaatctccatcaccattggcaagcctgtaaggagccccagctgtataaaggactgggaagcaagagcagtttctaaagattctatgttatgcactctagcctcaataactagtgctttttgtaacccactcagaacaagatatagctgtccgtagaggaagacatagattccaatcactgacatctgttatgttacagaaaaatatctgaatcagcttaatatgtcaacttcccagcttttatgattcagaaatggagaaagcaacaatttgtataaaacctcatttatagcacaacagaaatttctatgagtttgaacaaattaccaggctactcaaataaaatccaattgttgtgaaatagcaggatagcatccggaagaaatcaaactggcgtccaaggcgatatatgtcacgacttagagtttgttcactgtttccattagctactttggcttcaaacttggagatctgattcaaacccacatcacgacctttgccaacttgcatgtattcgtggtatgtaatacatcctcttcgcaaaatagaattaaagcctacataaaatcagatgcatgcagttgtaaattatgctgaaatgtattatatgagctcaaagtatgattttttcgttaatattttttaggtgactagtatctacctgcaaaaacatcttcactcaggttgattgtttttgatgccttgcttatgccacccctcgttatgtgaaatattctatcaaatacatctggatgtccatagtggaatcgtaccctgaattatgttacattcaaacga

SEQ ID NO: 193901 - DNA, 1906 bp, Cannabis indica
aaatttcttatcgtaaaggggttctaaagtttgctccttttttcttaggtcaatatgaagacagtgtcagggactgcgatctcttcaaagccattatctctatcaaaagctacttcaattctgtccacatttgtctcttctgatactggcgcttcccaagctatggctgcatatcttcgacgctcattggcatcattcaaggagctaaaacagcttcataaagacctcaagaccaacaaatcagaacgccagaggaagaggcatagagccgctgatgatgatgagggagagacaaatgttggagaaagtgcagctctagttttagacccaactcaagaagtagtgcaacatgagttggaacctgagcgtaaaaaacaacgcagatgagttcattgtttgatgattcttcttttaaagtttcccaatgctagctagattttcggatttctgattagtaggttaaccatcgtttcagtgtctttctataatcaatggctaagcctcaattttgtttaggttagtaccattttatgttaggttagaaattgagttttacatgctaaggttgtatctttattatcaagtttaattgttcagagctcgtctatataaatttgcgttgcgaactataatgtatttgttctgatatttgattagtatactaatgaaggttataaattgggcctttcatgctatggttgtgtgtttatttttaacttttctaaccattataatgtcatttgctctgatattggactagtttacttctggtgaaactgttcttgctgttgatggataatccatttcggtcttataggaaatgccacatcgagataaaggtttgaactttagaccacccttagtgagagcttatgtagatgtgaactggatcatggattatgcagagagattattaagtattgacattgtttagattagtcttgaccatagttgcattattgttaagtcacacatctgaaccaacaaattattcttttcttgatgggtcaagtgtgactttgtgtttgattcccattttgtctgcgaattttatgaacattctaagtacaactagctgaagactttgaactcgtaacttcatgatgacttgtgtcgatagatagttcttttaagaacaaagagttcttctcacgtgatggagtagacaaagatttctcaatcaatcaaagcaaaattaatgtcaaatttgtagatttatttctagcatgatgacttgagtaagtatttataaacttagtttgagaagctgagctcatgaaaagctaatggtcacaacaaacacgaagatcaacagcctaaggtaataaatctttgttgacaggtcctctggtgttgaagatcatgagctaagcatggaaaaagtgttctaatttactatttataaacgtttttctttcaaaaaaaaaaaacatggaaaaagtgttgagagagttatggtttattctgcattaatggtttaagtgaaattgagatttatgcagcagcctatttggtctgtttctataagctttgtttgtcactctcttgagtcttgacacaactcaccaaagtcaaaccacccccttctcttcacattaccattgttaatgttatgatgaatagttgataatagtagtatcactattaaatttcatgattccattatagaactttcacttgttgtttatcaaggctatgtaatgtttctattggctacaataccattagaatagaattatatgatgggtcattgagacaggttgggtttgcagagttcactagttttattttatacacataagaaaaagccaaaaggtactgttgtttgttgtgactgtacattgatagtgacaataccacctagcctccccctatatgcaatttgcttacttttggattcatttaa

SEQ ID NO: 193902 - DNA, 2550 bp, Cannabis indica
gacactagaaataaaaaaaaaaatatgacatttttgccactattttttttcacgatatttattgactagtaaatatttttccgtgtatgcacgcgagcgtgcgcataatttttagtgtagtagtaagaaatattaatttaaactataaggtcaagagatcaatttttaatatctactttttatatctttaaaaaaatatctaatatacaactaaatagagtattgaaatccttaaaatttacacaaactaaactatttacataggcacaaaaatttaaatttttcttaggcccatatgtcttgatcctgaatttatatttggttttggttgcatttagcttcaccaaatgcagttgcacactagtaataaaaaaacatagctaattgcttggtagaactttctttcttgtattatgagccaatataatgtttttttactccttaataaaaattttggtcattttacaataagacataattttcccttgattttttttttttttgctgggttcctttttcttggttacctgattgaaaatttgactgtttcttctaataaaagaattacattattttttccttttcgaaagatatttcttttctaggaaaaaggaaacaacggtttagaattttattacagaacgtaccaaaataagattcgaagaaatatcctaaaaagaggaaataagtcgacaaggatattttggtaataatacaataatgacgtcatatataaacctcgtctctcccaccaactcatatataaacctctcaggcctccacctcctcttcctcagctaaagccgtttcaagattccctcacttctctctttcaagactataccttttcttcactctctttaacaacacaaactccattaaaacacctctctttctaactccattaatgatgtcttctgtaaagcttacaccttcatcgttcacgtcctctgatatattgacacgaaagttttcagtcccaaagatcaaaactttttcattgcccattattcaaaatgcccaactaagcttgaaccccttggtttcttctcaaaaacccatttatatctcttccgttgagaatttctcattgttgcctaaaacccagaagcgcgcggcggctactgagtgtaaggcctacgaggctgatcggtcagtgcctttggaaatcaacatcgagttgccagatcagcaggctggtcagaaatacaagattggtctatattttgccacttggtgggctttgaatgtggttttcaatatatataacaagaaagttttgaatgcttttccctatccatggctcacttccttgctatcattagccgctggttctctaatgatgcttatctcttgggccactagaattgccgaagccccaaaaacagatttagacttttggaagacccttttcccggtaagagttttatcattcatagaaatcacatgagaaattaagttgtagtttttaattttgctctgttttttttgttaaccatattcctctgcttgtgatatatgttataggttgctgtggcacatacaattgggcatgttgcggctacagtgagtatgtccaaagttgcagtttcattcactcatatcattaagagtagtgaaccagctttcagtgttttggtgtcaaggtttctattaggtgaaatgtttcccatgcctgtctacttgtcactagtgccaataatcggtggttgtgcccttgctgctgtaactgagctcaatttcaacttagttggtatgaaaacttgtttgagaagatagtttattatttagtaccaattgtgatggttgttgttgttgttgttgttagtgcttacaataatgtttgtgaaaaaatatgtttcagggtttatgggggcaatgatctcaaacttggcatttgtgtttagaaacatattctcaaagaaagggatgaaaggaaaatctgttagtgggatgaactactacgcttgtttatcaatgttgtctctattgattctaacaccctttgccattgctgttgagggtcctaagatgtgggctgctggttggaaccaagctctttcacagattggtcctcatttcgtatggtaaataaacactcaaaaatccctctttgttgagtatatgaatgaattctcagatgaccctttacttaattatttttgattgaatgaataattgattgtaatgaaacaggtgggtggcagctcagagcatattctaccacttgtacaaccaagtttcatacatgtcactagaccagatatctcctttaacttttagtgtagggaacacaatgaaacgagtatctgtgatagtttcatccatcatcatcttccacacccctgttcaacccatcaatgcacttggagctgccatagcaatctttggcaccttcctatactcacaggtaaatatattctcttcacaatcttgtttgattttgatattttagaaatctgaaaaagtttattaggggggccaccaccataacttaaccaaacccttttgtttgtatattcattcattccttcctacccacttgtttgt

SEQ ID NO: 193903 - DNA, 2434 bp, Cannabis indica
tgaaatctcaagtgagagcttggaaagtttaaatttgaataactttttggactatgaaatgactgttagaattgaatcagctccaaaattagcatcaatttgctataaaggtaatatcaaatttagtatatcaatggcggagtcatcagatacgttgactggaacattcataattccgatacagcatagggactatgacatcatatggtttattaatttgatgaatttttttttgaatctgaattgttcgtggaatagggtgcacctacatgttggatcagctgaggtatgtttattacttatcttatttgattatgtgttgtttcaagtttatattattagtctatgtactttatatttgataatcttgtacatttactctatacatgaaggctctcatcttgcctgaagacgtgaagagggtatgtcgttctcctttggttaattgggaggatcttagagttcttactcaatgtaaacttgagagggaatccgacttgagagatgctttgcaatggatttctccttctttaaagcattatctatagcggaaagggcatctttagatcgttttggaatatcctcatggtgttgctcattgcatgatgaatactattgagattgtatttttaggtagtttaggactaatgaattcgcatgcgtacttttcatatcggtaggatttttttttatttgttgatgagtagataagatactttagtattgtagattcatttttctattttgatgcatttttttgcaaatctacaaaacatgacatccagcggattagaaatgctaagaaggtcttgtattttagctaatttgcagacttgtggtgaatggtaacttcaaagttaatgatcaacttaagaattgctcttggaatattctatgtctacttagattactgtactgatttcatttatgtattttctataatctagacatggttctgtcaccttgcctaaacacttcagactgatatttcgttccttcactgcgtaggttgaggcttctcaaatctccaggttttgacaactagagaaatattagtatatactttacttcttttacaatatcttggatgcttgctgagtttgcaaaaagtttaattctaataaacttatgatcacacaaaactcattagaataattaggataaatttatgatgtgattactatagggattagagaatattggttatcgtattgttacaccgatgaagatgtaaatttatgaagtgtgttttttccttcttgcacttgtgttttccaatcgaagtaagaagtcatagcggtagaggtacttaacacaagtatccctgaaagtaaagccaatatcaaatggtgttgtagtcaaacaagataaacaggggtactttctatgcttgtgttgttataagcttaagtaatgatttcattggctccagacagtacacatatttccagttagtattacattttactccctaaattccagttctgtattgttaatttaatgagctggtttgttaatttgtgttgtgtgatttgactggttcagctcaatcttgtattgtatatagccatatacaatacaagattgattagtatatgttgtcataagttgctgctggtttgaagatggtgtgataagttgtaataattgaactgtattttatttattcaatttagctaatgatggagacacttttagagtggagacttatagattagtaaataattaattgtgtgtaccttatgtaatcacataaacaaaattcaaattgcagttgaaattaggtgatgaggtagaacataatgtgtagtaaaagaagaacttataatgtcagcagtaaaagatgaagaagataagtactttaaattggttcaaatcactataatgtcatgaaatgaattacaccaacaatctcaactcaagctacagcctcacatttccgacagtgacaacctccttaaggattaattaattactaattaattttggattagttcatgatatgaactacacaaaagtctgatacattattggtatcaacttctcgaccacaatcgacagaccactattagagatttcatacgggtgcaatcgccgataaaaatggagttctgtggtgctgactgctgaggaaagaagagttcattactttctttttcggtgtcaccatggttggtactctaaaagcatcttcaacctcgacactaaatttgatgttacatcaacactaaatttagtgtcaaaaactcattctactctaaccacaacattaaaaattatactaaaaaatattttttattattagatttgtcgacaaatgaatcttctcttcttgaattaacttaccagcacgtgaaagtcatgtgtcatgccatcagtaaatatatgtagaatttttatttgtattctaaaaattcataaatatactttgttt

SEQ ID NO: 193904 - DNA, 1028 bp, Cannabis indica
aactaaagagcttaaacttacaagaaacacatcaacaatgcactgatcaattttataaacacttgcccacttgccaatactagaacatggttacacacaaacaaacctctgttttatccattaagacaggcattccaattcattatgatcatcaatatccacattctccttgcttccaaaaacattcataccattttattttgagaaatgtgaaagggcacccatagtacctagcactcttattaggtgtcatatcaatactagtgcaattcaatatcgaatctcacttattttactttaataatgattagagaaaaccgctaaccatttatagaaagccacattataaggctaggcactataatgcctaatagcaatgctcttttattttccccaaaacatcacttacattatgattactttatatttcaatacacaacccaacaaaaagaagagcaaaaatctcaatccttaagtcattttgttttaaacaagcatttacacattcaaaattaaaaatgtggcatctcaccttcagcaatatcatgaacaatagccattttaatacacctgaaacagtaccagaacaacaatctgagtctcacaaaacaaaagcacatcaagtacagtaaaaaattaacactaacttgtctctatcaacaccaggaatatctttagcaataagagccataacacccattcgatacatatgatcagctacagattccggatccttaacatctctcttcacccatccagctctcttagttgtcttacacacacaaacaaacaatcaaatcatcttccattaccaaaacaaaaccagttataataataataataataatcaactcaccttaaggcgatgacaaagggaaaggaaatcaatggcggaggaagcagaagcggatgaagaggaggaggcagctccttcaggggtggccatagtaggattagccttgaggggtgaggaagaagagtgaggagtgagtgtgagagagctaaacctgagaagcttagagtgtgag

SEQ ID NO: 193905 - DNA, 1126 bp, Cannabis indica
actcttttctaatgaagacacctcaattaataattgattatttatttatagaattgtaactttataaatataataataatggtggagatgcattaaaattgtacacactttttacacttaatagtttcatttttattatggataattatatatagtatcacattatttttaattgtgtgattaaagttaattacatatcattttgtatatacaatgtatgcaatttaaaggtatcacaattattattcattttattataatttattatactaacatcaaaaaaatactatggtgtgagtttacacaaaattgcatttattaatgtatgatgcttattactattgtgtgaaaaataatacttaagcttaatattttgtttcaatgtgtagttagggtttaatataaattcaagggtaaaactataatgtataggatattttttatgggcaatatctaaattaatcaaaaatttagttatttaattactcaattcagtctagttatatttatattttttttatatataaaaatatatttatatgtaatttttttttattagaaaaatagagaatcacatgcaaaccagtttacttatcatcctactttacttagatcatcggtacttatactttacataaggattcctatctcaaagatagtccaccacacagtaagtcaatcttcaagggtctaacataatccctcacaattgaagagccgagtgagagtcgaatctttggcctaaacaaagagagaaggctaataaaaacttccttatcactagaccacacaacacgaggtatatttacatattattattaaatatctattatttagtttcccttatactattctattaattagtttccgttatactatttcacatagtttccttatatttttttacacttaattagagtatagtctgttacaaactgtctcacaattttattaaaattgtgaaaagtaaaattacattttttattatatatattttaatataatcccatacatacctactataaaatcttaacaaagaaatctttttttttttttggtattaaccctttacttaaaaagaaagatccctaaaaaggagacttttgtctagtgattaggtttagat

SEQ ID NO: 193906 - DNA, 3010 bp, Cannabis indica
actcttcttgctcatgcctctctcccccttcagttttgggatgaagcagttcgagcatcagcctatctcattaacagattaccctctcctgtgattgccaacatgtctccatttcaagtcctatacaatctccaaccagactatagcaaacttagagtatttggctgctcttgctaccctaatactcgaccttataacaaaaacaagcttcagtttcgatctgaggagtgtacttttttaggttacagtattaagcataaagggtataaatgcttagctaagtctggtaggatctatatttctcgtgatgttctgtttaatgagtatgctttcccatactcaactcacatacctcctacatcacttcacactaatgcatcctcatctggtactactgcatctatccctactgtccaaagtctcccctgtttacatcctgcagggtctactagttctacttcagactctgtttccacatccaccactcactccatccctcattcaccttcccattccatctcccctcatgagtcactcccacctgagtctccatcattgtcctccacctctgcttccgcacatccatccaatcctgagactcagtcgccatccaacacatctgtagtacctcctgttacagtgaacaatcacaacatggttactagatccaaagctggggtttataaacccaaagtctacatagcaacaagagaaccacccactgttcaagaagctttgaaagaccccaactggttctctgctatgcaacaagaaaacacagccctgaaaaacaatggtacatatgttctagtgccactccctccaggcaagaaagctatcggctgtaaatgggtttataaagaaaaagaaaatgcagatggcagcatcaacaagtttaaggccagacttgttgctaaggggttccttcaaacatatggttttgattaccatgagactttcagtcctgtagttaaacacactactgttagagtgattctcacaatagcattatcaaagaattggggactacatcagctagatattaataatgcgtttttgaatggtgagttaaaagaggaagtgtatatggtacagccaccaggctttgaagatccttcacaccctgaatttgtttgcaagttgaacaaggccatttatggtctcaagcaagctccccgagcttggtatgatacactcagttcaaccttgtacaatcttgggtttcataatgccaaatcagatcactctctctttattcgaatcactcctcagcacacaacatttcttcttgtttatgtggatgatatcatcatcacagggagttcatctactgctatcactgatcttattcactgccttcactcaaagtttgcactcaaagaccttggtcttctcaattacttccttggcatagaagttcactacacaaatgaaggtatgattctttctcagagaaaatacattacagaccttctctacaggtctaaaatgcagtttgctaatcccttaactacaccaatgactggtggggagaaactctcatcgacaggcagtgatcccatctcagatcctcatctatatcgcagtttggtgggggcactgcaatatgtgtgtatcactcgaccagagattgctttctctgttaataaagtctcgcaatttatgcagaaccccctgcaatcgcattggaaaactgtgaagagactattgcgatatctcaaagggactcttcatcatggcctacatctacaaagaactcccactcttgatatcacaggctactgtgatgctgattgggccaatgatccagatgatagacgaagcacctctggattctgtgtctttcttggcaccaatttagtcacctggtcttccaaaaagcaacctactgtctctcgaagcagtactgaggctgaataccgaagtctagctcatctcactgcagaaatcacatggcttcaatccttgctttctgagttgagcatacctcagtcccgatcccccattgcttggtgtgacaacctcagcactgttcttatgtcagccaatccagttttacactcaagaacgaaacatatagaacttgatctcttctttgtcagagaaaaagttcttagcaaacaactgtttgtctatcatattcctgggtgtgatcaagttgctgatatctttactaaggctttaggttgttccaggttcactttacttagatccaaactcagtgttcttgattctacaacactgagtttgaggggggctgttagtgaacagaatagttagttagtctgttatagttagttagtttgttatttatacagctgtaacttctaacttactcttgtatatatattcatctctgcctttgagcaataataagactattcatttttcctcaaatctttactttaacacacgtcttaacaaactcaaaaaaattagttaacaaaatcatttaagtaggtttaataactgtttaaaaaaactcataaataattataaaatatccttcttttttttattttttttttctttcttttgataaaatatcaaaaattatttatgtcagtatgtacattgagcagggcaattgttgagagtcactccgagacaattattaatacattgaatggttctatacttttgtttttaagttgggatattgataattatgtgactcaatgcattcagctctcgaacttttttatggagtgtaattttttgttatttttaaaaactgtaattttatgtcccatattatatataactaagtaggcttttactactaaagttactggactagttgatccttcatccatcccacacatttatatataatatactatacattatattaaaaaaaaaaaaaaaactcatgactcatgagtaaggactcgacaagtcatttaatagcttgtggaggctgaagaaggtgagtcatttaagatgagtctgaaattatttattaagagaagaattaatgggtgtcactttctgaagcttttccataggc

SEQ ID NO: 193907 - DNA, 878 bp, Cannabis indica
ttttaaaaaaaaaataaaacccccaattaatactaccatttgctgtagtgatatggtatagtatgtatggcttgtcctcaaatattaaaagagtatttgatatgtgaatgtgacgagggaagcttattaattatatatagtacgtgcgtgtatctcatttatcaaactgcacgcctcgcattacacaatattattattaacacactttccaattattaagtacttaatttcaataaaataataaagatttgtacaattaattgaggccagcgacaagactatgacaaataataattaaataaataagatttttttttaatttttaacctttaaaacagtttttattttttaataaaattcacataaaaatttatatataatatgtaataaaacaacttaaattgcatccaaaatctacatagtaactcatataaaaattacaggagcaattaccgaaagcaacttaaaccataaattttttttaaaaaattaaaaaaatagtatatgaagtaatttttcaacaaataattagtatgcaaatctacattttgtgtgataattacttactacttaactaaaaagaagaaaatttaatctttcaaaaacaaacaaataataaactaattattaatgtatatatttagacacaaaaatacttataaaaataagcaagcatgcatatatataaaacagacaagaaatcgtatggattagatagcaagaaaatacattcataaataaaattgtagaaaaattcttaggtgggagtattatttttactctcacgtgtataagcatttttttttttttaaaaatttcattgattgaataaagtgattatatggtattaatatatgttgttgagttaaataatattt

SEQ ID NO: 193908 - DNA, 2198 bp, Cannabis indica
atgaaagaaaagaggtttgttcgaatttatagatcatgctgtgttgaaatttatttcttatgttatatggaagatagcattggagcttgcaaaggaatattgagattgtaatggttaatggagtaacgctgtggggaaattgccatttacttcctctcggacccttacgagaacctttgattgcacttaaacgtgcagatgttgttgtcatccatcacgcagacttggtatacgaaaagtaaattattaattgctttatttctgccatcaatgaagatttatgcaagtttttcatttagtaatacgaaacttgtaaaattggtaaaatcacagctttctgagaaaaaactcaaagacattgagttaatggtacgagatgtaaaggaatctctacccattttcttcactacaatggctccttctcatttttctgatgtgagaaatttcaactcaaataaacctttggaaacattgtgtaacaccatcgtattatgtgtctctgccattggttctgcaaatgcatttgtgcagggcatcaagaaggtatttgtccttccaagtttgtgatttaataattttccattttcttccccgcttttatttgtgctcttaactagatgaatttaataacttgctgcagttgggagcagtttatgttgatcaacttgaattcagcgaccatcacatgtttcagctcaccgtacgatatcgtctttttttcaagcttacatgtctattaatcacttgttaatgctgataaacttcatacatgctcactttatttggctttcctaatccaggatatcaagattgtgagagagagacttgaagagttggagaagaaattttgttccaagcccatcgttgtagttacagaaaaggttagaatatgacaatataaggtgtgtttggaaaaccacactgtatattgactttaatgtaattcagtgaaaggcaactttaccaggaaaaaaaaatgcaaattcgtacactctactagccaaattttatatttttgttaattcagtaggagatataaaactcactgtcttatttaattgttagttaaatgtttgctttctatatataatatgatgcttctgcacatttaaggtactagttacttattatgctgatgctatatattttaattgacttagtgtacaaattattccttaatttctgctgcctctcattcctgtttttctttgggtcttttcttgttctcaggattatgatagagacccagatattctaaagcacctgaatccttttgaagttttggtactttgttctcagttgcaaatcatatctcgcaagggaattactgaagatggcttcaaggaacttttgaaggagatgctaatagatataccaggtagagaatgtaaatagtatacatccctcacttgaaagtaagcgcactctaatgcttcattagtttagcctaatgattttttttgcttctaaaattaatgtgtagtatcaactttgattgctgattttatcaaagtaaaattagcatacagataattgagcactactgcatttgacttggaaaaaaaatagaagaattatagatgaaatgtaaaaaaagaactacattaatcggaaacttaatattgctattacaagaatagcaaatccttatggacaagggcggacccacatagaggcgaggtggggtagtcgccctcttaaaaaaaattgagaaaaaaatatgtatgcattttagctagttacaatatatatttctaaatagaagtaatattaataaacataatacaagttttggtataatagaaaagctattttgtgcatatagtgaaggtcatgagttctaattccaataaaagcatatttactttagtatttaaattttactttttgaacctctactaataagacttgtacttagtgtcttaattattgaaccaaatatttttattctcatttttttttttttactttatactacatttaatattaaaatataaatttctatcaatttttaacatgttatacaatgtaggaaaaaaaatgttcccctcacttacggaaagaaaaaaaaaagtgtcgttcccctcaacttaaatcctgggtctgccactgcttacggacaccctaatattttagtagaatttatagtcggacaattaaaaaatagagtttcatttcccaaagcaatgtgatgatat

SEQ ID NO: 193909 - DNA, 2511 bp, Cannabis indica
cggaaaattgaacccccaagttcgaaagagatcttgtattgatatgctctcaagcctcaccccatgtgtgctaataaacacaagattgggtttcagaaattggagaagtattcggacgtgcagtgccccatcatcgtaacatcacactcccatgaccattaggaatattggttcttctccattggattcctagtgaagagggtacataacctccctttggaattcaaaactcttagtaagaatttttttcttttatctgtattcgatattatttcattgttagaattcatgactaatggaagttttccatttgtgatagcacttatgccttggactcctatgaacgaggagcttaagacaagattggctttttacatcctgattttgaacagtgcgttgaacataagtaacctagttactatgaagttgcttcgcgaatatggatttatagttggattcctaagtgtatataacatcaacaacaagggcattgtctatatttctccgtaggctaaggaaaaaatagtcgttgaggtctccaaaatcatgaagggggccttacaagagaatgaatgtttgatgacggattgggcactttgccatcccaaccccttgactgaagaagaagaacttgctgagaggtttgttgctgcaccttaggaagaggtaaaaggcccttccgtttgtttcgtacccccagccctcgataggatagatgaagtcattaagggtcagagtaaacacgtatcatctccagatatgtttatggtagattccttcatgtccgtgtatttcccaggcttcaaagagtatggcagcttcgtgggcaggaaaaacatgattttattttcatggggaaagttgtatagtagctcacttaatgatcgcacccacgccaaagtctcagtctatactgatgtatgtttgtgcttacttgcgtacattgtttaattgatgttttataatcgtgttatgggttttggtattgtagaaatgccagaatccaaaatgttgaagtcggtagtagactccagactatatcctcggctgtcggaggcaaaaggaaaggcaagaccaagagcagggaaaaaaaagttttgtaagtcgaggcctcccagctctcactgatcctccgacactcaaggaactccacagaccaaacaagcctctattggggtggaaaaggtccccagggaggcttctcaaagttaggtgatttctagtgtaggagtgatcattgaggcttagcctctgcaaaaatctaatttgaatctggagcaggctccttctggatccatcatccttacacttaactagagtggcgtggaggcaactaccatctgaggggagtgaggaaggctacgtgtaacgtccttgcttcaagcctctattgtcccattacacctatggaatgatagctcttatacatgagtcttacagaccaacacgagtctttccagcatgctttgtcctcactcgcctgctttttgggaaaacttcccaagaggtcacccattgtaaaattacctcagccaagcatacttaatcgtggagttctttcatgatgggctaccagaaaagaagatgcatcttgtttatataggtagtaccaatcaatccatttaagcccacttcaattatgtagtcccatacctacacagtctcaggattatcacacatgacctttcccaagtgatgtgggattgtacaactcccagttttccccttcggatcacggggctttgactaacataatcaccccctttaggggtccgacgttctcgttgaccacacttctggctgagttaaggctcggatactatttgtaacattctcgtctcaagcctctattaggctcttacacatatagaatggtggctcatatacacgactacgtcactctggctacttcctagactgatgactagccctacaaccaacacgagtctttcttgcatgctttgtcctcactcgcccacttcgtaggaagtaaacccaagaggtcacccatcctaaaattaccacaggccaagcaagattaactgtggagctctttcacgataggctactagaaaaaaagatgcatcttgttgatatagatagtaccaatcaatttatttaagcccactttaactgtgtagtctcatacctacacagtcttaagatcatcacacatgaccttccctaggcaatgtgggattgtatagctcctggtctttccctttaatatcatgggctctgactatcacagggagtgttcattcaaagtgttgtaatggctacttctctcaaagcagtctttagctggatcctaagtgtgaagagaattgaattagtggttctaaacttcaaaaatgagctaagggagctctccttttataggtaaaggagtcccacaaaaataggaaaaatacaaattggatgtttttgacagttgatgatagtctaattgtaaaaatttgacagttgatgatagaccaactgcgggtaacctagagcttgtttttgtaa

SEQ ID NO: 193910 - DNA, 3127 bp, Cannabis indica
aggataaagttgaagtcaggatccttctgcttgatctaaagagtggtagtcccaaatatttgatgataccctccggacgactcaatccctagagcctccttgatacctcttcttacaccattgggagatttttgctgaaaagattgacgttttgagcttattaactgttgtccggaccaagagcagaacttttcaagacaatcccaaagaccttttgcctcattcagattcggccctacccaccatgataaggtcatccggaaagaaaatatgggatgaaaccggatcacctctactcaatctagtaccctttatagtgcccaaaccaagagcctcttccaaaagcctagataaaacctcagtggcacagataaataggtagggtgaaagcgggtccccttaccgcagaccgcgggaaggaataatcttgccaacctgacccccattaagacatatattgagagtagttgtagttatacactgagacacccaactgcaaaatttctgaggaaaaccaaagctcgagagaacacgatcaataaatctccagcttaatctatcataggctttaacaagatcaatttttactacaaaaaacccctctttgcctcgtttccaattaaacgagtggattatttcttgtgcaatgacattgttatcctaaatattcctactcgggacaaaagcagtttgagtaggacaaatgaggctgggtaatataggtttaatcctattggccacaattttggatataaccttatacaacacgttacaaagggatatagacctaaagtgacttggtctcttcgggttctgggtttttggaatgagaacaatattcttagcgtttatgcccttatgcattttgccattcacaaagaaatcagaaactgtttcacaaatatcatcaccaacatactcccaataatgcttgaaaaaatgcactgacatcccgtccagccccggcgccttatgattgctcatatcaatgagggtgttcctaatttcatcatgcaaaggagtctggataatctcgtcatgatccacttgagagatcctctcttgaaacaattgacgacaatcaatctcctgtccatcaccaggcctcataaaaatatttgagaagaaaattatgaattcacgcccaattaactcacgactagaaatctagacattgttctaatccaaaataatgtcaatggcatttcttcttcctttaataggagccgagaggaaaaagaatttcgaacacatatcaccttccttaagcaaagatattgtagcccgttgcttccaataaattgctttcctggccaaagtctcattcaaggagcaccaaatatcacgttccatgttccaatccctggctcccgccggtaatcgttgcaactgatctagttgttgttccagctcctttatgatcgtgttaattttaccatattgcaatcgattccaattaagaagagaaacacgagtcgctctcactttcttgtagactcgcgctggggcccaagggtgaatgactgaaacccatgcattggctaccacaagtttgctcctttcatctctcgtccatccttcttcaaatctgaagcttcttttaaatttcggctccaaaccactcgagagaagacaaagaggtctatggtcagaattaaaagtctgggaatagcaaatgatagctttaggaaatagatttaaccaagctccataaatcaatcctttatcgagagctgatttcacatggctcctaccagaacggtgattatcccaagtcatctgatcaacttgaatgggcatattaataagacctcgagaatccacaagggtagtaataaaggggataaaggggtccctaccagaggacccttctcgttccgagtcacttaaaacaaaattagtatcacccaatatcaaccagggcccgccaaacctatccccaatgtccatcaactcagaccaaaacttcttcttagcattttggtaaggagggccatacccacacaagaggagccaagggtgtgacagaggatctgaataaacaagacgagtgatatggttatgagaacaagatatacactcaaaatcaaaaccaaacttccatgccaagataattcccccagctataccaatagcaggcacaacaatattaaaataaaattcgatggattttagcatacgtaccagaggtgtatcatccactttgagctcagaaggaagacaaaatcaggagagcgagctctaatcagggacttcagttcatgaattgtagaggtctaccctaaccctctatagttccaggcgatgcctctcatcgttcctgtggaggagatttgacgttctcctccatagggttatgagagtaagcagacatgctggatccagaatcttcaattagaaaggagcccaccattgggttcttcataacttcctcagcgcagtctagtgaactagaggtatctttcgagggttcttcataggccaccttagattccaagtctttatccttaggatccccagggaagtcccgaacaacatccgggtgcatttggataattttattcggtctagagcaagaaaaataaggaatatcatacaatttccttttcttaaatggcgtagtcctttcatttgtttccgaagtagtcaacacacaaatatcacctcccattttcttaatttcaaataaatccatctttccaaaaagtttaagatcatgtaaaagatttttttgggcttttaaagtaagagagacaaagccttatcctcctctttactattctcggccacaagcccaccaattggatccataattaaaacattgggtcccttagtaactctttggctgaaagggggctgggccattaaattatcacactgtattgggcccccccttcactccctcagcaatgctcatgttaccatttaatcccaccggccccactatcacctcagaagtagtcaaaggctcatttgaattctcactaggcccacacatattcggcccaatacccataatagagcccacttcctttccattattcaaactcagcacacccaacgaggcacggtcatctccattaatcgccaaaacaggacccttctttggagcctttccatctcttag

SEQ ID NO: 193911 - DNA, 1602 bp, Cannabis indica
atactttaaaaaaaaatataataataattaataaaaaccaagggcgaaaattccataattacctcatacatccaacttaaatattctataggttcaggagtaaaatagtccaaaatcataaccccgcctaaacctgatattccaaaatatcacttatatttgtcccacttccaaactctcccacgtgactataattgtcatctatcgtattttctattgttaacgagcaaattataaacattgtaaattttacatataataagaataacatacttagagtttaataaaatctccaaatgtgaaaaattataactccaatacccattttctaaaaataagacccacaacataaatattcatataaaattataatttaaagatagctaatgctaattttcttactaatctatatttaatcatgttgtcattacattttgtcttgtacattattcatgataatagaatttggaatattgacaggtttagcctttatttttctaaggacatcattgatgaaattctgaaggttcttatttgtcctcttatggatgacactctcatttagggatgtcatccatctagcaagtttactgctaactcagcctatcatcttgctaggtctttagctttttctttttctccatcttcctctaatccgactgcttttaaggattggtcaaaactagtttggtctatgaaattccccaaaaatcaagcacttgtttagaaagtctttcatcatgtgttgccttgtgctttaagctttttcaaacaacaaaaaaaaagaagattatttcccatcctttctgcttcttttgcaatggtaagaaggaaacggtttcacatgccctattaaagtgttcttgaactaattttttttggagaaatactactttaaagagtttctatacaattaataggcattgtgacatcgagaaacttttattaagaggctttgataatttgaaccatgatcaaatttcccttcttttgtgcatctgttggatggtgtggaatcaaagaaataattctgtgttaaataaccctgccttaaactttgtgtaagtagaagactttgtgcttaattttttgcaggattataaagaagctcaaagtcaaaggttgcatcaatattctaacttaagctccttccaatagtggtgtttatcaaaattgtaatgatagttgcaatttgccttcttctaagaaatttaaattgagtgtgcttccttaaatgtcaaggctaaaaaaaccgatataagatctattgtcattgattgtaatggagctattgttgcaagattatgttcttgtgtaagaatctctattcctatttatgcaaaggccacgacattgcatactatactatcttagtgtgtagccgtgaatttcccaacaaagttgatggaaataaattatcgagttttggtcaacaaaatcaaacataaatagaaagataaatcttctctcaaatgttgttcaattagtgcataacactttgtctttcttttgaaatgtttcctttatcatatttctaaaaataacaatgtattaaattctcattatttatctattgtaagttactttaaaaaaaaaaaaaaa

SEQ ID NO: 193912 - DNA, 1581 bp, Cannabis indica
atttatagatttataaataattaaatcataacaatttttcattcaaaagttgaacgattgggcagatctgttttagatctttataaaattcgttcgagtaatgaaaataataaatggtggtatgtttccacaccttaattttttgagtaaaatatactataaggatttatacatatttacatatatttctcaatatagataatatacataataagaatatatatatatatatatatataaatggtatatggctcgtagtcgttcatacccaggtcatcttgtagcttcaatcactcagaaaccaacagtatataacagaagcagttcgttctgcctttttataaaaagaattgtttcacctataatgatggtcacactttgcagatcgactacacaattaatgtcatgaggtaattattggacgcttataaatgttaattaattatttatatctgatacttaatatcacatgctcatatatattaatatgtatacacacacataatgctcatatatatatatatatattattattgtatttgttttatcctaaatctaatcacttaaattgtttgttcaatattatgcatacataatagatcaatacatctcatattaataagcgatagaaatttagatcaaaaagcctatacggttaaaatattaaacgaccttagttccctatatatctctagatctccaggatcgatactgtgtggcctgaacgatgtatatattctcatggcatgtgagttatatttgtctttactttattggaattagttaaagtacaaattaattcgttatataaagaatatatgtatatataaattatatgtatgtatatggttgttcttatgacctgctgcagaagtaacatataaatattcgggttaaattgtcccttgattagaaaaatttatctggcttatctacaagttctttgtacaactacttttcaatcgtatatacaagtgtttgaatgtattgggttataccctaacacttctgtatacttcttcaaaaccagaaaagaaagagcttatttggctgcgtttttagttttttaaaaaaaaacaattttttgtcgttttaaaaattgaatgatgttttacacaaattttttaaaactatttaaagtttttttcttattaaaaataatcaatattttaacaccataccataccatgacatgaacccatttgaattcaagttcggttcccggcaaaatgtaaaatataatatgttacataaaacaaaaattgttttggaaaataaaataatatattttaatgtttttctattttctagtattttaaaaactcaatttttcaaaaaaaaaaaatgtttttaaaaaattttagtcttaatggtctctattaatatttaaaaattaattttcagttttgtaaaataaaaaacaaatttttagtttatgaagtcacacagtgtcaaagaatccaatttatgatttaatggtactctttcatgtatgtgtaatatataagaatacacataataacttttcttactctatttgttaaaatatatagtgaagattctacattctctaatattata

SEQ ID NO: 193913 - DNA, 1481 bp, Cannabis indica
attttggctacccaatatttcataaataactgtattttcgtgggcaaatgtatgaatggaaaagaaaaggtatatctctcttacttatattccttaatagaataaattcaatagtatagttttttcaccattaatattaacataattgacttttgtttttcatatattgcaggattttaggacaagtttttgttattcaggaggtacaattactccatggtttggttatcaatctatgggatcatcacttgaactaaacttaccttttcgagaaaattgttacgacttcttaggctttggtttatgcattgttgttgagtttgatcccaccattttgaaagatgatgatgtgctagacttaaaatgtgaatacaatctgaaaaccaagaaaggtcagaattttcaagtctcttcaactctacaaagccagaaagctgctcattttgatgattctaatttagactcctcctcaaatcatcaagtattcgtatggtgtatataccgccaagacatttgtaagaaaaggttttcatatgatgatgaggaagataatgccttatttgttgatgaatacgaggatgatgatgatgaatttttagaaggggtagagagtgtcgtatttgagttttacattggcacaggaagaattaaaaaatgtggacttcgcttcgaacatctcgccactaatattcagattaatcatatatccatgtgattgctattcctaattcctattcatcaaggtaatttattactatataaacttctccattttgtttctaccataattaactgttattttatattgatcacaatgttattataaaatagttagaatacatgttataattttatttagtaatttgaactgtcatttttcattatttatgggggatatgtaatagatatgtgtattgcaaggattaaaaaaacttataattttcaaactaaatcatccttctttaacaagaactaaactgttattatctatctattgttatttaattacagattaatttcacatattcccagggaaaaaatgaatcgggctgataatatagttgcgtctacggcttttgaagattgtatatagtggatctcatgttgtacttttcttaaagcgttgtactctttttcctcttttgaggttttacccactcatgtggttttactctttaggggttttgacgaggcttcgctatacatcataattaatttaataattttgtttttggacaaccaattatatgtaagtactctagctttttgagtttttagaagttttattcatataaatttgtaatccaataaactgtattctgtattagttctcaatatatataataattggatagtttggcagagaatggctttaataagattgggtgccgacctagtcgggatgcttttttattagcctgatcagtatgcatctttattttcatttcctctaaaaatattatttgtaatttttaaaaatt

SEQ ID NO: 193914 - DNA, 2246 bp, Cannabis indica
aaaaataaaattttaatatatatatatatatatatgtgctagtaaaaaacccaatgatagtaatgttattgtgatttgcgtcgatggatttagcattgggtttatggaccgacatcattggtcacaacctttgtttaaaagagacaattaatccagagtactgtttattataaagtataaatttttctacaagctacctaaattttaaaatttagtactatgagagagacaaataaaacaaagctagtaattctttttcttttcccctcaaatatttaatattgattctgttttttttttgtatattaaacctagtactctcattattatatattgttattagagtccgaaactatattgttgcttaaattctttattattaattttcgaccaaaaaaaatattttttgtttgtttacgataacaatttctttccatgtttctacaattaattctgccacattgagtgggcatgtaatgtttatgtatacagatgattttattatttattattattattatatcgtttattcattattaaataattatgtgtttttttcctatcatatcttgaatattatttttgagaaaaataataattatataagaatcatccattagtcacattataatctttatgaattttatgcagtgtagccatagatccaggattttaagttgagaataatcaattgttttactatatataatatcatatataggtagttattaaatgtgaaactgtgtttgggtaaatattagtcgtgatgggggaaatattgcaagcaatcacgactttaattatttataattatacgaaaataattaatgaaagagagaactcgaatgatatgatgaattaatgaaataatttttttttctcataaattctgtacactttactagaaaataataaatagtacactactttgagattttgtaatatagagataaaatgttaaaactaatttgagattagagaagtagatgaaaatgagatgatctgatgagttaataattataattagttgtgaatggagtgaccaacacccggactgtgacctggtgaagttggcctgaaatcatcgataacatgttcagctttactagtttgttgatcttttacttgtttgtggtgattatcattagaataataatcaccctttgatgcattactcaaagtattactacttttctgatgaagaccatgctttgagtttgaccctttcttgtgcttcttattaggcctcatattccttgcctcaatattcacgatcaattcattacataacaccaagaagatgatcaagaaaattgccaccttcatagttagatatatatatatataaatagagtggaagaaaaagagagagaaagggcttgagtagttttgaagtgtgatgctgaaacataagtattgtattaagtatatatatacaaggtatctatttatatggacgatagatttaatatttatatgtataatattgctacttgcgagagaaatatatgtagtacaatatataaacatatatatatatatgtgaaatcctagtattattatatatggtatctaataattaataattaatattaggctactactctacactcttacgccacatgcaattgagggtcctcactcctcaagtgagtgatatgagaagattccccagatgggtgtgaccggttgatcattacattattattaaaaatatcagaaaaagaaagttgtaaagatgatcaaagtgaacggtttgtatcaactgtttaagcctaacctctctttcaaaagatagctttgcactagtttagtaccatgcctctgtttatattctctttgcccccccatgtacttttggcccatatgcatggagactcagccaactatatataaatatatatatatttatatatatatatatataccaacactcctacctttctacttttgtttgttatcaatgttttatcatatatatcgtacgttatcagatactaatgtcttatgtgtttttgggtggaagtaatgtaatagaataaaatataaataaataattttttattttatttatttatttcgttacattcttaatattaaaatattgtcattctaatagagaaatatatttttttactattttgggtgaatattatattctattttaaaatagaaaaaaaacttatttacataaaaaaaaacttaaataattttttaattctttttttattactattcctatttta

SEQ ID NO: 193915 - DNA, 1267 bp, Cannabis indica
tatatatatacatacatagatgtataaatgaagtggtaggtaaattataattggtggctagcataccagaagtggccaggaagactataaacaaatgagaacaaaaagaagaaaacaagaggtgagatgaggtatggtatgacaaatcaatggaacaaaagaggagggtccaccaccaccgttggattttaataccaacatccaatatatctaatcctatccattcatgcatttattactcaaaagagtcaagtatttgactctctgaccagacccagcagactttccagatcctgacaatatttgactctctgacttttccatttaattggagatcctatttatttttttgtttttgttttcttctttgtaatattaatagtaatattaaattctctctttctcactttgtggagaaggacaaagtaagttaagtagctctctctctttttgcctctgttgctctttattattagtattttttttttctctcatcatttttggtattttgttatggacacttctatcaatctatctttgtttttatacaccaaaaaacacaaaacagagttatgaatgagtgaggcagatttctcgtgagttttctttaactttgtcagaagttgacattcatatatatattcatccattaatgactcactcctacaattttgtttatatttatttgtattgtattatgttacaatgttatgctcgtgtcctttttatttttcaaaatgggtacccacttccacactcacaaataaacaatcacagtaaaagatctgatgatgacaatcagcggtgatggtagttcggtctcttaaatttatgggcctctcatgtgagacactgtctgcctacaatttaatggattctccttctatgagagtcaacaacgctgaaactatgtggggattttatttaactcattactcaatttatatcatcattaccattataatcatatccaactagttctatagttaattcttattaaatttatgctcagtattactaatagtactagatagatgtacattccaataacgtgtttaaggaggagttgcgttgctttagcttgagagtacacattggtcttagattcaagtttttcattaattatttgggttctttttttttcttttgaaaaaatacattcattcgtaataaaatgttagacttctcggtcgttacaacaaatgttcatagaaatagtagtaacatcaatacacctatagtacgtagttgcgagtaaaagtccatt

SEQ ID NO: 193916 - DNA, 1531 bp, Cannabis indica
tttgtttttttttgtttcaatagctaaaagtgttgatttcaaaaggtattttctttttctataatcaatgtatagaagagtttgattatgttatatatatatatatgctgtaatccaaattaatttctctacttgaaacatgtttagtgcagaaaaatgattgaaactttatctttgatttttctcaactgattctctcttttctatgatttataatgttttgttctaagataatacatattgtgcatatatgtacaacttaattgttgctttcttttaaaccttgatagtagccatttttttttctttctataatcaatattttacataatttattgatgagtctgaatacatttataacttgcaactttcaatttaattaagaacagaatgtcctttttcagaaattgaaagaatttggttaagggaatgaaaatgaagacgaggatgaagatcgtgaatatgatgatgaggaagatggtgaatctcgttctcatgaaaatgatgatgatgctcctgcggttcaaagtgagaagtatattattatgatttttgtgttattagtaatgataatttatttatttttctttattaataaattagatttttaataaatttgattgttttgattattagtttgtcatatgatttagaagctgaaacaaatatttcaccacaacaatcgtctggtagttgactcactttctggtttaactactctaaaattttctttctgctaatattatgaaatgtcattttgcattttttttttattattaatccatgaattctgttttaataatcattgataattaaatatcttatgtattatttacgatgaacatttaaaattatggtgttccgattgacttcttagagtaaaattgataattagagaacgattggtaagtaaattcaaaatggattctatatttagatttgattattgaagattatttattttttagtttgttactatgtaaatatttagcaatatgttgagtttttgccactgtatggtgtgtagaagtatatttaagaaagaaaaaaagttggagatgaaatttttttgttcaagaattaattgatttatgctatattaagaataaagatgaagatagagatgagaataaagatgtgggtgcttctagcattattaatgtggtagattatattacaaatcatgacatattatttgatgtggattattcttttgcaggtgaagatcaaaatacttaaatataaaataaataagttatatttaactccaatggtatgtatgtataatattattattataaatttaattaaaaaaacatattaattattttattcattttagtattgacgagtgcattctttaaagggatataaagaactaaatacaattgatgagatagaaactattgtgatgagaagaggagacacagtaataacgagagttaaaatgaattaattctttaatacttgaatccattatgtaatatgattaatttgtgtatttgaaatataatttagtatttacaagata

SEQ ID NO: 193917 - DNA, 982 bp, Cannabis indica
ttattaaaactgttttagtagtacttattattgattattagtagtattagtttctagagagaacattatcataacaactttatatatatatatacactaatactctcttatatattaattattcgtttacatataattttctaggtctgtacaaaaactctacaccgaacctaggtaaaagatcatcatgtaataatatgatgatcatgaaccttattgtttgcaataaataatttattattagtttattgatcatatattttcttttactgatgtaaggttcaactactcttctgtgatcatatttttagtgggaaaaagatctaacaccaaaaactgacattttcttgggaaacataggataggatctgttctaattattgaaactcatgaattcatcacaaatttgtttaagcacataaaatgggataatgtttagtaagaggttaagttaatttggagtatagtcactatatgtattgttagctagggcattctttctattctgttaatttattacaaaaagttgacttttttttatacagctctaacagtttggtgcacaagagttatagctatatatagcttctatatagactaatatgtatgaaatctattttctgtggttctaagtttgaattcctttgattagaaaaaataaaattgaattcccatccaccaataacataaaattaaaaagaaataataatgaaaaacttcacattatgtatgttttctatgtgaattggccaaggcaattgtattttttctggccttaaacttattgttggaattaaggttatatgaagtgaaaaagaaaatgatgaaaaatacatctaaaattgaaaaaataaattgtgtttttttacaagagtacaagctcccaaatttgataaagtattattagttcctttattttatttagttatttattttttgtttttttaaatcatttgttaatgtggtgaatcttcaccctcaa

SEQ ID NO: 193918 - DNA, 1981 bp, Cannabis indica
aaaaaaaaacaattaaaaaattaatgagatatcaacctcgtgacaactataaatcaaccataaataaactataaaataacaaaaaataaccagaaaaataaccttatgaaaactataatacaactataaaacaaataaaaaaaataatttattatttttactaaagatgtatctttgtaaataaaaaagttctaaaagtaaaaatgaaattttttccatgttgacgtatttttgtatttttttttcaagtttttagtatgttatgtaaaattttcttttaaatatcaatatcaatatctatttattttaatgtaataaattatatataatataaatgggaatttttatttttcatgcttacattaggctaaaacttaccataggtaatgtaggttaatttttatttttgttccaaaaataccactctcatttcaaaactcatctccttctttctctttttttctctatttccttctctctcgtctccgcccaaaaactcatgtctcctcctattctcgcagcaccaccgttacccaccaaagaaaaaaccccaccaagatcgagacccataatcgaagaaaccatcaatttgtgatttccttgttgttttttttttttttttgcttatttttttggtaaaaaatcgagttttggtgaaatctatattttacgatagtagtgtaatctggaggttagagatgaatgttcgatgtatgatacgataattgctaaagtatgatagtcgtacgatggtgtacgtaaggtacgatagggctaagttgttgtttgaaatttatgccattgtacactgtcgtaccaccatcatactatcatacctttatcaaccattgtatcaccatcgaactctattgaaccttcatccctaacgtccatattacactactatcgtacccaccatcgtacattattgtaccctaacctcaatattttcatgccatagattttatcatggcataaattttaagcaactaccgaactactctcgtacctttgtatcctatgaaaccttcatctctaacctctagattacactactatagtacctcattgtaccatataaacaaaaaaaaaaaaaaaatcgcaaagaacccagaaaacgtagatttcactgaaacttaatttttaccaaaaaaataagcaaaaacatgaagaaatcacaaaccgatggtttcttcagttatgggtctccatcttagtggttttctcttcgatgggtgacagtggtgttgcgaaaatgggaggggacgtgagttttgcgcggagaggagagagagggaaaaagagaagaaagaagagggagatgagttttgtgtgagttttaaaatggaaagggtatttttggaacaaaaataaaaattagcaaacatttcctatgttgttaaacttgggtttaagtttaaagtttagcctaatgtaagtgtgaaaaatcaaaactttcatataaatttgttttttaaaaaaattatcaatgatattttttttatagaacatgtgaattttaattaaatttttactataatatatatttttttaattttttaaaatggtaaatatgtatatcaaaatattttattaaatattattttattttcaaaattattattattattatttaatgaatatgagtgaattatatttgtcaaagaatactatttataacttacaaaacaccaaactcagaatttacttaaaggaattcaaagttttgaaccactctatcaatcctactagttttctctcttttaaaatgagaaaacctattaaaaacatctcttttatcttttcgactacaacatttacatattatgtacattttgttcctacaaatacatccccaacctctcaaatattatacaccaaagcattaatacaagttacaaaaacttctctacgaaactttaacattttgtatcttaaaatcaacttcaaacaatcctccaaggatctctatgttcgcata

SEQ ID NO: 193919 - DNA, 2971 bp, Cannabis indica
taaataaaatattaaataattatgtactatatttcttaagtaaaaaaaaattaaaatagcagtggctatattaacaaattattatataagagacatgtgatttgttaacaaaaaaatatgaaatatctaataaatataaaatataaaaaataatattatttattttatcaaaattgaggccttcttttcctagcagtgtattttgtgtcagcaggtacaacattccctcttcttctcatctgttccttcttcttcagtatccattccttgcccttccctttttccataattctttgtttttttcttggcctgttcgtgttagaaacacatacctaaaaaactattagaattagtctcacattaataatgtatggaaataaaatattatatataaaattcacgagttactcctctcattatcaattgttttttaaattctaacaaaaactaattcagctccattcaattccatgctaacatatctaaagagaagaccttaaatcccgagaacaaagattgcatgaagttcttgcatagagacacctagagcagagcaagtgattaccgtttgatcttcttcatctctactactattgtcgcctttacgctttggaactggtgtgctacaagtcagaacaaggtattctttccttttcttggcactgtttcagaaataattttcagtcaaatttagcagaaaataagcaaagagcaaatactatgttattacatattaacttttcttatgatatttaagcttgtgtacctgtggggaaaatcaataaccaagctaccaacgaatccagcaccaatcgcacaactatatattaacactcgctgttccgtactttcaggatacacttgaaagactgctcttgctccccttgcaaaacatctgtatagagatccaaagaatgcactgaaaaaagaattttagccaaagattacaaaaagtgaagtaatttacaaaatatcatttaggatgagaatgagtcaaagacaaagactaacatactctaatcttagttttgggttgtgtgaggatttgtcagcattgcacaaccactgtcattcaacacacaataggaaaaatataaggtaggaattgcattgtaaagcacttgacattatatcaatagatgcttcaacagtacaaaataaagttatttcatcaactagatgatcaaagcataataagattcaacgggtgaatatgtaatttatcaaagcatatacttatcttgtacacctccattccagtggaaaaatatgaaatgagaacttacaatgagttgtgacgatatatagacaataataaagtaagcacatattgtcctttcttgttccaatttaagtaaatgaacatgcaaaaatattattcaccaaatgcaccattccttgaaattgaattacatgattatgataagaaaaaatgaagctgactaacaaatatagaaaataatgaaaaagaaacccacccagagataaaactcagtattaaatataaaactcaacctattgtcatatgagcaaacaaatttcaagcaccaaataaaatgatgctaacacattgagtttagattttaaaaactattgatgattaaggtataaaagaagagaggggaaagaaatagtaagataatagaaagtagacctgaatagcagagatacttatggccccatcaataagaccagaccgaaaccccaatccctgaaacaagatccaatcccattgtcactctaaaagttgataaaacaaaaaccccattcaacaatttcttcagagtattaatgaagttgaattatataaacatcatcttaggggagaaggaagggattacctgacccatgtcagcaagtaataaatcaccttcaacctccctctccaacgcaacatctgtaatgtaggataagattattagagagaatgcataattaataatatataactgagaatatatgtttcgacgtactaagcattgagttagagatatctaaaccgatccactcatgaccattctctgttacggtttctccactaagtcctgacccgcaacctgcaataattcaaatcaaacccatatcatatatatatatatatatatatgtatgctaatgtttgtttgaaaagaagaagtaagtggtgattttaattaccaatgtcgagaagcaacctgggaagtccatctttgggcaaggcgagaagctcgagagccctctcggtgagctctgcttggattttgatgattcgagaagaggaggtatacttcctagcttctttatcatcatagaatatctcaggggcgcttggaattccggccgagacgacatgcttacctatgattatgattatgaagccaatgagttgagagaggaattcataaacttaaaacaaattcagatattgatcaacagagaacactcattagatgttggagagtgataccgctgctgtgtcgccgagaacaatggagaatagattgaagccggcacttgagtcgacggtgatgattattttgagaaagaataaagtgatgtagacagtctagggtttcgtgaaaagtatataatgcaattagaaaatcttatataggtaactaaaataaatgaaaagactaaaataacctaaaatagaaaccaatttcataatcaagttagcaaataatattttatgtaacgaggaggtgtaatttttattttgattactaaaaaaaataatcaagttaccacaaaatgttaactttatttttcaataaattattatgggtgtgaaatactaattctaatcaattgtttactgaacaacttattttagttgataaaaattgagataaaatattaccaaaaacaaaagaggaaattatgtagaatatggatttttcttttaaagtttgataaatatggaaaaattataattttatttaatctatggctttcttctaatttaagttagttatatggaattatattt

SEQ ID NO: 193920 - DNA, 2578 bp, Cannabis indica
caaaacaaaaaaaaaaaaattgactttagaggcggctaataactacttcattaataaggttaatagtgctatcatttggatagagcttattttgtaattcatcagtaatacttgtaatactttctaaaaattattacttatatggaatctaaaacttcattacactaatactgatatggatacataagagattattaaacaacactaatatcttttagcatttcttttcgaataagtgtaaaagtatacatgtcgctttttttttttttttttcctaaaaaaacaaagaagggtaatttaattatgttaacaactataataatctcaacagtacatgcccattaggccttttattattatgatgatgatgattatgattattattattattattattattattattattattattattattattgttcaaatgatgaaagcttgtgtattgtttattattataatgaggaccatatattacactagtcttctatataaaccaacataaagaccacccttattgactaaaatgtccaccaccaaccttatatacacataaaatggtgttgtcagttgtgcaccatgccacttgctcatttttattttcatttcaaaaataaaaacaataaatattttcccaaaaaataccacacatggtagttgaaataaaaccccatattactattataaaattagattgatatattaaaagactaagtagaccctactaccttctctttcagaagtatcatattgaccattatgggactccacttcattcattcatacaatatttttcattatcacaataatccaaaaaaaaaaatcttatcataacaaattaagcaatcttttattcttaaataattcaatggacagtagtaggaaggaagaaaggtagagaaagaagcagccaatattgtcagtcaaacaaaatgccttacatgattctttttatataatttacccaaataattataaagtttgtacctttatttattagtcatactaatgctctataaaaattgaaccttttcctcttaattgtcattattacatactcacacctactccaactctctttccttgaaatacctctctctctctctttatactcttctctatatataaacaactttgcatgagcttttttcatcaaagcaaaaaccatatagagatcaataaaaaaggagagagctttagctagaaaaactaacaactctagcaaagcttaaacctttaccttaaaaatgagtagagaaacaaataatcatcatgagattaactcagctcccataacaccaagactatcatcaacaacaccaacagtgtcatgtccaccatcacaataccattcaccatctttatcaagatcacctttgttagatggagctgcacatggagatggtcacccaccaccaaaccaacaacaacaacaatcatctcaaagcaagactccaaagacaccaagaacaccaagaacaccaagattgtctatcacaccaagacagcttctaacacctttcataacccctttagggagtcctgttagaaaggctttgaggctcacaaaacttgaccctcaagatgcttggttaccaattactgaatctaggaatgggaatcagtactatgctgcttttcatactttgtgttctgggattggtattcaagctcttgttcttcctcttgctttcactattcttggatggtaagtaagcttaattaacttttatttttttgtactaatttagatttacagacttatggggaactaatatatcagttatgttttgaattatcatttaacacgacaaagagtttgatcgatacattttgtaaaacacagacttaagtatattggtgtgatttttcaggacatggggaacaatatgcctaacactagcattcatatggcaactatacacattatggatactagttcaactccatgaatcatcagaaacaggcatgcgttacagcagatatctccaactattcagcctaacatttggagaaagattaacaaacatatttgccttattcccaatcctatacttatctgggggaacatgtacaactctgatcatcataggaggatcaacaggaaaaagtttcttccaaatagtgtgtggaccagattgtgcaaaagagttgaccacagtggaatggtacttggttttcacatgtgtggcaattgtgttgtctcaattgcctaatatgaactcaattgctggtgtttcactcattggagccataactgcagttggctattgtactttgatttggggtgtttctgtttctaagggaaaacttcctaatgtctcttatgatcctgttaaggagggtgcaagtgttatggaacagatttttagtgtcttcaatgctcttgggattattgcttttgctttcagaggtcataatcttatccttgaaattcaggtatgttaattttaaaatcatattaattcatttttatttattgggtatggaaattttggacacaaagtctagctaggagtgctagcttttacaatgcatctctacctgtttcgtcattcaaaacaaaaatttagtc

SEQ ID NO: 193921 - DNA, 1902 bp, Cannabis indica
taagactacaccttatgggtggtgttaatactagaggtcctaatagcaatattcccccattaattacataatattttgggatcaacaaaccaaataagtcaaatgacttttctcttgagttttgtaattcatataaaagaaagagacaaggctttaattaggaaaagaattattgagtacaaagcactctactattcatttcattgtacactctttacaaacactcatctccaacccttttacttctatcatactcttaaaccagtcacataatacattgaaattatcaaatctagtgtaagttattttttgcttattttaactctaattgttatttaaacaattcttccaaaataaggaacaaaagaagagagagacaaaaaactacatatacagtaagagagtcctttcattttcattattgtgaacttaattttagctattatataaatttggtttaaggataatttggttaaattagtgtaaaatagagtaaatactaatgttcataaaataactaatataattcaactcgatcaaatctaatctacacacatttataaaaaaaattatatataattactattttaatataaaaagaattaataatttaaaaatctaatacatataatacaaatatatttgaaaacttattaaatcaaatgtatattctatttttatatatataaatcttttcctttgaatttattatttgttattttatttattttaatttattattgaagttataaaataacaatagttacttttattttattgttagttatataaaaaatattttttaaaaaatattaaataatttttttgaactgttaaattgaatttaaactattatgcaaattgaattgagtctaaaatataaaatctacacttagtagagatcgaatgaactatataaaaaaaaataatacggattagattaaatgaacaccaagtatccctagccttttaatttgaaattttatttaagtttaatatcctaaactcaaatttaagtcttcggtaagacaatgatggtgataaactaatcttaaactaaaaagaaagagtaatatttttaactatgaaaactacaaatgtattaaaaagaaacttaaaccaagaaagttgggacactaaattttattactaaatagtttttgtttttctaaaacaagaaagaaaaataaaactttatgtaattcatctccgtctccatcttcatctccatttatttacagagccgattggaaaatcatctccgccaattcctgcgccaccataacagattggttagttaaacactttaaaatcatgaacaaacttgttccactcgggaacaaataccgttatgtactttagaccaaaagtagacccgaaaagtacattaaaatttttgctgaacttttttttttgctgaacaaaagtacattaaaattaaatatatgaaaccaaactcaaaagtacatagctatacaagtaatatacaggtaatttgctcaacttactgataaaaaaaattgaaaagaacaacataaccatattaaagtaaacttatgatcttgaatgaccatgttggttattaaagttttcattaacttatttgtgtggattgagtgtaaatttctagtatatgattatgtaattttcaaccaatactctcattttgaaacttgatcttcaaacctttttctctttggaaattgagaagtaggttggaggagcaacatgggattaaacaactattttacctaatcaagatttccgttaaaaatagtatcctatattgtgttaaaccaatctaattctaataaatcaactaacttaatttatattaaatatgctaactatttttgttgactcagttaaaagtttaaacttttaataaataaaaaattaatt

SEQ ID NO: 193922 - DNA, 797 bp, Cannabis indica
aattatatagatatatagattttgatatctaattatgtgagtttgaaactgtaaaactagttatattattatctaaaataatattaaaaaaatatatataacttcactgagtttatgggagagtccgagtccaactcaaaattcgatcatctaaaaaagcaaaatcaaaactcgctcgaaaggtttactgggttaaacccaacctccttgcactgagcggtttatttttaatttcttggttggatgggtcgggtctgggcaggttggccgaattcgggtcaaacccgatacaaatgttgaatcctatgtgaaactgtaataaaatttctcaaaaatagggctcatgttgccgtcagcaatgatatgtttatagtgggataaatgttgtaatcaaccaaaattttgaagcgtgaagaataataaaaaagaaaaaaagatgatcacccactagcttagagcaaagttaattagatattggaaaggtcccacacctagtttatatataagagttagggttcatgtatagtactaaccccacacccatgtgacttattgtgagtacccactaatatattagctaggtaccttattaggtaaagtattgcatgcttacacattccaaattgaaacacaaaggtagtaaggtcatatatgtactactagtcttcaatctaaagcaaaggctttgttcttcaatacataggcagacaatatatattggacccatgcaggctatgccctaaccctacctcgatccctcattatgatcacattgtcaacaatctctctctctctct

SEQ ID NO: 193923 - DNA, 1300 bp, Cannabis indica
  modified_base (671)..(671): a, c, t, g, unknown or other
tatctgctaattttaaaattaaaactatgtggtctttacaatatccgatcaccattactttgcttattgctctatgtggaaaaatagccctaaaatttaacatcttaaagcttgcattcttaaatacactccttaaaagtggtcaaccttgttcttctaactctatcccttaccctctcttcgaggctaagaatatcgttgaagcctcccaacactagcctagggcttttgatccccctagccaatgtcatcatatccttccataaagtttctcttcgtgctttctcattgaaagcatagataaaagtaacaaagaaaacttcctttctcgcaatagcctccgcctctagatgcattaactgactagagcagtagagaatattaacattgaacatgaatggattccatcataataaaaaattctcctttttggatgccacatattatttgtagatacacacaaactaataaatatagacaaataaatcgctccaagtttcaaagcttttatttttgtctcaatagactaacaaaattataacttcaacgtatcgacggtaaatttcttaacccccagtctatttatgtggtttgttgtatctcctaacattccaaactcataactcttattcatggatcgtaggaggttctccaccccccgccttggtcgnctcctctttttcgtaaactctagatgttctcctacttccttgagtatcgaaaaggcattggttgttatagtagcagaatatatttccaccatgtctttcttcccatctttaactagttggaaaccatcttcatcaacctctcctgtgttcttgtcttttattattagtctcttccccattttctttttttttttctttggtactcattcttgtttctttatagcttcaggcttcttgcaatcaagcaatgtgtggccaatttccaaacatttgttgcatttataaggaatccattcatatattatattgactgtcatttccttatttagtttattagtaaaggataatgtatttgggaattcttgatcaatcttcacttccatgagaattcttgcataagcaagtcgttccttctgctcagttatcttatcaatttgaagaggctccccaagttggcttactattttgaaaaatattttctttctccaatatttgagatccaaatcatgtaattgaattcatgttgggacagaaaaaaaaatatttttcttcttgtaatctattgttgagctccaaggtttcataattattggtttcatatcaaagatgttagaagtaacaatgactag

SEQ ID NO: 193924 - DNA, 564 bp, Cannabis indica
aatttgtggtagtgggatttattgtaattaaatagaagtggtactgtttgaacatctaatccaatccaatgttgcttattaattatatgagaatagatcatcataaataatatttgtatatttatatacatatattgaggaagtggtgatgatgatagagaacaattgacatagataatgcttttgataccgaaccgagtctaatagtgtatcaaataaaattcatggctcaaactatcgctttataatagtattgtataatactatttcctgtagaagcttacaatcttcaagattaatggtaaaacccagaaggtatgaccatgagagaaaagcagcagagcaaaacagaaaaaagaaagaaaaaagcttcactttcagtagagcgatgagctttaaattatttatacagggaaccttacaagaaatagttacacaactcattaaatcagctaaatgttataactaattaatttacagtaattataacaattaggcaaagattatgtgaaaactaattctttagttgttaatattacaataaaaatttttaatacaatgtat

SEQ ID NO: 193925 - DNA, 2329 bp, Cannabis indica
aaaaattacaactttttctactacacaactataaaaactactataaattattacttaatataagtatagctataccctatacctaaacaacgagtattttctagtactttttttcatttataccattagattaaatatataatatttgatcatttattagttttatttacattatttatttatttattttatgtttgctgcatgtgatttgtgtttctgattcaccttggtaatgtaagttgcctggagtcaaatatatgataattattttacctaaacttccaacaacatagtatattggtactaattaaaaataatatatacatatatacatataggcagttcaagctcaacacacttgttaggtggctcaccctcacctcaccatcccaaatactactagtagattttggtccaacatattaaatgtagaataaaatttttggtagtaaacccgtcaataaatggtcgttctagtaaattttttatttgtttcgatactatttttatagtcttattttttttatagtcacaattgcatgtaactatttaagaccttctgtaaatttttagaaaactctgaataatttacaatactgaaaaataaagtttaaataattatttacacatataggaaaaatagtcgtccgtgcaacaaaatatataaatcttattttttatattgtaaactacttaatttttaaaaaaaatttataaattgtttaaaataactacaaaatatgtgatcatgaacaaaaaaaaaactaaaaaactctagtgcaaaaacaaataaggttctaacaaaataccacttaagagtacatagatttaccctaaaatataatatatacacaccactatattctatgttaataataacaaatagtgttcaattaccaatatccaccaatttcctctttattattttatctctttcttataaagggagatagattataagattagactacacacaatgtcataaaggtaattaaagtaagagatagaaacatattaatataaaatgatgccacttgttctcaaggccattctcatatagaaatatgggagctacccttcaaaactatgacccataatgactttaatttctcacttggatttttgttgtgaaatactattatccatccctatctttttcatattgacaaccccacatttctctttgagtaatatttcccaacaatttgaagtggatatacttgatgtgacacatttttatttttttgtgacatttcatttaatatacatacataattgaaattaagagttatagagacaaactacaaagggtcaatcaatttctctagcttcaaaccaaatacaagatatgacccttttttaaggctatttaattaatagtaacatgacatgccatttttttctaatcaccctccttcttactcaacaatatacaatcaagttattgctaaattgatgatgtgtcctaaatttttctcaaatttgtgatttggtgagggtttatatctaaataaacaaacaaaaaaagaatctaaaataataaataatgatcacctaggtatgtgtatggctatgatgtttttgatccatatgattccaacaacaagattgtgtgtcattatatcttataaaaattatagatttagattacttgtattgttggtatgcttagaagaaatctactccttgactatgtcccacatagggatacctttcttgctcaattatctttcctccaatagaagagactttcttccttttattccactaatgtaaggtaagaaaattttgaatccattcccaagattccaactcttcccaatcaacaatctctattctctctaattctttacactatttaatggtgtagttttccacaatgaaattattctattttttaaaaagaaataattaaataaaaatctaatgaaagagcctagctcactcactcttagtcatttgactttattatacaccatttagaaatggcccaccatttaaaacaaataattattttgattgaataccaacaaaaactagtgtttgatattaaaaagatgatgggtgtgatattatgatcactctatgtttgatattaagttgttgtttgtttatataatacatctctcttccttccatacataaatttggcatccctttgtatatgtatttatacaaatatctaattttattgttgttcataataataattaacctagctaacaaattaataaccaaacattccttcaaataaaatttatttacattttcttaagtaaaccaattaacttaaaacacaatcaaagaacaaacattaatatagatatag

SEQ ID NO: 193926 - DNA, 2251 bp, Cannabis indica
  modified_base (2187)..(2187): a, c, t, g, unknown or other
ataatacatatctgaccgaccagtccttttagcatcaataaaaacacaccaccaagctccttttacttctgtcacagtttcccactaaatgtcctccaggagtttagcttcaaatttactgtgtctctgtgctcatgcaaacaatgtgtttgttaatatgccccacacacaatatataaatatatatacatataacaatattaaatattaaattgaaagtattcaaaataccgatgagactactacagccaaagtaattgcaaaccctagcttgttctcattacattttgtatatataggtacgacataatattacttcttcttgactctgtcctcttcctccataaaaaatctggtaataattattagctaaataaaaaccaaaccaatggccttattataattattactaaagcaaaagctatagctaagttcagactatttgacaagcaaataatacataaatatgtatatatatttatatgatagtactggccaaaatgaccttcaaataaaacaatgagtagaagaaacggcaccgtcttacactgcgggtaaaaccttcaactttggccgtagaaccttataaaaccacaaccatatatggtatgctatgccctggactcatctcattggcttttagtctttcactaaatctactcatacaattaactacatttttatatatataaaatatatctatctacatgtattgttgggtaggatcttttgtcaatgtagattttctgatcaaacttttcctcatttttttgccacaaaatggaaacgaaatctattgattagcttttttcttttttcattttcattttaatacaatcggtgaaaagaagtttattgatgatctcaaagctatatgcagagatcatcaataactatacccttactattttgtaaccgaaagaagttgaggtttaggttgaacgacataagttaaccaaaacaagtagtgtatgaaacgacataattcacatcataaccattgaatagtttttctttttaacaaattggttaggtataaatatctactatctatctctatctaggccaccagatatactactggttttaattcatatatatttgtttatttttataattaagggggtgaattgatatgatatgtatacatgagaacaaataattatagtactatttatatgcagctattcgcatagtacatgcactttgtctatattataaagacaaacaagtcttaaactaagaattttttctgtgtaccaacggaaaattattattagtgatgcgtgtttgtttggatcagaatttgactgtttcagttccctttatataaatactcaactggcaaatgcatttaaatctttggctctagtactatgtaccttctgttctctgctggtaaaatgaacttgctttaattattattggtattattatcagaatatatataatgagtatcatagctcaatggtatgtgaaatgtaatattataaagtacacaatgtaggttcgctcaccaccaacatatatataaatacaattaatgaagttatatatgaattaaattaatattataccccatgaaccaatatgcatgatttatatacacatatacctatatatgtggattagtatcgattgcaaattaaactattagggtgtgtatatatagcataaaaaaataataaaaaaaagactaacaaatattatgttctttgactcgatcttctttataattattcaatgtattgtgccagaaaactacgtatataataataataagacgtagaaacaaataataaaagaagaaaaactgatcaaagggtttgtttttgttttgttttttgctagtttaataggaaattttagtagttatatcagattgcagggtcaagggtagttctataaatgtatagtaagtggtgaccaaacatcccttaagacaatttttggagatacccctccaatgggatatatattaatttcaggctctagtttacaaaatgtataaatatatatatgcatatatatggccctttattaattctttacttatttaaacactcctagctactactactatacatatctctctttctataacaaatactcaaaactgccttattaacaaaaaaaaaaaaactcaaagactgcccatcactctcaattatcatcatcatcatattnttaaaatactttttacttctggtcagtctagtctcaccttaacttcacaactagtcatcgtttt

SEQ ID NO: 193927 - DNA, 1309 bp, Cannabis indica
ttaagctcatgattaatttttactgttataatcagatacatatagatagggtggtttccagaagtcaaagataataattattttctcactgttatattgccttttagtgatgttaaatatattgttttatataaatactatttggtttttattttttaatttggactattggtagggtactggtgctttaaaagacagggttgttgacctaattaactacgaatcatcaatgccaaattcatctatccgttaactatttttgaaacgatccataaataataaattataacagtttccagcccttctttaattatttgttgttttaatcatctttactgttctattgaattcgaattttgaattcttctctttctcaatgtataaattttgtttagactttagaggagtataaattttactgcaagaaaagaaaggaaagaagaattaaaagtgttgaaaagtaggggtcagagaaaagaagaaaaacaaaaaaagtagagccacaaccatgtggcctaccatgatatatatttatattgacattgagtactatatgagtattgaattgatgacctagctaagctaactactataaatatagttgttactaatcaataaacacaacaagccaaataattactatatcaccataatttattaattagtgtgtgtatatatatatatatatatagaatagcagaaactaataaatgcagactaattataacccataacacacattttgcgatttagttattaaccattaaagcattaacataaaaaaataacactattgcataattatgatttaataacatatgatatacgaaagctatttttctttaaatacaatttatatgcgtacgtacaattgaagtaaagtaatgatgatactgtggcttttcatcaattaataagtgttgtttttgataaattatttgaattgttaatttaggaccgggttgttcatctgtggcatatggtgcatctgaagaaatagggccatttagaataaataagaaagcctcaggactaaatctaaacaagttttcatggaacaccgtcgccaacctcttgttcttggaaactcccgccggtgttggcttttcttacaccaaccgctcctccgatctcttcgatactggagaccgccgcaccggtacgtaattaattaattaacatactattatttataaaagtatataatatgataatttgcgatgaaatttttttatgttttaatttttatgttaaatttgtgattatttttgtttttttgtgaatatcccataactttacttttttttat

SEQ ID NO: 193928 - DNA, 1097 bp, Cannabis indica
caattaaaaatttcaaaaaacctcaatttctcatagaattctacccaaatctttcataactctccaggacacttaaaaatattataaagaacataactcaatagaattttacattattaaaactcaccaaaaaaatctaccataaggtcgagcttgagcttgaaaactcaactcaaacttaaacccatctataaccatcaaaactaactgagagccgttcaactgaagcaaaaacaacaaaaatagacataaaaaccttacttttcttaaaaaatacaaaagagaaaagaacaaagaggttacctaggattgacactaaaatttctgctaaaaatccttgataaatctgaattaaaagagagaaattgaccattctctttgggaagtttctattttttttaatgataaaaaactaaggataatatgattatacgactttactcaactcaatacttaataaaaaataacttagtaattggcaacaatcccactttaaatcaattaatgaatatctagggcaaaatgacaatctcacccttgcttaaccatgaatttatttaaccacctagggataaaatggtcctaacccagaacccctaaaactcccaatattctaaatgtctaactatattgtcccactaattctaagatacaatactatatctaagtgactctataggccaaacgtcgcattccactattaccaagcataaaatatgaaaaatataaaattttatatataacataattaatacacctagaatttaaatatatctcaataattataaaataataatttaaaggccatttatgacaataagtcttaattatatgctaattctcaaaataaagttaagcagtcattacattagccgttggctttgtactgacataatatatatagatccccagcggagaaaaagccaaaacaccacaggagctcgagaaaccacgcataagcaccatattcaacgagaccattttcagccacaaacaccacatctgcaataatcacagtaagagagagtcaccgcgagaaataacatcaaagaaagagtgagaaggtaagagcacaaggggagagagagagagagaga

SEQ ID NO: 193929 - DNA, 2479 bp, Cannabis indica
aaaacacctcatttgcatgtgtgctagtttttaatttctttactagtaaatgggcttgcaagtgaagttgctattttaaacattcttttttgccccataaattatttttgagtttttgaaaactcgaaacatttaattataattatttctttaatatttatcaaaaataaaaacattcacaccaataaataagacaaaaatgaaactcctacattgttcaaaaaaaaaaaatagaaactccttatcatagaatttactattcattcatctttattctcgttgaaaaatgataattttaattttctcatttacatattagtgtatattacagttatttagtacttattgtcttactagctctttttttaaaaaaattgaaatttagaatgctaaaaataatgtttcaaaacataatatattttacccatgtataaaaaacagttttaaaataacctattttccattttggcgaaggtaaatttttaaaatttcttcaaatatttgtgtaatattgtaaatagctacatttgtacacaccaatgctgcgacacatataacataattaaaaacttataattaagagttatttttcatatcataaattaatcaaaagctatcacaatatagtatgtacctagctacaatgtataaaacaaataatagataaataattataatttttccttataccaaaaacaattgttcatatacatgagtaaatatgtatatatatatatatatttatatagaaagagagacattaccacacataacatatcgacatatacatatgatgtttgcgtgtataattggcattgggaaaagtatatttatgatgtaattaatggatcatattctgatgatgcagatgcacattgtgtacatgggtgaccgaccaaatggagaattctctgcttcatctcttcataccagtgtactacaagaagcccttggcaggttaatatattattgacataatgacattacacaatagtatataatatttaagcagcactaaagtagtgattatataccattaaggacgattcatatcttattcaacctatttacctatttattattgtaactcgtaaaagaaattcaacatacacaatgactatatatattccttataattaagctcacatgattacatggtgatgtaatatttgcatatacagcgatgcatccgatgccttggtccatagttaccacaaaagcttcaacggatttgccgcaaaacttacaaaggatgaggtgcaaaaacttgctggtgggttttaattgtatactaattatacaataacgaaactttgcatgtacaattctacatatatttatttaatatgatataaatattattacaataattttacagagatggaaggagtagtatcagtgtttccaagtggaaagaaacagctccacactacaaggtcgtgggacttcatgggattctccaaacaagtccaaagagcagaactagaaagcgatatcatcatcggtatgctcgatactggaatttggcctgagtcagaaagtttcaacgacgaaggatttggtcccccacctcataaatggaaaggcttttgccaagagtcatccaatttcagttgtaacaagtaattggtcctttatattattaaacataaggctactatataagaattagaattttatgtaagctaatgtttggttctaaatagcaaaattattggagctcgatactaccggagtgacggcatcttcggagagaaggatatcatatctccaagggactcaaatggccatggttctcacacttcctcgaccgctgccggggcctcggtaagagacgcaagcctatttgggcttgggtccggcacagcgcgaggaggagtaccttccgcgcgcatcgctgtctacaagatatgttggttcgatggctgtttcgatgctgatattctcgccgcttttgatgatgccattgcagacggagttgacatcatctctctttcggttggtggctctacttcgtttgattacttcaatgattcaatcgccattggagctttccattccatgaagaatggaatactcacctcgaattctgccggtaactctggccctggacccgccacgatcaccaacctttcgccatggtcgctttctgtggctgctagcactattgataggaagtttttgacccaagtgaaattgggcaatggagaagtgtatgaggtcaaaattacaattaattaatatatatgtatattaactcttcttactaatgatattactcttttaacattttgctaacttggtgaggtatatatgtttactattttacagggtatctctgtaaacacctttaatcttgacgaaaaattctttcctgttattcatggtggacatgccccaaataaaagaggaggttttacttcggacgaatctaggtaaatttagttggtaatatcattggataattcaatataataaa

SEQ ID NO: 193930 - DNA, 2134 bp, Cannabis indica
aaaaaaaaagaaaagaagaaatcgaatcttttgatcacaaaatagcttgccgattaaaaaaatccctttaagaaaaaccagagtggcagagtgtaacataatggttttaagtgtaaggttggttaagtcttcaaaaaaatctttcataacatttgagatagcacaaataggtaatgaggttagaacaagtatttggtaagtcctaaggatcaaagtaattatagatgattgttcaatatacagaaagactcaacattaagcatcaaaatggacagaggccagaagcaaggctggaagatctgtgattgaaaagaaaagacatccagctcattgatggctactgctattcacatcatgctccatttcttctgcatcctcgaaccgctgatcgttgatctgaagctgcaattttacagaaagccgatcaacgccaatacttttattactaataaaataccctttcttcttcagaaaaatgaaattacaggtatatgaagctgcattggacatgctaaaacaacagtttcaactggcatatccagacattcaagtttcacatgtggaataacagttgagattttcaaacaattgccgaatattttgccaaattgtatattatatcaccaagttcttaaaagacaattaattaaagcaaaaactattaacgtaagtaattaatgatccagcccaaggccccaagctaccttactagcctcagctacggaattcgtaattttgcgctttataccaaatattttaataatgttttttttttcttcttcttgagttcagcaaatatttcattattgtgacataggaactcagatataaaatggctattgagccttctccactgaaatacaatctcagagaaatatgagggaagtgaaagatagaagggaaaattcaaggatcccttaagcccgaatgaattcaaaagaactcccaaagctacagaataattccacaccctactaacccttttctttctctatttatgcccctcaactcactagaacatacctaataattccatactccatgtcctaacattttttttcgagcaatgaactcctgtcctaacatattggttaccatttaaatcttaaaaattggtccgtggctcctatcgaaataccaagaaaccaatttaaagccttttccaaaattaatgcatcaaaagaaaactaaaaagtagtaagcatacctcaagcaccgaacgtgctaggtcatggtccccattagaatgaccaattgtgtttgtcagattttgagatgtaaaccaatcaggatcttctatttctggaaatatcaaattcacactattattattcacaataacatacgtatggctcgagggagaataatacacaagcatatggaatggaacattcacacatataagtgtatacaaattgcttaaatcctagatgattacccgcaacatcgtttccaagctggtctgcactgaagatccaattatggtcttcttcttctcctcctaaataaaagatatgcaaaaatttagtattgagttaagaaaacaaaaaccatatgattcagcatttctacaaaatatgctacaaaaccttcttgtgagtaatgagttgtgataaaaaaaaagtgctcttaccttctatgggttctggattaagctctgcacactcacagaatatctcaaacagctggtccactaagacagaaatccacttgttagctaaagaaaatacactagagaccaatgatgaaataagtatttacacaaacacacaagttgagagacagagagagagggaccatacattggttggggtctgaagggataagtctcatctctgtaatcttggataaatctaagatatcagtactttctgaatcagagtcctcagattcctcttcatcagttcctgtttcaatctttggcaaagtaaaaaaaaaacaaaagaacaaagaaaaaataaatgaaattgaaagagaagatcgacctaatatctgctgtatcaaaataatacaactttcatataagttgatggtatcacacaatcaattaatgagcaaactggcactaccaaaatgagcagcacataaatatatacttgtatatacctttaaaattatgataacaaaccaaaaa

SEQ ID NO: 193931 - DNA, 1025 bp, Cannabis indica
ccgccactgtctgcagcagggtataagtgtaagactattacttcactataaagtatcgcctgaatctgataatgattttctaaacggaagtgaataaaactccattgaaacaaaataataatgcatcaagcacgcacaaattatagaatgggaaggagaaaaaaaaaacaaaaatcccttttataaaaaaatttgaacgcattaattagaaggagaacacttaccagaaggagcagatcagtgtgtcattggctggcacatggcatggcagtgatgccacttcgacggagaagttagggtaggtagggttgccttcgaaattatcctccagtaattaattagtgtttgtgtttagaatataatgttgtcgtttcattttgaagaaagtaaaaattgataacatgaaaggggcattccgagaatcgaacttgggacctctcgcacccaaagcgagaatcataccccataattctagtcgtttcagatcaggctattactaatagtttttaattttgatcatctggggaccacgtctcgtggagttgaatgattcccccttactgatgaagcataacagagataatgtgacaatcattgagccacgctgtttgtttgggaatggaagcaatacagctagcctttggttaattaagagctgtcatttgatacacaaatgggtatggggtcttcttactttctttttttttctttttaattccaaaaagtcttccttcttcaattatccttttccaaaagaaaatatcatttcaaacataaaaatgcatttgatggatggtccataacctttcagtatttatttacctcccccatttttgttttcaactgcaacatgtgttttctagtttctattactattgtcctgattgactttggacttgagcatggtttattataggccatgctttttgaataagaagagctaagaatgtgaccactgtttgaaaccgttctcgtgcatgtatgtcacgtattttcacttcttgtattgtatatacttgagaatt

SEQ ID NO: 193932 - DNA, 1696 bp, Cannabis indica
aaagtgttaccaaacgacacttagtgcttaaacttattttgactttttgattctattgttttcaactttatcccttgtttcccaatatactgtggctgattgtttggctaagtgggcgaggttgaacggggtttgttttgctggctgtttaagggaagtgacttcctttgtgcttactactttcgcttaatttgttttaataaagagggttgttcataatatatatacacgctgacaaagtttatttagagaaaaaaactcaaaaatattatcaaaagttaacaacacactaaagccatctccaatgtatgagctaaaaaatgtgctaaatttaacataaaaaattaataaatgttgtatttaacacattttttacaattatgttacaaatgtataattacaaattaatatgtaaattgacctagaaagtaattatcattaataataattaataaattaaatatatgttttttaaaaaataatgataatattgtaattagaaaaatgtattaaagtaacttattaatgctaaatgcaataatgtaaataataataataaaaaaattatattaactgtgcgtcaaatttaacataatattatatctttgtgttaaatttggcataacgctaaatttagcataagttttagcacactattagaaaataaatttttataaaaatagcaaaatataacacattacaccatttacttgacactccattaagatgctctaattaaagagttttatatatataggcaaagtcaaatacaagatgttgttacaagaaaactaattagaaaaagtaattaggtaaaaacttaaactaaaacagttacaacaactctctaattaactattaacagaagcaaatactgttaggttaggtcgttgatatcatgataccataaaaataaataacatatatatttatgggagctattgaacaatggggaaagtacgtaattactagctggaagaaatgtcctatacacgtattaagaaaaaaaaaatctaaactcatgcaaattaccattaaagtgagagagcaaattaaccaatcatcatttcaagcatggaataaagatagggcaatagatgatgatgattcgcgatttcttaaaaaagaaattcaataagccactttaatttacagcctaaagaaaacggagccaaatcttctgtcctaattttctctgtcttcctattcgaatccaattaaaatactccacctcaattaaatgtatatttatacatttttctttctaaaataaagaaagagagttaatatatttaaggactattttattttattgttgataataatttattgtcatgtgactattttaaaaagaaaataataaagacatttgaataaatcaaattttaccctaatatattgttaataatattaacgtaagttgtaatactaatacatttaaaagaataatatattattaatattaatatttaaaaaatattaaagataaacacaagtctaattcttttaagaaaaaaaagaagaattgttgataaaaaaaatacttaaataaaggagacagtagaaaagaaattaggttttttttttttttatttttttttattttatattatataaatttattatttttattatattatattattattattatttactaagaattactactactctgtctactgtctattacttc

SEQ ID NO: 193933 - DNA, 768 bp, Cannabis indica
tcctacgatggagtcagagtgtcaatcattaacttttttcgatccatatattttggacaagtcatacgtattcaagtctctccactttataaacacacaccctgccctagattcgcgataagtttccacatttccaccgggctccacacaccacactataacatattaaaaataaataataacatatttatgatttatgattttctttttctttattattatttcaatcactaaatattattatataggaaaaagttaaatgtcaccggtggtgtcactcgacaaaaaataatattttaaaatagtatacggaaattctataatagacccctcaaaaaggggcacactgaaatggacaattttatgctctgtgattggtttagagtaatttttgtgggactagatatggtggattcacacgcataggattacaatctttggggaaaggggtgcatcagtgtatcctaattagttaatgaatagtttaatttttttttttttcagcaagtgaaactaaagatatatcagatctggagggattttctttgttttagggtaatagtttgaaacaatggtaatagttttgaacatattttataaatttgattaggtttttttgttttgtaaattgatgtttatggattaagtcaatctgagttgaacccagttcatccttgttttcctcttggtgcgaacgccggtgcaacattctccctcctagtgcgtgaggtgttccctctctctttcttaataaagtctataagtatt

SEQ ID NO: 193934 - DNA, 4426 bp, Cannabis indica
aaatatatttttataattttaaagctttataagcatgcttttataaataaaaactttagactaaaaaattataaattaaatatatttaaaaaaatacttgtgaaaatttctcttaaattaacaagattattgctatgattatatatatcatcataaatataagatataatcgatgatacgtatgtaatttgttttcacttaattaatatttgtttactgagtttttaataaactgattagaaaataaatagagcataagatataacaaaatgaagaaaaaaatatcaagatttttacgtaattggaacgttaatgagttttagtctataagaaaatttaattagcttgaaaagtttagatgtattacacacaagtataatgttcttgtctcagcttaagaaccttaatttcagtcttagcatctaaaaaataatttttcaaccatttgcatgaagatatatgtaacaccctactaatttaagcgtgttatcatgatttctaatactgtatacttctttgctaatctaagaatttatgaaaaaatatgaataaattaaattttcataattaaattttaaacatgatatataaatactttacataatttgggatcctgtatttttaaaattacaaccattttacaaaatacttaataacaaaagttgtcgcctggcgactattataataagacctgctatcacgaagatcgagcactcaggtctaattgccttgatatgtacattcttcatccgctcgtgctcactgttgttcagccttagctttgcttttacctacacagataaaaaatatctgtgagtcgataaactgagtaagaaaagcataatcataacataaatataatctggattatgactaggcgtctatacacccaattacaatcctatcccgtgtcccacacatactgagtctagaatattcgtacaacatagcctagcatatatatgtcgatatctcagtgcatctctatgtacacttcactaatatcctaatatgctaatctaatagctactgatatgcctaacatatatctgttggtatctcggtccaactctatgtacacctcactaatactctaatatgttattccaatggcaactgatatgcatgctaaatatgtattcatatatgtaattattatactagtcttacattgattttgaattcaggtataccgctcaacctgagtagaaactgctgctccacgatttacatgtccctaagtcacaacatatgtcaaactaataagtgataggctaaataatttttcagaaatttagactcaaaactaaaagttttcctatcgatagatagcatggcaatactctaaaaatccattaaacaccaaaactaaggctcttaaaattgctaatactggtaaactggattcccgaaatggtaaactgttttttgagtcctacctgggaaactgattaatcgtttctctacaaaaattccaaataatttcaaatcttgctcaaaacatcattaattcacacccaactctccaaaacacctaataatgacataataaacataacccaacaagtatttgtaagaaaaaccacctaaacttgtaattaccattagtgacctaagtttgagcttaagagctcaaattttggtctttctccacaagagcaactaaaagcagcaataagcaacctaaatatcttttaaacaacctcagaaaataatttaaaacatcatcaaaccaaacaacaacccaaatccaataatattcataaagactagatattctactttaaatttcaaaggaagaaaggaagagaagcttagcttgagctaaccctcacttaatctaccaaaaccctagttgaatttctttgattttgatcttaaaataggaggaaaattctagtttttccttgggcttctacttggccgaacacaagagggaaagagaaagagttggtgaattgtgtttttcttaatttttcattaatctttagataattaaaacatgattatcaattcaccttatatttatcaataataagcttaaaaaaaaagcaattaaattctacttaaactatatgaaataatttaacataaataacaatttcacctttgcttactcaataagtaactcaaatattctagggtaaaataatctaaaaccaaaattgtaaatattcccggctaatttagcctgctaatactaaagaaataaaccataaataaattattatataggccaaacatcgcattccactattaccgagcataaaatataaaaaaacttaaaatttcacatatatcataattaatacacctagaattcaaatatatctccataattgtaaaaataataatttagagcctacttctaaaaataagccctaattatctactaatttttaaaataaaactaagtggtcattacaattaatagcccccgttaaaaggatttcatcctcaaaatctaacttgaacaactccagttattgagccctcatatcggactccaacttctaggtgggttcctccactttattatttcttcagagcacttttaccaaagctattgtcttatttcaaagaacattatcctttctgttaagaatcaacactggttgctccttatatgaaaaatctagttggagctctaagctttcataagtcaacacgtgtgggatttgagatgtattttcgtagcatagagacatgaaatacgttatgaactactggcaatgctagagacaaggctagacgatatgcaactaaccaaccttctcgagaatcttaaaaggccctatgaatctagatcataacttgccctttctctcgaagcgtttaatccctttcactagagatactcgttgaaatacatgatcccctacttaaaattctatatttatgaatttggatctgcataacttttcggcctactctgagaggcaatcattctggccttaagcttctctattgcctcattagtctgttgaactgattctagacctaagtatcttgtttctctaattttatctcagtgaattggagatctacatttcctgccatacaacatcttatagggagccatccttattatactctagtagctattattgtatgaaaactctatcagtggcaaatacttgctctaggagccttcaaaattcattacacaagctcgtaacatatcttccaatatgtgaattattctcttggactgaccatctgtctggggttggaaagctaaactgaacttcagctttgtacgcatggctcgttgtagactttcctcaaactttgaagtgaactttggattcctatccgacacagtggactttggagccccatgtaattgtactatttcctgtacataaagttttgcatattgatccactgtgtatgttatttttactggaagaaatgtgttgaccttgtaaatagatctagaattacccatatagaatcaaacatacccgtggttctaggtaatccaactacaaaatatatggtgacgtcctcccattttcacttaagaagagtcaaaggctgtaataatcgtacaagtctttggtgttcagccttaatctattgacaagtcaagcactgagatacgtattctagctaccacatccttcttcttactacactgccagtaaaagggtttcaaatctgtatacatcttggtggtgccgggatgcaataaatagggagtggtatgagcttcatcgagaatctctttcctaagttccaaactacccgggacataaacctgggttttaaaaagcaatatacttctttctaataatgagaaatctttagctttcctagctaagtcttcttctcggatcttcattaattctggatctaccaactaagtatttcttactctgtctaataaatctaattacagtgtcaagttattaagtttacgcactacaaactcaatacttgatttaaccatgtcatttccctaccatgaagatatcataatcgtgttgaatatctgcaacagacctttcctactcaaggtatcctccactacatttgtaatatcccaataagcctaatggtaaataattagggtttatatttatattataggataattaagtaataagtgtgattatgatcctactaatatatttcaacataaattttaaatctactataagtggaaaaataagtataagttattaattacagagatttatatagcaagtgtgaatataatgtgagctatttgtggaataaaaatattttcaagtttggcgtccttggagactcgatcaagggctaaaaatgtcatcacaagtttaatgaatagatttgacggaaatattatgataagttgatagtttaattattgggttgattagaagtatatgagatttaacctagtgccattgaagtagagatttcttaatagctaaga

SEQ ID NO: 193935 - DNA, 620 bp, Cannabis indica
aatggtggttctctttttggttaaattttcgttgtaggttgtgttggattgttgctaggttgcccgatagttatccaggaagtatgtatgtgtgtaatgtttgtataattttttttatttgggttgtatatctatttatttggcaactaaaaatatttttataatattattaattttttctttttgattaaaactgaataaagctttataaattttagacaggggtatcttcttcttcatcattcaattatgaggccatataacaagattaccacatataaatacagttgccatatttccatttttaattggctagtcttaccacagcccgcctttatattttccaccacctaccaagttaaaagaaataaaaaaaaaaaaaaagctgcccaagaaagttgaaaacagaaaatatatatattgatctaatatattttaattattacatataatatacactgtaatgttatccaatcctataagcaagttccaggaaattaaggaaaatacaaaataaaaatggaagacgtgaagtgagatgagagatacagatgtaacaatatatctaaatacatgtgaatatatatatatttttaaagagtaattataataaagtgtat

SEQ ID NO: 193936 - DNA, 1174 bp, Cannabis indica
acacagaccctcaggaaagccaggaaggcaaaaagccattccaaacatactcgctatctagtcctaaaccagcccttgcacaattatgagcaagcttgttgaactctcgtggaacaaaagacattgcaagggcaggactaaacgataacaagtgtctaatatgcgagacaagatcactaataactgaaaaatacaatatgaactgttaactttatcaaccaaactcttacaatcaaactcaataacactaacaggaagattaacagctttggcccattctaaagccagaagaagagccttcgcttctgcaatttcaggcaaccacctgatcatgatcattgcgaactaccactcccaaactatgcttcttcatcttagtatcaagagcagcattagtattaattttgtaacaacatggtgcaacaggcaaacgttggttgcttatgggctgctacatgtgccgcttggtatccactttaagatttgcaaactactcctgcaagtaagtgactgtatgatcatatataaacattggaggcaaacattttttatgatgaaaatagttattcctctgagtccacaacatccaaaggaaacataagaaagtattcaacattggcttatcaaaaagtccaaaggccgtagaaatgaaatcactgatgtgcagagacctgttatcttcataaaaactataaaagaaagaatttatccagccagctttagttctagaacattcaagaaaagtacgtgttaccgtttctggtgcagtcgctatattataatagagctacatcaatactaaaaaaaaatatattttgtcccattcattttataaatttaaagttgtattaattttattaatattttgttaaattatagaatcagttaataaaagatttataatatcttaataaaattattataataggagagtaaattatggaattcttatttaaattcgaaacgttaaagttttataaattatatgattctattatatattttttttaaacggtattatgctatattattttttaaatggtatagtaatttttttattgctattagatatgtattgtcacgtttttaattaattaatttaagtatatactatcatatacttctacagtttaatttaagattacgattaccaattacaaatataaaatactaa

SEQ ID NO: 193937 - DNA, 2940 bp, Cannabis indica
aaagaaggagaatgaactactagatgggcactaaaaagtaaaaaagatacaccaccttctttttctcctcttcatgttttttcctttcatgttcaattaatgcttcgcgcttgtttatttctttgctccaacaatcaagtttctttttcattctatccaactcattactcattttatctttttcatccaaaactctttggcattgaagacgtgcaaaatcctgcaacctcttttttctgatcaagtacaaaaagttatatttcaagattacactattaaactccagctaagcccaatgaaaccataacttagaaaaaaatatatattattatgaccacctattttggcatgtcacacacatatatatatatatgtatggtgatttgttaaatatctatatgatgttatgcaagtatgtaaaaaagacatatctaaacaaatatatgttactaaaattgaaacaagaactgtgaatatcagatagctataaacattcagaatgagattaaaccttttaaaaaatcttgctcagccttcttcatctcatcaattcccctacttaaagacaaggttgcttcattgtacttgtattgtagttcaaccagttcctcagttaacaaatcattttctttactttgttgtgccacacctagaccattcattttctttacagttgcttcattaacaatgtcagacacagttctcagctctccattcttgcgaagatactcccctatcggcccttcagagttataatcatccgcacgagcacaccagccatagatattcgagccacgatgcatctccaaagcatttatccaatgtcgtttactgaaaccatctttctcaaactttctctcgaattcattcacgtaattaaaaccaatccagtcattgttgaactctataataacctctgcagtagggttcttcccattccaaaaaatttgagctttaaatggtctatatatggcaaactttgccaaccaataatcagaatcaaggagggttaattcacccttaccctgacaaacaatgttaacaataatgccagtccaaggccacgcatacagttcagcttctttttcgtgttcttgaactgacattgaaataccaacttgttcaataagatcttcttcatctgttagttcatcctgcaaataatatgctaaggaaagatggtttgccctttctattgtacctctattagatgaaattttggcaactccagaggcatgctgtagaagatctttaaacttgttgaatggcttcttcttattcccagcacaaaaggggcacttaaaagtaccattcccaaactttattttgtactttcctgctctcaatgcttatatggtttctcaacaaagtcattgatgttaatatcagactcatcatacgacctataatccatctgagttagcaattgttttcatcagtaaaatgaatacacttcagcaagacaagacaaaaaataaaaccacttagcatttaatcaaacaatcatctaaacattctaacatcgtcttcagtaaatgacacaatacatttcaccacaagctttgtgttttagggacaagatcactttcacaagtttcagactttgtgcataaattaaaatgtggttttttttttcttaacatgcaatcatcaactgagttagcataaaaatacaatctttagctttgagattctttaaattcctcttaaacatcatcctttacattcaaaatcaaaatttgcaggaaacaaaagttcacaaaactaaaaaatcacaacttacgtcaaaaattacagcagtattacagacagagagagagactgattgagaagaaaaagaagaaagataaacccttttcaagattaagaagtgctaacacttttacataagctactttacatcttgacacgtgtaaaattacactcaaataaaaaaaatgcccaactataaaacaatgtggttttataaaattttaaaataatttacgaagtagtgttcaaaaagtattttacagaagtacaaaataaaatagttactcgagaaaaaataaaaaattattttagataccaaatagggctgcattgttgaagcagttggcaaaatggcttatttttaagtgattttttattctaacagaaaaaataaccccaaaaaagcaaacgattagtactaaacttggcaaaatctgagatatgaagtaatggaaaactaaatatacatcaaaatttgagaaattgaattaagatctgaaacagaattctttctatgaaataaagctacatcatcatgaaaatgtattagctgcattttctcaaaagaagaattgcagaggggagaagatcaaccccatctaatctaaaatcaaatgaaattgtgttgtttggcgaaaacaagacccgaaatgatagcagaaattgcaaaagtaaaagggtcggagattacctggtggaagaaataagaagttgttaattaatggcatcgacggcggcgttgcccagttccggcgtttgaatggtgagataaggaggagaccaaactaagcccgtgagaagccccaaactactgttatgttttttttttttttaaggatctatttttttttttttaatttttaattttaggtaaatcacactttagaaatgtttgcttctttttctttgtttttttaagttatttttattggtagcactctaaatacatagtttttttgtgattggttagtgaatttttaaaatttattacattaaataataaattatataaaattcgatttagtatcaataactacacataagatgtgttagacatcgctggtatattttagtcatttttttttttattcacactttaaagttacgaaaaaactaactagactgatatatttttattttatttttgttattcgtaaataattttttaaatttaaatttttttttaaa

SEQ ID NO: 193938 - DNA, 2467 bp, Cannabis indica
ttttgccgcaaattactcaatagtttataatgcataaaataaaatttaaataacttcttactgcgagtataagaaaaatacatgtgtgtaacaaaatatgtaaatcttatttacaccattataaatattaacgtatattttcgttaattaatacgtaaacctttttataattaatatattcaaaaattagtgaacaataataataataaaagtaacaagaagaattttaacatagttttgaaattaatttttcataattcacaagaccattttattttaggattaataaattgtatacaaaatataatgaaagactgttataatactcttttttttttcatattggtcatcctttgttcattagattttgtctttatttataagagtttagggtgatagttcacttgttaccgttcgtgaaacgtggactccgtattttacatttacatcacataagataatgacaaataacttctcataactgctcatttaattaactttatctataagcagttatactaactatgtttttccactaggtgacctggaatttgagatcatggctcctaaagctcacaaatctaaaatgcctcagaatcccactgttacattcgaggctgaattaatcgagtccaaagtcagatcgaattctccatacataggtgatgttctaaggtcatgtgacattaagaatgaaaaaagatgtattcgctcagtcgcgcttagcaaatttagttatcttcctttaaaacgcaacttgatagacgaaggctaaagcaccagtggatcttcaagaataggtgcttggagtattgaacacattagggaagaactaggagaactagtttgttttcatcaacattgccatctttttaagaacacaacaaccaggtcgtttctttctttattgtcgtttactcataaactacttgtgtaaagtgaaaacgacatgattaacaacagaatattttatcctcaaaaaaaaaagtcaaaccttttgtgcttttctctatattattatccaaaaaaccaggaaaatatccatcgctatatatatcatagttataaaataatatatatatatatatatatatatataaaaataaaatgaataaaacatgttcaagtcaaaaaagttgtaatctcagctgacaatgaagtcatcatcaacaaaaaccatattatatagaaactagtctcattgtattggtgctggtgaaatcaacttgattaatttacagataataactgataaaatagaaccatctaaatccaaacttataacaaacccatcatcatcatcataacttgctaaaaatacaaacttgaacttctccattaacagcatagctcacaacaacttcaccacctttttgggtctagtcaaccactcccccccatgtgtaccaaaatctcttactataaaaacaaacagagaaatagaaacttaactcaccaacacaaactcaaagcattcctagtttttctacaaaccaaaaacacacaaagctttaagataaaacaaaaccgaaaagatgttgaaatcacaatcagtcattactttactcttcttgacactaatttctgtttacaatccgattcttcttgtggctgcagttgttcctgttggagaaggagaaccggttcttgaaatgtatatgcatgacattttggggggtagtaacccgacagcaaggccggtcacaggactgctaggcaacatctacagcagtcaagtcccttttgcaaagccaatcgggtttaaaaccccagacgatgcagtggctctccccaatgccaatggtgctatgcctactgtcaatggtgtcactggccttcctctcggaacagggttggctggaacagctttcgcgggaaatgttaacaaccaaaacacaaacaacttacagagtcaattggctgctgatggtttgggacttgggttcgggacaatcactgttattgatgatatactcactacaactcctgagttgggatcccaacaacttggaaaggctcagggtgtttatgtcgccagctctgcagatgggtcgaaacagcttatggctttcactgccttaatggaaggaggagagttcaatgataaccttaactttttcggtgtttatactattggtactactttgtcacagttgtcagtaactggtgggactggtaagtttaagaatgcttatgggattgctgagctcagacctctcatacctcctggccaaatctccacagatggagctgaaactctgctgagaattacagttcatctcaagtactgaatagtgaaaactttgtagtcaagtgagagagattcttctttgtttgtttggtttgtgtagatgtgaatggagaaggttgatcagtgtgttctatggatgattgtatttgttagagagtccagtcagtgtgtctctctcagtcttgtattcctatctttaagtatttttatagtgtt

SEQ ID NO: 193939 - DNA, 1101 bp, Cannabis indica
cttctttttctttttatggtttcaagtgtttgaaattggttttgctttaggttgactgtgatggatggaacttggatattcactttttgcagcattgcaggcagcaaaagagaatttttgtttttttggtctgttatccatgaaggcactcattcttgttggagggtttgggacccggttgcggccattaactctcagtgtaccaaagccactggttgattttgccaacaagcccatgatattgcatcaggttttactttaaattatgtattttcctctcgttttttttggttggggggtgttagattatggcagtgttgtagttactttcaaagtagggggggaccgatctttagctaacgttgtttcttatccaaattatatgcggttatgttgaaaagtctgtgtctttataataatggagtcattcaatttacaaatatgagacacattttctttgtcgtctcctttttataaatatgagatgcgagtgtgtgatgcaggggtcaattgctgatgtttgcttgcttgtattcacttcccttgtgacacataaactcatttatcatctttctgaatttgtgtaacaagattgaagctctcaaagctattggagtaactgaagttgttctggccatcaattatcaaccagaggtacaatgagcaaaatagatatagaattagttttttctgctacaattatggatgcttatgaaggataaatatacattctttttacactgttgtttcaggttatgcttaattttttgaaagattttgagaaaaagctcgatatcaggattacttgctcacaagaaactgaaccacttggcacagctggtccgttggctcttgccagggataaattgatagataactctggagagcccttctttgtccttaacagtgatgtaattagcgagtacccgttaaaagaaatgatcgaattccacaagagtcacggaggagaggcttccattatggtaaccaaggtaatttaaatccaacttacatgctataagttattgacataaagcatattgactcctactgaagggaaaaattaccattttgtcttaggtagatgaaccatccaagtat

SEQ ID NO: 193940 - DNA, 2509 bp, Cannabis indica
agtcaactaaaaattgtaatttttgtgactaagttttaaccacggactttttagtcacaacaatataggaatgatgaattataattagtcacaatttattttacttttagtcacaagttttatacaagataaatccaactttatatgttttcaatagaaagccaatttgcatacatgtataaacacaaaagaaatttttaagtgatcaccatatcaaaataacccatatcataataatcaatgaattgtcaacttttccaatcaaaataaaattgcacggaataaaacaaataaatcattcatgaaataaaatcattagttcttaaacatggctcttgataccacatgtaagctttgcacatttatatattcttaattatgcatgcaaatcaaaacttccttctgaataaatcttaatagctaggcaagatcttgatcaaaatgtgtgaagatcaatcttagcagagaaagaacaaagagaacaaaaagaagaagaaattttatattgattgtcttaagtggtaaggattacgtacagagatggtttatatataagtaacagctataagaagtagctaaccaactctataaccgaacataacaaacaataactaacttcaaactataccatgaggacaagtgtccttgacaaaatgaatttcacattccacataatagattaagaaagcatacattgatccatagcaatagacattgatttgtatgaaagaaatctaaaaattgtatttctcccttttgagcgcattagattgacaagctttttttgatggagaagaaaacttttaggtgggtaaagagagagagagagagccaattcctattagggattttcttttcattatatagaccttctatcaatgtcataataggatatatatgtactttttttattaaaccagtaatatttattctcttattttagtaattcacctggctcgtttaattatattgaactttaaatgttgattaacatgggtccaacatatatgtgtatgtgtttgtttatatacgtgtatgagtgtgtatatacggtacgtgcatgattgtcatacattagtgagatttgtgatctttgatgaaaataaactatttatttcacaagtataaattttttaatatatgtgactatatatatttacactaattacgtacttttgctgcgtaaaactctgtctaataatataatttgccctaactaccatacattatgcatgttgcacccatcctataattcaaattgaatttcatacacccatcattccatcccgccaatggctgtcactcgatctctacactacatattatattaacttttaaaaactgttttcagttttaaaaaattaaaaatgtgttttatacgtcaattagtttttttttttaattttataaaatcgtaccaaacataacgtttatttaattagtaaatcttatcacgagttataacttacttgttcttaagtgtaagccaattagttagttggtaggtataatacgtataacgacttaatttacatgctttttgcatatagtaaattttttaagttagacttatttggaagaaaaatttcatgcacttcttgtttccttttcaatcttaatttttttaattaatgaaatttaattacacttgaaaaatcaggaaaaaaaaattatgtttaaatagtttatgattttttttttgcaaggtgattatcttatcttttatctaaaaccaataaaaaatctaaagcatatatatatatatatcttataaatataaattatattaggtaaatgacacctaccattaaaaaaaaaatcacaatttcttctctcttacaaaaatttccaccacaaaatccacaaaaaaaaaaaaaatctattatgctacttttaaaaatgctcaccttatttcctaaaaaagtcactaaaacattctaaaaagtacaaataataaatatatccctattctttacaaaaaaaaaataaataaataaatatatccctatccttccttggtgtccagtactgtccagaatataataaacatattcatactttaccctaaataaaaaagttttttatggaataaacgaatttcaaaatcaatacaagagaataattttatttatttaaaaaaaaataatattctttctcaactagcatgattaaatatgaatagagaataaacctcatccaatccgacggccaacaagaatagatgaagtttgactctgtagatttagtatatctcttttatttatttttttttaaaacgaaataaaataaaaaaaataattggtaatgtaagtaaataataagtatattcgatagtccactaaagaggttaagtggtgggaatgggtcaatggaagtgatttctgctttagacaaggactcaaccaaaccgccactactacacaatccgcaactgataacagactccacgtgtcactcctgcttaactcaaaacttgttttacttaaactcacttttttttttttttttt

SEQ ID NO: 193941 - DNA, 1616 bp, Cannabis indica
gtaagaactagcaattactggcgttttctttggtaaagtgaataaccaacaagagcagacatcaggaacgtccaaagtacctggcacacaatgttaaatcatatgcttaattaacattacaaggttcggtaaacactagtcttaaaaataaaaatataagtattgacagtaccgtatttatcgtatgccagcgttcaagccttctaatccttgattgcatgtcatcaataaccccttccagtggagatatctctcgacttggtgaagattcggaagctgaacaacttccctgtttgttccattgtatgaattattccaaagctttaaataaagcagtaacttaaggtttatgtaaaaataggaagcaatttcaacataattttagataggtgcctaattggcttgcatccctaatttctcctttaggatgccaactactaattttgagttctagctctaggaaaatgtagtatcaatgtgatattacatgcccagccaaatccaatcagacaatactatttagagatttcgttcttgttcgggaagaaaaaccattacctctcgtgtactatttttttcctaaattccccacatgtacttagtatgcattaagatataacaatgcagagtagatattgacatcataaccatttaaatctagaaatggtaatgaaaggaatacctgcgaatgaatatattccacaagttcgtgcaaccttgcagcttgatgagtgtgaataccagcagaactcctctctattgctggtaatctttccaggactatttcaagataactctaaagcaaacaagtcaaaataacattacttcactgtagaagagaaagccctcagtagcacgttacataccatttcatgcaatatacagattattatatagagattagagagagtattatcaaaggtaaatgataacatagtccggggtcttggataaactcaaaaccctggcctactgatgaccaggtcccttactccctttcactcttaacaatggtatttaagaggttcataccaacacaaatataactgaaggcacaaagcattatagattataccataaaaaaaaaaaacagtgatatcaaggcaaaaccttagtggtatatgaaccatccaatttaagcattgaaccagcagctgccacagcctctttattaacccctttgatttgtaggtaaggaccaagggaatcttgcagatgatcaacctcaattaaaatctgaaacaagcactaaaagctcagccaaaaatttaataaaacagaacaaactcaaacatcaaaagttgaaataaagatacgttgatagctagcactgtacgcagaaatgtctcgtgtgaatagaagaatcataacatactaataaaacattcttgacataatggagcaagtttaacatcccaacaacaagacactttggaaatatacaattcatactgaaaaccagaaaaacatacttactagaacatctcaaacaatcaggtttaacttaagaagtcaaccatcataaaagtgtaaatagattgattgaaaggatagacaagggaaaaactcttttaactgggcaacttttacaaccaagaaagaagtggacttctggt

SEQ ID NO: 193942 - DNA, 1265 bp, Cannabis indica
aaaccggtcagggtcggagcttctcatacttaataaatctacggtcacacaactcctgttttctactggtaaaaattcttttcacttgccccattataccatttgatttcagtaatactatacatagaacccaccttttcatgaagttaaaacaaccaatttttctttcttgttacaggggtttggtgtcacctgttagggaaatatatatataaatatatatatacatttatatgtttgaagagatgtgaaagtgaaccagtatgttatattatcaatacaaggttcactagggaatcccttatggagatcttattccctttatctcatttttgctttctttcttctttaatagctctaacacatgtacttttgtatctaatacatcaaatcaatacatgtctaaagttaaggcaatcacacaaaataaccaagaaaatcacatgcatacaagtatctactatctcaggcctttctaaccacaataagcatcaaacaatggaaacaacttcatgcaaaaataatatatggttgcttgttgattctccatgcaagaaacaatccagtgataaataataacctaatagtaatataatatgcaaaattagaagatattaaatatgaggataggtagttagagaagaacttgccttgcacttgcttttgcttataatgttttgggagaccaagaatggttatggagtcccatgtaaatcaatcaagaaatatgtttttttattaaaaggtttttttgcaagtgagaaagaggaagattcttttgatatgctgaattagatacctttttcaaaaaaaagttaaggtagcttcatagtgatacctttggaatattcttgtgcttattagacacaaccgcaatatcattcaattacaagtgttattgcatcaataataatcgagtgattaataagtgataatagtgttatgtttagcattttataaaacaacaccctgtttttacgaaacaaataaattaaaaaggttttttttattttatattactacactttaaaataatttttaatatatatttttataaaattttacacagaaatcttaataacaactaatggagtaacttaaactgcaattaaaatacatatggtaatccacatagacactattgaatatactaccggagcaactcaaaactgtaaaatttgaaaaaaaaaaaaaaaaacgttaaataccaatccaatattattataaatctaattctcaaagtggtgcatattaactgtcatgag

SEQ ID NO: 193943 - DNA, 1406 bp, Cannabis indica
taaataacttgaaacttaatgtttgatcatgacttatgatgcaatgtatataaatatacgtaccaaaaaagccatatctatatagttattagtactactctactgtaccagatttgatgtttcttttgagataatgtcaacatgaatattattatcatatcataacgaatccaataaagaacatcactattcactattctctaagcagctaaattaagtggaaagttggaatggtcaaaacaaaaggctttaatttacagaacgagtttaatgctttcatcaatttttttagcacatatacataaatagggtatcctagagttttctgggaggaaattgtgtggaatagcttgaaacatttgggcatcatttcaaatagtaactgtagttttgtgtgattcctatgatgaaattcttgagtagttatggtttaggtgattttagtgcctattgtcttattcacatcaaagtttggttgggttggaattctagagctgataatttgcttcaacttatgagaatgggtgaactaaaagcaagctgtccaagttcaagaaagtataccttattgaagagctagatatgttaattctaattagaagagaaatctatttttaagaatgtgaagggtatagtacaataaaaggattagctaattcattccttactaaaaactaaaactgtagatattgattgtagttttggttattgagtattagtttacgttgtttggagtgcttcttttattgtgagtccgtttttggtacttttccctttttgttttgcaattagttcttggggggttttaccctaattacttgtgtagttttggtatcaataaaaaaattacagaaatcctaaaattgtttatctatttacattacagtcaaaagagtattgttatttggtatcttaaggtggctaacactataatgatgtaatgtagtgtcttataattggttaataatttctcatatcatttattaaattagaatatgtgggatataatattgtaatacacaaataataatgtgtcactttttgtggtgtttgacattaacgtatttatctttttcttatttgtgcattagggcacagtaccatacataatattttaaacattattttttatgcagtaaatcatttaaattttttcaaaagaccgggagcaattgtaagaaaaagtgccaaaaacacaaaactaatacactttaatatttgttgaacacgaagcaaacaatgatactccgcttaatatactcatttgcaacattgtcatgttgtctttgtctagaagatgtgagaagaatatgtacacaagatatttaagaaaattctcaaatgggttcacaaaaaatatccaattgggaattttttagcaaatagttaactgttaagtgccaaat

SEQ ID NO: 193944 - DNA, 1654 bp, Cannabis indica
aaagaaagatatgggcttgttctaaatgggccacaaacaaacaggcccaatgatagatgggcttattccgtacacttttgccgtcgtctgagttcgccgttgccatttcttcaaaggtacagtctttagatatcacaagaagagggttttagccattaattagggtttatcgatttcagattgaatttcaaaggttgatgatgatgattaattgattatcataaattgagattccttcaattttctctaaacatgatcgaactaaacaataactgttcagtgttctctctctaaacacattttcaagctgagtttttttattgaacaagtttccattgtttctgcaaattgggatttttttatttttggttcaagtttctgtttttttgatatgggtttcaaattcgctttaacatttagtaaacattttttttttgttgcagatatctctaattaaacatcttgaggatttttggggaactctaactcttaccatttttgattaagtatgggttggaaagcagcagagaagcttattagacactggaaaattgtcaggggagataatgtaaacaaaaacacttgactgttagtgtcaattcttgttcttgtttgaactttaacatggattaaaggaaaagaaatggttctgaattatcttgtgtttgttggtttttttcaggtgatgataacaaggggtaaagataaaggtgagagtggtcttgttaagcgtgttgttcgttctcagaatcgaattattatcgaaggcaaaaatttggtaagatttgtgttggacttagattgagctatgccttgtgatttcaattgggtttgtgttcatttgcattgatttctcctcatagtctcatacataatctacccttcaaacaactatttcaaattgttttgtttcttagggtgtgtttggaagttacttagtcgagcaattacacaatatattaaaatacaattgcgtgtttggatatgaaattttaatatcatacacaagaatagaagaatggaattgaaaccactcaattacctctaattttacatttacgcggtcagacaaaagtactaaattgtgtaattatctccaattacacccaagtccaaactttccaaacacaccctttatggataaagagtggattgggagttagaagttataacaatgaaacaatcttcatagtcatcatgatgtgcttccatttggtttcatttgtatagaaattctagagggagctatttaactctgctgtaattcatcaacttattgttttcaaagttttgaacaatgatatcttgtaatccatccttgccaagccttacaatatttggagatccaaaaattataccaattgagcgactcgaaccttagaccttaagaaagcaagccacatatataatcactgaagcaaactttggttgattaatccgatcagttaatcgatggttggcaagtatgataatactaatgacgattctccatgtatttcgtatgtatctcataggtgactttaaaagatcatgtgaattgacttggattacaggtttagtgttggatgtattgaccgcttttttattaaaggaaaaatcgaagcaaaataactaataaacaatgattttaatttactagagacatcgacaaatt

SEQ ID NO: 193945 - DNA, 1105 bp, Cannabis indica
acgagtcatgtcgtattgtattatggtactagtactaagacgaggagacaatacccttctaaaaaataaaaaaaaaaataaaaaaaaaaaaaaaaaaaaaaaaaaaaaaaagacaatccatatgacaatgtcgaacaattccgatttagaaggtaacattaatttgatcgagctctattcttgtgtctcaattttaagtttttaggacaatttttacgtaataattaaattgatttattatattttctgttacaaaattaataaatattatcataggtagatagatctcatattttcatattttttattttatatgtattaattgttgcaaaaaaaaggatcgtttacatatgtattttttttttgtagatacgtattgaaattttaggtgattacattaaggacaagtactgtttcaaaataaataaaataaaatatggaatccctagaattaatctaatatataatttgtcagttatttattataatttaaatcaatctctgcgggagtcgagaaagttacatgtatataagtaatataaaatataaaatatagttcatctcattatcaaaatttacgtattacagcacaataataaaaattgatataaatatcataaaattatttttttttataaaatataattcaatttttatattttcctaataatggtgaaacatatttataaattatctcaatatctctaattggctcagcacatcttttttgttaaagttttaagtttaatggtttacagttacacatgggttttaactttaagacctttgttttttgtaatatatccttattattagctatcgtacttattaggataaaagtctaaacatttcatgttatttattttcaaaacgtggcatcacatggttttatatgtcatttagcgacatatatcaacaaaacagtccttattctacactattatataaaatagcctaagctactcttaatttacaaattcaatctctgttgacttattgcaaaattttgtgctatacacacaccttggatgaagtaaacgtataattatcaataaaaattaaatatatgcacgtattccatagtcatgctgaaaaataaaaactt

SEQ ID NO: 193946 - DNA, 2072 bp, Cannabis indica
catttatcataatacattccccttgtatacaaataataaccacttttctctcatcttcttcacactccttaacttagcagagaaagttcatattgtgctttaaaaggtaatggtttatttcttttaaagacttttttttatatatatattttggaggtaatctgctttggtgaacatttgtcttagtttagagtattgttaaagttcaaaccttttttgtattttcttttttcctgcactatttgaaaaaagttttgggaaagtagagagtgaaatgaatcatttttctagtggcacatgaagagtgtctatgtaggattgtaaaaaaagagagaggaagttaggatcaagattattgtgggttgtttagaagatttggggaggtggttttctttatttatttttaaaaaaatggattgtataatttttggtggtgagagaaaaatagagaatgaaaaaaaaatatatatattttcattgttgtggatttgttagtcattttttgtgctttatgaaaaaatataatttttttttatatttttttatgaagaacacttagagtatcctcattagcaactttcaaaatagttaataatgtaaaaaagaaaagaaaaaaaaaaacgctaaaaaggttcaaaatagcactcatcatctccttcataaccttcttcattttaaagatgcttcaaacccttctctacatgcagagaaaggatgaacttcttcaaacatattttattattttctctctcttttttaataaaataattaaatttaattcattttttttttcttttgcttctttattattatttaaaataataaaaaaaagtttaaaatattatatttaaatgatagaaaaagaaataaagaatttgatgtatggtgtgatgttaagaaaaaaatagagaatgaggttttaaagaagttgatgagagtgaatattctttttttactttttttttcctaatcaaaatccatttctcatataatttggaaagttaggaaggagatacataccaactataagatatgataatgataacctttatttgtttgtgtatatcctttgattaaatccactcacattagaattaggattacccgttaatgattgatccactttgatgaattcgccctctgaaacaagaaattcggggccttaaaacaacctgctttctagatgatccttatagaaaaaaaaaaaaaagatttacttcattctcaatttctattttacagaattcttagaaaacacatttttttttctatcgagctaaaaaatttcattcttttaatatctcaatgaaaatcatatagacaattcctatttattgtagctatttgtgcaagtattttacaattaagaaacaactgctttttgtaagattgtgtatgaaaatctactttcctgtagtataccttatagtctcgtattactgcatttagttgagtgatccacaaacgccgaaaatatctcttttacttgccactacgcataatttggtgccttttctaggtttagacttactatatccattgtcttctacttagtttatcttgcatttaaaatgtgttgaatggcacaacaagagttgttcaagctaacctatacctatctagatttctcatacttgtaggaatattttctgtgcctctttcaaatggagaagttagcacaatatttaagatcctttgagctgcagcggggtattatcggaaacacagttgacgagttacaatatcaacttatttcagcattgaataaattgaggaatgactttgatacaaatcaaagtttgctacactccatctttaatgagattgtgcaacgtgagaaagaattggtcatcaaagagaagcatatgaaagatggagtactccattttaacactgagtatgcaagaattactgagttgaaagaaagccaattggataaggtgcaaagatgttatgaaaactgcttgaaggaattaaatttgaaaaaagaggagtttgaagttgttgcaagtaaaaccaaacaagaagaggaaagactcgaggcgattcgaaagtctgtaaaggaatgctct

SEQ ID NO: 193947 - DNA, 1539 bp, Cannabis indica
agagagagagagatggggtgtacttgatctagggtttaaagtggggtttatataagagagtgagagagaagggtaacgtgggttagttgagataaagagtgctttactcaaattgcacttcgttttatggttgtgtttgccaacatagaaaatggtgattgggtaagcaaaaagaaaagagagaagaggctaaagcccaaagcttttcttttgcttttaagagagagagagagagggtttgtttttgttttaggattaggattagatggaattgaatttattaacattacgtgatttcaaataagtgagaaagaaagtacattaatgtatagacactgtcaatggaggattactaatattgaaaagcttcaaaactgtatagtctacgaattcagatactctcttacaaataatgccagatttcagagctgcagactttatattatacatcaatctcagtaatccaaccccacttgtggtcccctttaaaaactatatgaccatcacttggaattttcttttgttcatattattattattaaattttaaatttttatttgtgtttttatatttattaccaaccacaacaaatacataaatcatatatgtaactacaactaaaacccaagttctcattggacgtgttgactaataatattcaactaaaactagacccaattggttttaaacatttcccctctttctaagtcaaacaaacaccacaacaatttctcacaaaatcataactttattaatgtttagttttggcctcttttattagaataaatataagttcatggagggcctgaaagtggaaatagggtttagtcattctacttctttatgtacatgtatagttcttaagggaaaaacaaaaagtctttgggttatgggtacagaaagaccgtaggggataggatggtgatgagaaacttccaaaaagaaagaaagaaagaagatttgaaaaataagaaataaaaagagccaaaaagaaagagaacactaaaaagaaaaagtgagcaaagcaaaccaaaccaaactaaatatttatatgtaatatttattattatacatacacacacatgagtagatgaggtgttgtgagaaagaaggggaaagagagagaagcttttacttttacagagaggctttaaaaagatctggctaagtcagagaattgggttctttacaaggcaaggaattgggtgaagctgggcacgctcattcaacttttgggtccccctcttctctcttttaaagggttcattccaactctttgtttttcttttctcaaataaaaaaatttacaaaaaataaaatagtccaacccttgtgatgactcttatttggctttggctatgctatatttaatgtacacagaaaaggtttgacctggaaacatggggtttgagcgttgaatggggctctatataagataaagatagatagagtcatagagatacctcccaatttcatagtgcctacctacaaggctatattagtcaatagagaaaggtctccttttttattttttatttt

SEQ ID NO: 193948 - DNA, 2189 bp, Cannabis indica
ggtaagcaaccaaaccgattataagtgaaagtccacttaaccacattaggtgcagcaaaaattacaggttctaggaatacaagtaaaaatacaaccattaaaacaattagagagctctaaacaaaaattagagtagttctcaatctcccaacacaccgacacgtgagagagttaattacgaccctagagtcactctccacgataaggaacttgtgatcgtgaactttacgatatcaaagactaaacaacaattgtaataattgtatttacagtagctatttttgtaccgttacaatggttaatagaaaaattataaagatattacaggctagtaattaacaatggttaccgttacaatgattaaggttctttcttcttgataaaagacattgatgcccatactatcatgaagcaacattttactagtaattaacaattttaattaaattaattatataaaacttaaatatcatcagaataacatctacatatgtagtgtagataccacttagtacactttcgaagttctctaattttatttataaagatgttaacaaatttgtgggttttgtttgtttttcatgtatcattaatattttgtacttgtattttttctgaaaataataaacttgaataaccatttcattggagtatcaatgtcagctttttcaagattggagtcaattcgaaataattgaagacgtctccatttaattaagtgtgatcaattttttttaaaaggtaagtattgccactttatttaaagagaaatgttttagtactaggaagacaatcagggacaaaaccaatccaaaattgtaaaccttagcatcaaaagtaagcttggctaaacaatgatttcaagttcaagactattaggggtctttgaaatatcccttataagtgggtcgaccaaactagaaaaattcctttttatttagatagcatcaattaccaacaaagcatccgttccatgcattgtgggagagaaactagcctcaaagaaaccaggtgaacaccatatgtcgattggctggcaaaggacgtcccaaatgcgttaaaccttatttattttgatgttctaaggtttgcagtatgggttacgacacgatgattcaatttgaaaacgacacgaaataaataaatatgggtgacacgtttaataattattgtgttcatttttgaattttcgacagatttaataattgtattaagttcatgtttacttttatcgtgtcatgtcatagttgtatcggcacatttaataatcatattgtatcattatcgtattgatacgataacgatttaatttccatagctttttataataaaaatttaaaacttctatgtttatcttgataatatagtcatagtcgtgttatcgtgtcatgtcgttttcgtgttgtgtggcctactaattaattgtatcatgttcatgtttatcttaattgtatcgtgttataaacgtgtcaacacgaacacgacacgacaacacgagttgcctaacatattttctaggacattgtttgtgagaaaatcgacctgtgaagttcactttggtgccgacatatgatgttttttcggtatatgttactgcatggaacatcgactggcaacaaccgccgtgtgaacgtttgtacgtcagtgaaaaaaaaatgtacaatgttccatgtaatttttgtagtggtgctcatagatttcttttcggccaaagagaacagcccttctaggttgatggagaaagcaccaagcacttggccactgttatcccaatagataaaccccaccccaatgcgtgggtgtgaccccgaaggggaaattgcatgcattattgatcttcattttaatctcaaccaacctcatagagaccatgcgacatccctacttaatgatgaactcatcaatcgccacaactcatcacgacttgaatcagtttcgagacggcctgaaaatcatgcaaaatagccccagcttcctagccaaactaaattcatgaataatctaaaatataagttagaacaacagtggattaggtattgtttatggtaaaaatgtatctcccttgcctaacttttgtaattattgttgaatttgttgatgtaaaacattttctgtgacattactattttattaataatgatataataaaaaaaaaaaaaaaaacgaaaaagaaaagaaaacaaactact

SEQ ID NO: 193949 - DNA, 757 bp, Cannabis indica
tattataatagattgtactatattatatggtcacaccacattatggtattaatcatgattaaatccatctattttaattattattaatcataactaagtgaaatttaattcaacattcaaagaaaaataaaaagaagctttcattattaattaattaattacatatttattatttataaaataatagatgacgtggctttccatgtcggcggctgtattcatgacattgacagctctgcctttccacttattttgacttttagtcctactttttcttgaattttcaaatctgtccttaacttttttcactcttttcttttaagccctagtttactcaaactttatcagttcacaccaaattaaaaaaaataataaaaacattgtaatattaaactattttttaaccacttttctattttatctattttaaaaacaaataatttcttatattatttgaaaagtaccatatttaaaaataattaattcactttaactaaatcctattatattatatataccatcaattttggtttcaaaaaacaaaactatagacattatggacaaaagtattaaagtgtagcacaaaagatataaattaaccaagaaaattcaaactatgaaaacatactaaataatcattaaaaatctcaattaatgtaaaataataaataaaatcaaaataattattataaaaacatgaataaaaaatatcatttattatatgatattaattttgcactaatttttgcatactatt

SEQ ID NO: 193950 - DNA, 4914 bp, Cannabis indica
tatattaggatatatactccaatataagaaaaaaaaaatatatatataataataatcaaaggcaaactctgtaaaatgagagatgaaaattcatgtggaccttaatccctaataatgcaacggggtaccccttcttttcttaattaaatggcaagggctacgtttttctttttttttttacaaatgaaagttttgaagaaaaacttaacaaagtgagtaatattgcattcacatttttatatattaagcttaatcctatatcgatatatgtatgggttttttttttttgtttgaaatttgaaatttcctttttctttgaagacaaaataggaataggaatagtgcattatttgccacaattttgtgatcttcttttttgctttttgattgtagttggtagggactacttgtagatttttctagtctttgttatattttagacagctattctatattctatatatatcttccttttttttgattaaaggtttccttttttgagcgtatttggctctattcattattagattatactatttatttataatttaatgggcttccaatttcagagctaaaattttttatcaaattcttttattttattttttatgaaaaagcccctaatttttttttaggcttacaaaaatcaatttttctaatggtaaagcatattgtttatatttatatgttaatatgatgtaaattaattacacttgtccaaaataaaaaaaaaaatcgtaatggtttagaaattaaaagttgaaggacttttttgctacaattaaaattttaaggactaaattataataattggtatgatacaatagtgtcacatacctttcttaaatgtggtaggacatcattatttgtagggaaggatcaccattattgcgatattgggacatgtatgttatatatccacctaattacacccaataaaatattgagcactttttatttattttgtagatatttttaacaaaatacacattatacataaaccaaaaattgagagggatactgcatacttcataatttcatctattttgcttttaaagactcttttttttttaaacgggatgttgaaaataaataattacataagcacccctcctagctagcttttgttaggtggtacatcacttcgattggacaaattgccaaacctactatccttaacctaaaacacttgtatataaattttgtgttaattagtgtaatatttagtatagactaatttttgtattatttccaacacattatcattttttaatggatcaacgttactttcttaaaagatatttatattactaagagaatgatattttaagattaaaccctccaaataaataaggtaataatgtttaacattagcattgccttgctaacattattaactcattccaaacaccctaaaaaatggtgggattaattattcccttccattatattaattggtataatatttttaaattaattaataaataaatttaaataccattaatattatgatttattataaacaaaatattacgatatatatttagtttgtaagatcggttttttatgttatttttatgttattagcaataacatatgtatgcattatacataaaatgaggatgatgtaaataaatgacatagcgaacaaaaataaataacatagtaataaaatatataaaaatattcattttaattaataaaagatacaataaaatttaatattttctaattaataaatatattttttttaataaataattattttatttttatgtatgattaacattatatagatataataaaaaaatatttttattttaattttttaaaataatatataagattcatgtaatcaaccaaataatataatttaatgaaggagaatatgattacatattatcctatacagccaaacacaattaacacatttctctataatcatattctctttcataatattctcgataatcaaattattttgaacacctcatactcctaaatagtacactaacatataaatttacttttatttttattataaaaaaatagctctagctatgcatgtaaatgtccaaggcgattaatgcatggtaggataattcttaaatctttatttttcaatctctctttatatattaagatagatatatcgatcagtgtgtaaaaataatacatttaaaaagataggtctttatgttacatataatgttagatgtacatgtacgcatatataatatgacactccgcagtttttaaatttgttctactataacatatttatgtggatgtacttgaactgtcaccttgtaatatatatatgattaatgttactctttgatcatttggcatgtgacaaatgtatggtttagtattgatgatatatacattgtcacaatagcaatgatcattattctttgagtgtatgaccagaccaatggtatatggtactatgtgatatgattattatataagggtatgtgaagttacttctgcatacatatatatacaaaataatacaattattaatctttgacaatgaattgcatgagctcaacgaagcagacttacagatactcgtgattgattcagtccaaaataattaatttttgattgggacaataacaatataagaataagaaatgaattaaaaatattttatataaaaaatacaaattaatattttatttataaaattatctttacaaaatgtggataataattttatttattaatgagcttttatttacccaaaatacaacttacacatattcattcatgtcagcccaaaccatcttacaaccattacccttttgaaactcacgttcaaaatctacaaaaattacctcccagaaataaccttcgccatcttctttttcctaaatgtctcctttatcagtttatatatatatatatatatatatataatagctattacatatagataatagctattacctgtggttctccatctccatcgctaaaaaaaaaaaaaagttaaaaaaattagtcataaatcagttgctaacaaggctaaagggaaacgcccaatcatcgacgatgataactccaattttgctcccccgtggctaaaggtggccgtcgtccagtgaagaagaagtcgaaggtgtctttgcctgaaaaaaaaaattaacttcgacggccagaagggaaagaagaagtcaacttcaagacaactgtgatgaaactgtaatgcaacagttatatctattgcgagccaactaacataaaactaaaaaataactaataattccacatatttaatacaaacgaatattacaacaatcgtgttttatctgttcaggtcacgtatttgacaattgcaagccctatttttataatacgatgatattataatagcaaaccattattcaactaacgtgcaacttaactgcaactagaaaagtcaaatatgaatgtgtatctataagaaactatttatcactgatcgataattaattgtaccttaatagtaatatgtaaaacaataattgttaaacctctgtaaaccaactttagatcagctaatttagtatcttaataaaaataaatatgttgtaaaaatttcttttaaagagctttgtattgtattgacgatatgaaacacttgtaagtatgataaaattcattgtatcattatcaatttgtaataattgatacgtcaagtttcaaaaagttagcaaaatgtttatgcaactgttatgaaacattaaaaatcaaaaccgtattttcacgtacatatctctatctacatgtctattcatgatttaatgtgaacaaatttaccgttaaaaatctagaaaataacaaaaatgcattacaaatttaaccatagtatggatgtatttttttttcttagattatacctgagttggattgtttagaaactctagttctaactttttgagatctgcatttcatagatctgaaaattgaagtcaggacattagttttgtgcgaattagattgaattttttgttgaattttagttttgtagtagtttttatgcactttcttttataaattcaaaatagcccatgttttgattgattttggtcgtcttctcaggtgaagttaccagaattaatggtggttctctgcctagttgggtttcgtgtcggttagtttgctgggttgatcgatcgaagcttgcgtaggtgattttttttacttcgatccatgcacctgaaagtttagaagaagatgtattattgaaatatttagtttgtgggctgtataaatatttaaagggccgaccataagtattttagtaatatagttacctttttgtatatatctgaaaaaagccctagaattaatgagaatagaaatatgaatagaatgaaataaaatttaaaaagcataagaaaattattaatttttttctcgtcatgtattagaataatttttctttacacactacaacaattttggtcattagcagcggaccacaatgtccaccgctaatagtggccgtttattttttttttatgaaaatattattagcggcgggctgtccgccgctaatgcccgccgctaataaacgggcaggattttttccgcccatacagtttgaatactattagcggtggggcattagtggcgggccccgccgctaatagtaattttttttaaaaaatataaaacagaaaatttaatattattagcggcagactatctgccgctaatggtattataaataccccatccgaaccctttcccccatttccccttcttctcttcaatctcaaattttcatttcccccatttctccaccaccccgaccccttcaccgatgcccaccaccccagacccccttgaccggcaccaccacctccgaccccccaccaccgacggacgcggcccattacccagtaattttctctatttttt

SEQ ID NO: 193951 - DNA, 1545 bp, Cannabis indica
agatgaatgaaatattataactttgcttgcacatgcattttggcaaatgcaatgcatcattgtttttaaagagaaaatttgattaaaaaaacccacacacacattattctaatggtacacatattaactattataaaaccatatgaatatttttctgaataatttgtgcaagcaatcttacccagaaccttggaattgtactttccttccttaatttcgatttagaaaacaaagaaaatatatatcagattctctaaaaaggatgatttggtttggttgttctgaaatgataaaattaattctattaaataaaaaggaataaaagcctccccatgtgataaattcagcatattaaataagaactataaacaaatattttttaaaaaaataaataataattaacagaaatagtatttaattggttgactagtattgaaggtataataattatttttaatgatattaaatatactcacagaaaatataaattttaataaaggtaattaagtatttgataaaactaagaaaaagaaaataaaggaaaattaaaaaagatgccatggcctaagttatgtatgacatgtcactcgttgattggtgggctcatgataaagtctcgagctttgattgtttattataagaattaaatatttatttttccttgaatattataagtattaattagaagaaaacattgaaacggaactacagtgagtgaacttaactcaacctcttgccgaaagtgcaaggagcgtgtggccgacgcggagaaatgagcacgtggaagtgctgacataataatcccgtttttggtcatcaatatgacacgtgtcagtatacaattgattgctcattatatgaaatctttaatttgttattcttttaataaagtttaagggaagatgttaaattagatttatttttaaggcttattttttaattttaaagaaagaaaaagaagtcgtaaaagtcactgaccgtactaatttgtattaagtaccgtacgaccaacattttttgttttttttgttaaaaaaaaaaagatttttttttttatattacaatatttaaatcatatttttacttttgtcttttttcagttaaagattttttttacttttgtcgtgatagcaaaataaggtaatttttctttttagtaaaagtaaaaaattaattatcaaaataaataaaataattttttttttcaaaaaaagataattatttagtgtataaaattaatgaatatttatgaggtgggtggaggaggagtgcactttgctctttctctatatatttttgtcttcaaaattcaaactatggagaaaaaaatccaaatctcttagcaaaaaaaggatgagcgagctaaagtaagatattcttagtcaacatttagttattgactcactattattatattttagaaaatcatatcatatattattttttttaatttttacggcttgaattattccgataattactgaataaattgcaatgtaaatttaaattgtgatttcagttactctgtgtattttcgtatataag

SEQ ID NO: 193952 - DNA, 895 bp, Cannabis indica
cacttttagaataggacacgtatgttcttttgtctaactatgcatgcgtttgtttttatgatagttttttaattccaatatatgattattattattttttttacgtgcacaatatcttttttaatataaaaaaaacaaccctagttccgaattttccaactattaatcattagccaaccaaaatataaactttaagaagcatttattttttaaaaaagaaacaagtttaacccctgtttagatcactgtacaatttcttgtctttcttaactatattaaagtgagaaaaaaacaaaagcaaagcaaactgccaaacaccatttgccgatgtggcatgtgaaattattggcttattgcagaattttagatactcatttaaaactaaaccaacacacacacaagtccccattgagaaaagcaaaataagaagaagattttcttagagtttactcttgtgttatgctctgttcttcatgagcttcatttcttcttcatcaccataattatggaccattcacctcaacatggcttcaaaagaccagaagaaggtgagttcaacttgagagaatggggtctcaaagctagaattagccgagaaaataccaattcaaggagatattctgcttcatttataagaagttttagagaagattctaagtcttttagatcaaacataaccatttctagcacagcttcttcccctggttactccttaagaggtaacttttaatttagttttcctactctctcactgtttcaatcataacccagtttagaaaattcactattgagctgatttatcccaactttttgttgcagatgaaatcgacccatctacatattcattcaccacagcaatccaaggtaaaagaattctctcttcttcttcttcttc

SEQ ID NO: 193953 - DNA, 3202 bp, Cannabis indica
ttactaattagcctaataaaaaaaagtcttaattaattatactgtatatacatcaaaattaatagttatacatataaatgattctatatgcattcacttgtgccatcactgattattcatgtgatagtgatactcattttgtttattcaatttagttacgtatgatattaatttcaaaaggaaaaaaaaaaactaagttgcatttgatgaccaattggttgtctgacccattttttttttgaatgatttatcccaaaatatcggaatttgacgaaagtcaggcccaatatgtatatacaaattgataatacaactaactatgtattttcgttcaatatatcgctgaaacattgaagatatttgtccagattttttattagacttctacaattatcgagactatcaattttccgatatatttctgaaatcgaccgactttgtcgattttttcttcattgcatgtatggaagaataacactctgatttatatgttatgtgttattcttaacacatgttttgagagaaaatgtaagaaaggctttaatttgatttatatattatatgtggtattcttacatacatttgaaacaggtgacatttcttcataaaggatttgacgagacacggcgacttggtctccaaagtgaaactgagcaggttaatcatttcattcctttactacccttgtttattaataattttttttcaatatttcagtttcctttataacttgtttgcttggtatgttagatggttcgacatgcatcaccacctggtgaaactggaatgcttgttgttgactctgttgtgagtaattttgtgattctaattttattataagactagtgacatatttatttcaagaactttttatatttctggagtttcttccaggtgcctgggggcccagcttataactgtttggagcctggagatgttcttgttcgtatgaatggtaaagtaagtcactttgttactctcataggaattgaattgttaacagaagtgcatgtgtgtcataggacccaaacccagagaaacatcaagcagagaaaatattattgctgaaaaggaaaacacagaaaataccaggttcttgagggacctgaaaatctctaagaacttaaagctcaccacatttcactcacacttttcatggcccttctctcatccccaccctctcacttatataatagtctaaccacgtaattacccttacaaacgaaccaagttattcccatccatgacagctgtcctacctcaaccattctaacagtgtcctagtgggactaacacgaaaagtgatttgtggggtggaaagagggtgcctgcgtgttttttttttttttttgagagagtgatttgaatcatactatgacaatcgtcgacgcagaggaacttcccgtcaacaagctaattgtctagccaaagatagacaaaagttctttaataaagctttagccagttaataatgttaagattggcctccttttcttttaaaagttcttccatgatttggatagtgggattttatactttttttgaatctcacaaaagttcttttattttattttattttatttcttgggaaaatacttgtaagttgtatcaatatgggaataatacaagagatctaataaaaagaagtctggctaagataattatatcatgaaactcaatatctacctaaatgaacaagacgaaaacccttttcaactctttcacattaaatgtttttgcttttctaagatttaaggaactatagtactttggagtattagcttgtacatgcatatctaatacttgattgttgaaattataattgtttaacgcaggtaatcacccaattcctaaaaatggagaccttacttgatgagagtgttaaccagaaggttgagttacaaattgaaaggggtggtacgtcactgaatgtagacttaacggtgagagttgctcttgttttgtgttgctattccatttttgttgattatttaattatagtattcttttggagaatactttttatatttattagaattagaagggtatgctcaagtgtggtattaaattgcatgctgtttaagaattttactgtcacttactggtccactggagtccggacttgatcatcattagatgaatttgttttgttcccttcataaagtttttctgtagtgtagttgggttgatcaattaagttgccttattaaaaaattcttctttttctatctcaggttcaggatttacattcaataacccctgattatttcttagaagttagtggcgcagtaattcatcctctttcgtatcaacaggttggttagttggattttgaacactattaaaattacgatgtacagctttttctcctcccctccagatatttttttttttcagtatgactgactgaatttttatttcccatgctctgctggttgcaacatttgtatataatattaaaatttagtttattttgacatacatatttattagaaaattcattgtctcgagccaatcaactttattctcatttgttgttcttttcctttactgcaggctagaaatttccgttttaattgtggccttgtatatgttacagaaccagggtacgcattctatttctattttgatcttctcaagctgattttcagtagttttacttggttgcacgtatatgttgacttgactaagatggaaagttaccttctagggtgctcttcgatttttttttgctgggaagggggggggggggggcgtcccacattattgctatatgattttttttgcaaaatcagaaaatgcaaaatgaagggaacttttttctacacatgtttgtggtttgtataattaattttatggaattagttatgaggactgtctggtacgataggagcagctctttccctcccttcaaaacatttatatataagtcaaaagcagagttgcactaaaagattcctagaccatcttccttgattcttacattcctaatgtttctataggttgcattaacccttgatgttttttgctatgaagatttctgaaaagtttcattttccagtccactcgaaaaccaaaagtttgatacaatcttagcgacacaagatttctttttttcagcatattcttgctaaggcagcggatgaattcatcaaaggctccttcaaacctaacccatacatctttcaagaatggaatgtga

SEQ ID NO: 193954 - DNA, 670 bp, Cannabis indica
cttttcttcttcttcttctctaagtttctcaaaatctatataatgtttgctcttcagttagatggaaaaaaaaaaaaaagtaataagagaaacactagctaagtaacaactgagtttctctcaacatattttcctcttatgcttcaaagtcccagcaagacgtagtaaactagagtgataggaagagcaattagcataccaaatataaccctgcataacaagcatccaaagtgaaataagtactataagaactaaggctttggaaaagccaatctttacaaccaaacatcaacactagttcataagaaataggctttttattttttaattgaagtttaaagaaaatagttagttatatagaatgggagatatactaaaaaaggtaaaagaataagccttttttatactaatggagagagagagagagagaaagaatatatttgtctggaccacttgattttattcatgatagatctgagacaacagaagcaaagtaaagtagcatgagaatatagtgttctaacccagtactcagtatgtcagggtggacattgtattccttggcaaacacaaatgggacaattccttgtggaagagcagcctgaagattttaaacaattaataaagatttacatctcctcaaaaccttacgatatattcaattccacat

SEQ ID NO: 193955 - DNA, 1353 bp, Cannabis indica
aagtgctctttgtcaaaaaaaaattaagtgctcatttagtatattacttatgatttaatttttatatattatatatcataaatgaaatatgtattcagcaatcaccatgatcaatcaaccttagattgttttttttttcacgaataaataataaaaatttcatgaaaaataattattataaaaaaaaataatttgtcaaaatttgacaaaagaaaaactttattacttagaaatatatatcgattaaaccccaattacttttcataaatatttttatgtatatttataaaaaaatagtcttatcattaaataagattcttatttctgtagtgaactactatatataggggtatgatcttggtagagttttactattttttgtttttacaaaaattctccctaaaattatacaaattattacaaatatttccaaattatatatattgtggtcatcaattccaagtatagttgcaatatgcggatttatttaacaactttaagcaacataaaatctaatttattgacattaaacatataaatattagcacaagatcagtcctgaactttaataggcctttgggctggtgggtcctagacacagacttaatttatttatgctcagggtggggcttgcattattagctctaagaatacatatacatattatcataatgtattattaaactgttatttatgtattttttattctggactcttaaacaaagccagatcaacgtattatgttagtgctacatcaataaattggttaaaaaatgagtagaatgtaattgtagagtccgcctttttttatatataattttcatgaaaaaatttaataataaagaaaaatttggaggataaaactccactagagtcatatatattcaaaaggacaaatcctatttcatttttatttatatttaatacatatctctatgatggagaacatcatattgattgataatataagttataacctataattatgtttaaaaagagggataattccaaaaaaaaaaaaaatgtcttctattagaaaaatcctcccacttaggttagaaaacaaaatttttaaatagatagaagacaatttttttgggggggaattatccattttttatataagataatgataggttatatattgcacacaatctagctagttgagttctcatatgatttttataataagtcttctctttattattattgttttttcacaattgcactattttatgattgaaaagtatatgatattttgtttatatatagtgttgaatgttgatcatcatcattttataaaaaaaatgaaattttgttactaccaattaaaaatggtatttcaatatctag

SEQ ID NO: 193956 - DNA, 3155 bp, Cannabis indica
ctttaaataataatctacaaagttcacacctagcctgttttcaatgagagctggactctatgtccccattcttttggccacaggagccaactacatttgcaagtgagattatttttaatacataaacttagtcaaaagttcaaggtaagaaaacaatggttataaataaaattagcatgttacctactccgctttgaagtgggagcatagcaagtagcagcaacactacatttttgtattgcaatcaatatttctgttattagaagataaataaaatcttgattgcttaatgagtagataacaaccaaaactggcttaagataggaatcattaagcataagatccagtttatattataataaacaaagttcaggatactcttctgagttgatgaatactcaaaatagatcatctacttagcagactaagaatagctgggatctaggagctttaacttattcaagcaaactgagttgcttcatttgggctttggtaagacgatggatcgtgctcgaagatttagaaagattcccctgaaagggaaaaatagaaaacattagaatggaaaagtgtaacaaggctcaaattttggtttgaaggatatgaataagaggcatatgtaaatttagtgtagaagaaggccaccaatcaaaatttcataccagcaaaatgcaactaagctctgaaggatcacacggaattgcaggggcacatagcggtgattgatccaaccaataacaggccagaactgcatttgtttctcttaagtcagattatgatagttgttatatcatatcaccatagcatataattcaggttgagcatagagtgtaataccgtccatgaagtatattgtattgttggatagtccttctttattttagctttcacatgaacccaaggtcttcctgtgtttcacatatgcataaaataattaacagtaactaacatactattgctatctgaaatagccatatctagcctgcttattttcctaattcttttaggcttgatttcagtaatagagttgtttttctaatattcacttttataatgtgaaaccaaaacatgaagtataaagttggttggtattacaggggtcaactcaattatacaatttaatcatttttggcttcagcaaatgaaagaaaaaatggtggaagtaatatgtttccttacagcttaccctccacaaccagcccaaggtaaaccatgaaaaccaggttgttccaaggagaaaaagtaacctgctccagcagcacctgacaatttgacaagccatttttggatttaaacttctaaaaattgttctcttttctcttccactgattgagtcaaacaaactgtcaattggttcgggaaaatcactttagaaaccccttattgatgctattaagttcattctccagttaattatattcagcaaaaggagaaaacagtatatgcttcaacataagaaaactgaagatttcctttacagccaccagagagatggaatttggtcattcttacattactaacacaagtaataaaataatgttgagttacattctttcaatatctgtcattaaatcaaggctttcagggaacaaacttaagctcaaggctgagtaaaatggtgtaccttcttggctactgtttttgtatcccttttccccttgaaaattttgtctagaattatgtacaggtaatgtccaaatggaccacgataagcaactccaaaaatctgcattcaaacaaatcataagtatgattgagatggcacacaatagaacaactttaaggctaaagaacatatcatcactttagtgttatagaaactccaaccgacggtattatggtgataaagtctatattttctacactaacgttggcactataactacaccaaatatagtgtacagctacagtatacaatttatttggtgtgtatagtaactgcactatattggataagtctatggtacattcttaaaaggaggtttcggtaaatctcttatctgttttggacaagagatttttttaatttattttttttatgattgtgtatgttgtagttatttaggattatttgtaaattttttaaaaaatttaaataatttacattgtcgaaaataaagttgcatgcgtgactttttcttacacgtatgtttactttttgaactttattttcggtgttataaactatttagaattgtttaaatgatagtaagtgacccttaataattataccgtataaaaaaataaaattaaagactttacttgacgttaaattaagcagatgaggaattctaccaactctaaagctatagaacatgttacatttgcgctacaaatttattgaacctagtatttccctaagcactagccttttaagataaaatcaataaataaaacagctagattgaacaaatccaaaaatgttgcttgaatgaaaatattacacaattataccatacattcatggtataatccagctatggtatttacaagcactatattgcaatgcaatattattaaaaaagagtgttgtcttgcactcatactcataagcttcaaaataatcactgctcatttcgtaaaacaataaaatgatcaattggttcctaactacacagtaataacactatgaaagtgagcttaccactttaagaagtatacgtttcaattgaagtttttgtataccagtcagtttttgagaaactatatcgctaagccctgctattgtccccgctgtaattgcctgctctagcaatacaaattattcagaacaacatacccataaaagagaaaggagaaaagatttcaaggtcaatctcagtacgagttgaataagttattgaaaaaaactacaaaataagaaagagaaccatgaattggaaccttagttctgagaggatgttgctgaagctgcattaagtattgattcaaccctttcttggcaatcgaccccatgtctgagttctccaatttggttgaaaaattgaagagtttgtacagtaactagatcagccagcaccggggagttaggtgcgttattatgatcaaaaatatctctcacacgcaccaagcagtataaatatatatatataaatgtgtgtctgtggaatctgaccggctggctgagtctttgtttgatgattaatccaagagaa

SEQ ID NO: 193957 - DNA, 2072 bp, Cannabis indica
atagcgttataaacattccaaggttggaagcacattataaaaatttttatttttagtcacaacaaaacttgtgactaaaagtgaaaaaattgtgactaattataaattattattcttatattgtgactaaaaggcccgtgactaaaagtattagtcacaaaaattacaatttattgtgactttaaatgtatttttagttacaatacttgttgtgactaaaactaaattagtgacaacttataactaaatactatattttagtcacaagtaacatttttgttgtgactaaatattttgttgtgactaaaagtcacatttagtcacaaaaaaattatgttatgactaaaaagttgtcactaaaagttatagtcttttgtagtgacaacttataatttctttgcaactgcttatttacaataaaaaataaaaaaagaaaaatcttgggcttaagcttaattgactcaaatatgagtaaaaatatttcatcaaaaatcattaaatcaaggttaattggctaagtatgaacatcatattaatatgcttaaagggtacaattacaaattttactatttgtttcaaaactttgtattatgactatttaatacaatgtttgtcaatagtttagaatcaaaggtatcttctttcacttgtgaggtgtgagggtggttatttatatttatattttggttgagggattgggagaagccggagttcaagcaagttcttaatttcagatcaatgaataaattgataattacgacgatacaatagaaaaaacaccctttgttcagaatgagaaggtgagtgatagacaaagtaatagtggtgttgagaagtactctaactcaaaatttctagttagaatactagagtaattgtagtatttattttcaacttcgtgctatggctcttagagcgcatctccaacgaagagttataaaaatagtattattttagtttatttataaaaaatgaagctcaattaatggtgtaaaatgtgtgttaaatttgacacacgttaaaaatttgactaaatttaacataaaatataacacacgccaaatttacaccacaatatatgttatcttatttatttactcatttaccttaaaataatatttttaattgattaaacactttttaacattttatttatgagcattgctactgaggtgctcaataccttgtggagatgacgcttaatgattatttaattactaattagtgatatttttaaaaaatattacattaaattatataatatctaggaataagttaagacatggtaccttttaacatttctctttatttaaacaatttttttttatataatttcaagaaaaatttaatgattatattaattttaggggttaatttgtattttgtacattaaaatacaattataaaatttgaaatataacattgactcattttaatttattattacaaaatttacatttggagatataaatggttgatttattatatcattataatatgagtagctaattaatatataggtttacaattatcttatcctcttatccttaatcggtattcatgttgcaaatgtgacacgtaatgatatataatacttgttaattagacaagaatcacattatactatttaatttaattacacaccaaaatttaagggatttcccaatcttctactttatttttattacacgtgattaattatgaattattattattattattcctaagatctactttataacatttatttatttttatttaaacatgcacttagctgggtaagatgattatttgaattttttatcaaatacacattgatcaactttaacgcattcattgctataatcaatcatccaattttattattaattatttgatatattattcaatcaaaccttttcactttttcaatttttgactaagtaacaacgtattatttaattttaattttaatcaataatagaacgtgacaactaagctatatagcatattttgtagaagtaatattacacctactttagactccccccaaaaaatggtatattgccatatacctaatttttttttttttt

SEQ ID NO: 193958 - DNA, 1771 bp, Cannabis indica
tcttttgatctaactctttccattgtccatttttttgttctacaaaaacttttttaaagaaaggaaagtggtgtttaggtggcacatgtttgtttgataaactctaaagaaaagatatgctatagagcatagaccatagaagttgtgtcttttattttttctcccttgcatagattgagctctcagattatatttaattctgaagttttgtcaacccagtaatttatggtgatcactagactaaaataggttaaaagtattgtcatctcagatcttttgataactttatgatgcattaccttgtcataagagttgataaccttttcccagtgaactgtgatgggctgataatccgctggcattgatttgctatattattttggtttattaatgtaataaagaaagtacaagtatattagtctttagtttctctaggtggtcggtggaattagttcccaagtcacatagctttactctaggaagaaattttcgatgttatctgattgctggtgcaagttcgtgttacccatgaatattcatatgaaactaatcttaaacataattcttaaaagatttaattttgtttaataattattttaattatgcaaaattaataagataagtcatactgatggagatcatggctcttgattcttgaccctgaatcctatttttaacctatccacaagggatatattttggcatgaaagttggttccaccatttgtttcgtgttacaaattcggatagtatcatttagcatttaaaagtggccgagataatatgctggaaaattgaatgtaaaattagcagggactattcttaagttttgactaatggcactacttgtttaggaaagactttccattttgttatacatagtgaaagtaatattggagtatatgtttgttgttgttgttgcagggctcttgctagtgtggcactcaaaggaggcgatcataactgattgtttgggatacaacaatggccttactttttatatgatattttccccttttaactcgatgttctttacttgttgtttctactgaggcttcatttctattgaaaaacaattctttggcacctatatattccccctaagggcacgtttaacgtggcaaaaagaagtggggtttggcgttgacaagcattatctcatctcatctcatctcaaaatgcttgattaacctttgtaaaagatgatatatataatacccaattcattggaaataaacttggaagatgaacactattatattatattttagtttaaggtgggggttcgtaattttcattgattggactctaaatttggttatataagggaagaagaatatttgacatttgtatgtaaaacaatcaaatcaatgtgcattaggattgctattaatgaactttgccctccatggttgacaaaatatttgtttatctcttctttatgaaagtgaagatgaatgaccttttggaccactaaaatgcaacttaatggataatcaatattgtagttttatgccttatgagttttttttaggtttgtcttttaatcactaattattgataataattcaacatcatttgctaggagcacatcatttaattcttaagtagtgatatatatatatttatatatatatatatatatatatatttttgcgcagtgtatcaattttttattttaaaacatagtaaagtatattgttagctttaaaaaaagccactaaagttagtttagtctaactttagtgatgagggaaggatgaaaaaaagag

SEQ ID NO: 193959 - DNA, 1499 bp, Cannabis indica
gcctaactatttgatgaataattctagaaaagctttagagtattttcatttgggtaatatggctttcgatagacccaagttctcttggctaaaaaaacatcgggatgctatgtttgttcaagagcatcttgatatgtttgtttgtaattcctcttggctcaagttttttttttcggactcatttgtttctcaccgtactttcaaaggtttagatcataggcctattgctctttctacttgtggtcgtcccttggttggtaagggtaacgattttcattcttgttttcattatgaaaatgcttgggtctatgagaaagattgtatggagattactggttctaactggttctcaaaagttgtggtcccacttgataatgttcaacttaatctagaagtcgtgggttctaaactaaataagtggaataaagagattcacaagagatatcagattgcaattaaccaaaattttaaagatttctttattgtggatgctaatcttggtgatgttagttgtgaggagcttcataagatagaaaaataatttgatgtacttcatgagaaggaagaaaagtattgggcttctcatgataagaatgattggctcaaatttgggtatcgaaactctgcctactttcacaaacatgcctctagaagacgtgcaagaaatgttatttccaagcttctgaatggggttggagaacaagttttgggtcaacataatattggtgaggtgtttatgcattatttttccactttatttacctcggatcatcccttggagtaggcctttgcaagagtgttagcttcagttcctttaaatatttcttcaaaaatgaatcaacatttaactcgtgaattttttcggtgacaatgtttgagaggctctttttcaaatggatccttctaaaagcccaggggtggacggatttactgcttgtttttatcaaaaaaattgacacaaagcgggtccatacactattgtggcattgttttcctaaatggggaatcaagtttgaaaggtatcaataaaactattatttgtttaattcctaaagttgataaccccgttcaagctgttgatttttgtcccattagcctttgtaatgttttttacaaaattattacaaaggccatgactaattaaatgtgggaagttcttggccatatcatttctaaggagcaaaagtgcatttctcctaagtcgtttgatcattgataatgcccttattggttttgagtgtattaatgctttaaagaagaagaagtgggggtggcaactgtgcaattaaatatgatatgttcaaagcctatgatggggtggaatgggggtttcatgagagaatcatgttgaagctttgttttcatgttaattgggttaaaaaaatccttgattgtatctcttctctgaaatactctattcttttgaatgggaaggttattggttctattatccctcattgtggctttagacattgaaacctcatgtctctttacttgtc

SEQ ID NO: 193960 - DNA, 1160 bp, Cannabis indica
ctctttatgatcactagttctacagagtttagtaatgataatagcaactcctcctcgcctagcacttatggtaattacttaggtgggagttctgatctcgccactttacgcttatccttactttacaaattttaacctctttttgttttatctttgtagacatggatgacttgaaaaatctcctatgcggccttggtgtctcagttaagcgaggcaaaaagcgaagtgcctccgaggcagatacttttgagaagcaaccaaggttcccaagaagaagaatggaagtggcaaagagaacactacttcctctagcattgttatttaaaaggataatgtttccccgactgattctactcctacccctgtatctgcaagcacggacaagcaaaccacggggtctgtccacaagctattttttctgcggccatgccagaaattatgttgttagaccccacttatgttgccactggatgctgaaaagaacattatcttttaagaaatgaaaaacccataaaaattaacttctaaatagaaaaactattgaaaaaggagaaaaactcatatttttataaactaatagtataaaagttataattttgtaaaatccacattgacaattggtataggtttgtcatggttggcctttgatagttggatatttttccaattttactcgcgacgataaaagttatttaaacaagggaaacttataaaaatactagaatttgggttaatttttacaaaaatacatagaatttttttttaaaatattgtgttattattttccctattcaaacacacaaacacaaaatctatacaagtcttattattttccctattcataataacaaattaatgtcatttcaacacaaacacaattaattttagatggaagcataaagattgtaaaatcatatcataagtcaattgcttaaataaatatgcaccccaaataataaacgaaagaaaaaaaagaaattgcttaaactctaattagtaagtttataaaagaaaatgagcaaaaatcaaatgaaatccaattgagcaatagaaaaagagacatttactcttaattcatgggctttctatataatataataggtccacaatttaagtatttgtgaattgaaattcaagaaacaagcctatctaagaattaa

SEQ ID NO: 193961 - DNA, 1257 bp, Cannabis indica
aaaaggggaaaaaatatgtaaaactcatagacaagatcataggaactctcaaagagaaaaaaaaaaaaaagatgaacaaagcatcaagaccctaaaaaaaggggaaaaagaaaaggcaggaataagtgtatcaaaggaatcataaggggtatctacaaagatagttcaacatctgaaatatgtacttaacatgacaacttttcataaaatgttgctctagatcagaacataagccaagtgatctcaattaaatcattaccgctggtgatgtgacagaagacaatgagaagagtctatcttcaggctgaaacttcctagaccgcttcgtgctgcatacacaatatttgaggactttcattgcgcataacataagagtaacctttcgataatacatttagaagtaaacccattcataagcatgtgataagttctctcaaaatctcagccaagaaccctcacaaacacaccagaaatcttacttttatttctcaaaccctagcctcaattagagactgagtacaacacaatacaagataacagtagctaattcgagatagccaatctcccaagagtctaaaactcattataacaactactaatcacttattcatactgctccactaactactgctcttaacagaaacataacaacctactaataaaactcctaacagaacataaccaacaactattagcaatgaaaccactaaacaacttagtgaacctcattggagatgtatcagcatgtttctcatctgatgaatgatttctcaaatacataacattgagatttattctagtagtgactaatagggataatgataaggatgagtgtaagagactgtggaatacatgaacataatttagtcatgcctagcataaataactgatcccaatgagctgattttcaagctaaaattgattaacttagaatataaaatcatcacatactaaaaagactaaaatgaaaaatcataaagatataaaatggagaaatgaaatagcagtgttactccatacagggcagtgttcttagatgaggacaagaatccatcaaaaccttttaacacattgccacactggcttggatcctgcaagtaactggtctccatatcatacacctgtttcaacaatggaaaaccattatgaattatgaactatgaactaggaaaattattgaaatggatgatattgagataatgcccttttcttcccacatcaattttacatatatgcaaaccaaaacaaaaaaaaaaa

SEQ ID NO: 193962 - DNA, 1754 bp, Cannabis indica
ttctccaccttcacacaatctgaggaaaaagaatttatgctaaactcactgaaatattggcaatgcaggaaagcagaacaaattgtaatataactatattaaaaagaaataaccaaacacttgtaaaacagtgccacagataccattccatgaatagtagaaacgtagtgttaacaaagctgagcttaaatgtatgtgaatgaagagcaaaatatacatactccataactatatacacgttgttgctgtcttcatacgcatcatagaattttacaagattcttatgcccagataaagctttcaatatcttcacctctctacgaacatcttcaatggctattgctgttgtcatctagaaaatgaaattttaagaccagattactagaccatacgatatagtacaatagaaaaccaatataaagtttctcagaagcaagaattgatctatcctgaaaattaatagctaacagctaaaactatgtgcaataaatagttactttccattactaataattcaagaaacacaattccaattgtcctaaaacaagcgaaacaaagaaaaaggataaaaacattcctaatttatgtgaacaaaattgagaaccaataatataatgaaaaagcatttatagcatttcctacctttgctttggaaattattttgactgccacaggctgatctttgagctcgcctttcttgcccctggccgagcatgtatgaccaaaatgccctctacccacttccactccgagctcatacttagccccaagattcttgctatacccaaaagtcttgttcagagactgttccggctcaactccttcgtcctcaggaattgtccccggtttgggttttccacgacccaatcttttagccaacgatgccttaatatgcttagccggagacggtggcgcaaacctcatcttaaagaaccttcccggcgtcgaagacctcgccggcgacggagaaacccccggcggcaaaggactagccgaaatcccatgcgggtatggactaggccagggactcgggttggaagaccgagctggagtactgctcttgaaaagcccgttccatccaccgccactggaacgagccggcgtctgggcccgattcggggaagagaccactgtagtagtgatggtcgtggttgatgggtgttcgccattggggtcattctcagccgttggattagtcttaccgtagcactgtcccatcttagagaaccacccacccttctcctctctccgcactgtatcggatcacgagccgagtcccagtcaaagtccacgcatcggacgacttaaaaattgaccgatctgaactccccaccggaaaagggtatacaaaagacaaaaacaacacagagatctacggcgagaaaacgataaacaaagagaatgaaagaaattctgactcagaagctaagaaaagaagcgagcgagtgagacagagacagagacaggcgaaactcaacagttttaggctattataccctatcaccatccccacttctcaacttacttcaacaaataatcaccaccgttgattttatataatcttaaaataataaagtcaaaaccacactaatatgacttagattcctgatcacagccgttaaattgtcataccaatagctggaatttattttaagagtaataagtttcccactctctctgactgagtctctgacctctgtgtttgtactactactacaaaaacaaagctttcttcatttttgtcttttgttttt

SEQ ID NO: 193963 - DNA, 1239 bp, Cannabis indica
agagtgagcggtagaggttcgacgaaaatatatgagatgagagagagagttagtggtggggatctgatagtgatatatgggaagagatagagagggttgagctgatgggagggagtgggcaagatggtgtgggctgttagggtattgcatggttacatttattgggccactatacccgacagtttaaaaccgtcgagtatagtggcccaataaatttaatgaattccaattaaaattgtcacctattctataattactgttataacgaaaaatttcctgatagttgtaaacagttgcttaatttttttagcgacgatagtgacccaaaaaaagcttttttaggatcgtcgtgaattctaacttttctagtagtgacaacctcttgtatgaaatgaagccttatatcaatgtccttagtatgctcatagtgcaaacgattcttggttaattaaactacactctgattaacacaatgaatagtaataaccttttgattaagcttcagctcctccagcaacctagttaaccacagtgcttccgtaatcgcttccatcaagtccatatattctgcttcaattgtcaatagcgccacaaccttctgaaggtttgctttctaactaatagatgtcctaaacataattaacacatatccagtcaaagactttcgagtatcaatatacactacataatcagagtccacataaccattaataatatccaagtcttccttcctggtattcatgccaattaatagtcccttctgagcagtttctttcaaataacgtagaatctatttcagggtttcccaatgctcctttctaagatttcccattaatctacttaccatgttgagtgcatacgctatgtcttatcttgtacataccatgatatacatcaaggagccaatgacactagcatacaaaactcttggcatctctatcttctcagtatcatcttttggcatctgagtagcacccagtttgaattattttgcaagcagagtactcattgccttccagttactcattccgaaggtatctagaatctttttgatgtagctcatctgattcgagtacagtagtctattctgcctttcccttcttatatccatgcctaagatcttgctagccagacctaaatccttcatttcaaactccgtctttagttggaacttaaagtgcctaatctcttgtaaactcttgctgctggcaattaaaatatcatctacgtacagcaaca

SEQ ID NO: 193964 - DNA, 1404 bp, Cannabis indica
tatgagagatgaactcgcgattctcccaatcggcttgaactgctatccctacatttacggcattggttattcctccggccccagccattcaatcaataatctcaatgatcaacgatctgcaattgcaattgccctagaaattttacataaaacaataaagggttttggtctggtgtggactctcgtcaggttggcaccttcgacttcagctaactatatatgttttaacacaaaaactttaactaatctattttccttttcttttttctttttatggtttgatacaatcttttattcctttacaaactaaaaaatacaatctttattcaaaaaaaaatctatttctttgttttttttctttctgttttaacaaaagatataactaactaactaatcttgcaagcaaactagtagtgacgtttggccagtgtaatttattatttacataaaccaatatataagtgcacccatgcaccttacataatctcaattttgtttgtaatgattgtgtatattatagtgttaatgctgaaaaattaattcaacaataaatttgtatttcaatttggaaatccatacaccatgattaatctcagaacttatgcataactctactagtttacataatttctctaagatttcgaataattcatctttgcgtcccttgctctcgagctaatgagtatgtcgaaaatgtattcttacagaattttgactggtgtggtatgatcaagaacctacaatcatttttgaataatagggtccccaatttataggttggagtaaatgtggaatcgctctcttcctttgttccatttgattcgcgcgaactcaatctttttatttccttgcgcgaactcactcttcttatttcctcgtgctcttccttttttgttctgctctttaagctctgttcctctcgatatccaagctttgatacgctctttgagctctaacctgctacttaactttttttttaatgaaacggtgtattttatattttttccagtcacatcactttattagttctgttgttattataagaacaaaattacttttatatctcatggattattttaatcttttacaattttttatcggttctataatttttgagcttgtgacttctttagtttgaggatagatattgtggaaccggttacttaaaattattcacaagtgtcataataggccataatccatttaatgaagtaaccgtttcaaatttttgggaactttccccgcctttttaatatactaatttttaattttgaatttaaaccattgatatttatttaaaaagaaatttattagttttggtagcttgatattttcgactatctctgacttttcctccattctttgtcctttctctacaagcaccttcttgctttgttttccttc

SEQ ID NO: 193965 - DNA, 1349 bp, Cannabis indica
agttttataactgaattatcatgaactaaataaactataactgcacacggagcgcgtatttgtttcttagtataataaaagtataacggtacaaatgttaaaattaggaccaaaactaatacttatcaaaatatctctttgaaaaatcgaagataatgtcactcgcaactcgcagagtcgtagtcgtgtcaaacctaggaagaaggccctagaacagaaacaattgctgggaggggtgtgggtgtgaatgtgggtgggtgtgccctgtgccgtgtgggctgtccaccagcaccaagctcgggccttgtccttacatgttttatagacagccagccacacatgttgtcgaaaacataggactccctcgtggctcattccaatacggttggtaagaatttagacctgttggattggaccttcaaccaatagttggtctgtatcatatagcagactatgtaggcccacttttaaagaccacaggatgtgatgggctttgttggtttataggcccagttctccactcacaaactttgtcaactcccaaaaagtaagagaaaaagaaaaattttacaattattaatcatgataatggcctttagtagctgagttgggtttggaaagtaaccaaaattgcctttagctcagctttaaataatgtatagaatgtgatgataagtcaatccaagcatcaagtaagtggttttttgttcctttgtttgctaagtttccaagtgctttcagacaaaagtactcattcaagaggataagagaaatggatttttgtttatttttgggccttttggcttggcgttggtactcttataatgtattgaacagtgctcgtttggctcttatatagtgacaattcttgaattattgcactaacccaactcttatgaagttactttttgattggtttatctttgtagttttcttcaatcgtaaatttaaatatccaaaattagatcttgctttgatttttagctatgaacaatttcgggaaagtgacaaggttttatcttagtttaagataacgataaaagagaattattgtattatgggtcaccttaatttgatcaataatcattctatttttcaagggttcatattacttttgctatcacctttgattttgttgcgccatttaataaagaaaggaattaatggtcaatgccacagtccttcacaaattattatttacatgcaaaagtaaattgaacattatctctatatttcttagtactaatgcatgtcactatgaatttcgctaataattttacttaaatataataaaataaattcttaaccaagtttaatatacacgtagactaaatgttgaagatacatct

SEQ ID NO: 193966 - DNA, 1517 bp, Cannabis indica
tttttttcttttttttgattttcactttttaaatttggttacatatttcttaataaaatattaaagaatttctatttgcctaaaaattatcttgaatcaatttttttttaataaaaagtaactaattgttatattatttgcaataaaagcaattaaaaggttgcttttaaaaaaaaaaattgcaaaacactgaaatttctaaaaacgagatttttcacatttttttcattttcagtaaatattttagtttttggtatttatactgacgtggtacatcgatatttatgcaaataattttcttgaaatctatttttataaataaaattaatttaagtataatattaaaaaaaattcttaattaatagaaatgcatgtaatgtgtcagctgtaaatattttagaaaaatagaaaataaaggttaattaggttatttttccttaaatttcgacttttaaaatttttaggtagttaagaagtattcgatttatgaaattgctaagttcaataattttcaatccaaataaatctgttcaattttaaactaacagacccctgaagaaaattcagggaatacaatttcatacatgaacagctattaattaaaatcataataagttgttatgggtcagctaatatattatttgatagcaaaattaattaatatgtgatatatttaactgtctgcagaggcattttcaatgggtgatgtatatgatttttcaatatgactaagtaacaaccatgcatatgtgtagaatttctttagtgacatgtacagcaatacttccaatcctgttggtattgaattgactaattacttacaattataacaatgacacttatcgctttatacaaaatgtatgagctgagtattaatttacgtatacatatatatgaactaacacctacaattttgttcctcatcacttaattaatttgtttctctttacaaattattgaataagtgcaaaaaactatcacttcaaccattaaaagctaatgggttgccttttcctataattcaacattgctttttagtagtgcatggaataattttatttaagcttaattattagttaatgttatgtgtattttttctcttatattagtcgccactaaataaaatgagatcatagcactatcatcattttaaaactcatagacaaatgactcttttatatagtatttattatttatattgtcttttattatataaaaaaaaattaataatttttttttatatatttttttaaaattagaaaaatattacttaaagattatgttatatctatattagttttactaaaatattttttattttaaagttatgtcgattttttaatttttataagttattgtgaattgctggtatataatttttgttgtacaatatatttatgttttattgtattatatattattattcttaaaagatatttattttttattttgctatgtataatagaaatatacaattttattaccataatacaaatattttaatatatgtatataat

SEQ ID NO: 193967 - DNA, 3918 bp, Cannabis indica
aaaaaaaattctgcgactattttatctgaatctaactgaagacatgcacttcattttctcctccagttgttttttgagaacaccgaaaagaatgctgatctcttggatggtcttctttcattagtttgattgcttaagcctttgttagcatcaagatcaactaatgcagggcattcgggctcagttgtaacatctcttagttgccggattagttccaatgcagggcattcgggctcagttgtaacatctcttagttgccggattagttccaatgcattcacccgaccccgatcactcccattgatagaaatgttgacaagaggaaggattatctcctcttccatggccaactcgcaatattcaattcgttgagagcataaagagaggaggatatcaacagcatgctcttgctcctcagagctgccattttcgagaacttcagcaataaaagcaatgcatccgctagtctcggcaacagatgcccttgcttcttcagaagtgcagagatttttcattataactaaacacttttcaacaagagctttattggaaagcaaagaaaccagcttcgggatgcactcaaaagaagcaatgtgagaacaaacgtcatgatttgaggacaagttgtgcaaaacctttacagcgcgctcctgtaaatctcggttctgtgagtcaagagctcttataatggatgttagagcaccagaagccatgatctttgatctacaataagagtaggtggacaaaacttccatgatggtgaaaacttctccagctactgacgaatccaaaagtgatgttaagagatcaaatgcatcctcacgtagatacaatacttcatttctgcaatgggaagcaaaagagtcaattttaataaaaatcttaaaagccatgtatggaataagcatgcccacataatgaacagagaacaaaattacaaatttataaactttttaggaaaagaaactgttaagttaaacaaacaaattacctgtttttgctcacaaatgtcaacaataactgcaatccattcttcagagcatttacatcattagaatcatgtgcatccctcaaaaatgcaatgagtggttcaacaaaattctcatttgacaaagaataatacattttttcattgcacttcaattgccttttgacttcttcaacaaccttacatcgcggttcccaagaaagctccccgaggttggataaaaattccaactctggctcgttgtttttaggaggtgactgaaacttaccaaaaccatcatcgatctgagcagaactcaagccattagttgtcttattgcgtgaagaatccgaactgaaactattgtctacagatccaattgatacattgctgaaatccatttggagtcgaatgtcattcatggaactcccaaagctagcaatggaagtcgaagaaaactccaatgactgtggtgcttctggtactgtactagggtcggtaagcttgaccccattttgactacaccaccttgaaatcaattccttcatggcaacatttgaagttattgaaaaatgcattaatttcgtgttagtttttggacaggtatcatgaccctcatcaaaccacttttggatccacatcctttcatatgattgtccagaagcaatgacaactggatcatacatcaatttggaagatatggggcacctaaattcctcagggagcacacctctcatcattatgttctcaacatcatgctgtctgtatctaatacgcggttccacttcagcaacaaagccattaccagaattttccaacaaaaacgagcttcgatgacaagcagaggcactttctgtttgatctgggatgaccaagtttccatacttcttgaatagatacaaaaagtatgttaatatcttcttcttagtggaatcagtctcagaaactttacgcagcaacttttgaattgatcttttctctattaggatatccttcggtgataaaatatggagccttgatgctgcgagttgaagagctctaatttcagaagtttccatggaatctgatgaagaagtacctctttggatcaactcccgtagaaccttcccagcctcttcttcacaatgatccagatcaaatgtttccaccgcaagattatcaaccatatgagaaatctgcaaatcgcgttaataaattagactcttaaatgtaggaagactgaaggctacgggaagaaaaaaaaatctaatacattaatgcaaattgtttcacaaaattaaaagtgcaaatattttctaggtgccgaagaaacaaaaaaagcaaaactagacaggcctcaaggtatgtgaattaacaaacctctgctgatagtaaaactggaaccatatcttgaatttgggataaactctgctcgattaacttcttcgttttgttacatcttgactgtatcacatcccccgttaatgcctgtaagtaatttaaagcaccattaaatattatactcaattctagctacaaaatcaacagctgaattcagaactttacagtgacattatcaaattaattttcttggcaatattacattgaattatggtaatcattattagacagttcaacaaaagtaaagcatgtctggggttcacaagttttaccaagaatcaaaatatttaaacgacagtagcagatcgaaacagttgtcactgagtcagcgaatcacattagaaaaataagtgtgtttcatatcttgtttagcacaagaggatagacagatcatgtcttctttactaagcagcagcattgatgaacatcaaagtgataattgcatcaaaatatattgtaaatactatgtcctctttgaacttgtttgaaacaattactgaaatttatatcattcaaaggaaagtcatcttagcaacatccaagtatacacaccagatagagtttactagagtcgcgacaatagtccagaattgtcttggctttatcgatggattgacttaatgtgcacaaagcttgtattcctgttgagcaccgaggtcgtgcatcttctattttcggttttatattcaaaattctctcaactaatgccttgagctttaagcacattaaacgatgaacctgcaatcataaagtactaaaccattacaatctagcattcaaatatagaaagaaaaacttaattttaaaatatttatttatatattcattgatccaaacacactcaagtttgagcttcctcatgaaaatttctcttaaaaacatctcattactgattagttttctatcccattatagaagcaccacagggttactctttatcttcttgaaaaaaatctataatagtaataatttccaaagctctatgaaaaggctagatttgattctctcaaaagaaatacaatttggtagtttaggaactcagtggctattctgtttagatttgaaccaaataattatgcccatcagttacataataatagtcaaagtaaggttgaatgtagttcaaagagtggactttcgtgatgtatatacatgtgaagagttgataaaaacagacattctggggctgcaataaaaccaaattcaagctgaaaacaagttgtgtgaaataatttaccttaaatgagcgagcattcgagactgctcccgcaagttcagcaacatcagttcccattcaaacgaggtttattttatacctgagcattcaaaaagctaagaggaaaaaaacaattcaatttcatgtctctaaaataatacccagtgatatgacaatataaaaaattatttatgacattgtatgaagacatccctttaaacataaatctgagaataaaccaaacaaagctgcgattaaagagaatcattgttcacttaaaaacactaatttagcaaatgacaaattgaaagttgaatgaactactgagtataaccgaaaaggcctcattcttgac

SEQ ID NO: 193968 - DNA, 2262 bp, Cannabis indica
aaaaaaaaaaaaaaaaccagaactttgacgaaggagagcttcagtagaacaactatggcgaattggatctcttccaaactcaaagctgcagaaagcattcttcagcaggtcaatttctcttttccttcttctttcttaaatcaaaaaatttaagaaaatgaaattattttgttattattttcctgtttggttcccgagaaagcacgggaaactagagagaaagctgtttaatttcggttccaataggagttgatctgtcatttgattgtatgtttattttgtaattttgaaatgtgtgattcagattgatcagaaaactgcggattcgctcaagaaaaatgagaaatcccaaattgacgaactgaatttcgatagtgaaaccaaaaccggagctagtttgcctctaaaggaccaattcaagaagaaaactcaggtaaacagtgattttaatggaacattacgtagtgatccgactagtcttaagagtcttagtgttagtaatagcaagaatgagagttcgagttcacctaaagaggttttggataatactacgaaacctaaaacaactcttagcgatagtgatttggactcaactccttagtactccaaatccgcctacaacaacatctggttcctccagtcgtggtaatggacattctgctattcgaggtttgaggaaagatggggaggcggtatggtggtgctgctccggtttcagctggatcagtaggttaggaggaatacagaagaatagtaaagagtagtttcgaagtccggttaaggagaacaagtagtgtggaagaacacaagttgaatgggaaagccagtgatggagatgatcccgggttttcagattcgacaatgagatcttccaatgctaaggtggagagtgatgatggtggtagtaagattctgaaaagcgagaagttgataagggaaatgaagaaagtgatagaatttcgagtttgaagacatctttgcagtcagtaaatgaaaaccgtattgctcaatctgaaatggtgtcaactgtggagaaagttgatatggaaatggggagttctgtaacgaggaaacatgattctagtaatgtagcttcgagaagctctacatctgatgatctaaagaaaagtacttcttcaatgagttatgagagctctgattctagatcggattctggttcgagttctgattctgaagatgaacgggaaagagaggaaaggagaaggagaagagaaaagattttagctgaaaaggctgcagctaaagctggggaagctatcaaggaacgggaaaatatggttgccagattggaaggagagaagcaaagcttagagaagatacttgaagaacaaaccaaacagcaagcacaggaggtaaaattttcctggtttttttgttgataattttttcttttaatagaaacaaacattttattaatatggagaaaatacaaggaaataatgtggtgtaaaaccacaataatagaagtaaaaaaaagactgattttacaacagaaaaccccaatatttgcaccatatagagaagattaggttgcatcttgttatggtattcttaatattggcacctgattatgttgatgaggttcgtttgaataattattagaatggaatatggggaagaatttgatattattgtatgtactagtgtgaagcataacgcattgctgtcttatgaaaaacgtattctgcatcctaatacaagctatttttcgaaatactttgtgcatttttagctttgctagctcaaacattgattcaaaattttttgtttaaaacttgtcaaacattgattcaaaagttttgcattaactctgtacttctttttcttttccatcgtctaggcttcgaaactgcaattaactatgatggagacaatggaagctgttgagttggagaagcaaaaacataataatacaagaatggaagtcttagctcgattggctaaactggaggtattagaaattgttttgttttatgcattcttttcttcaataaaatgcatctaaatagttattttttttctgttcttttgctatttttggcaattgattctttacaaagtttaggcaacacatatttttgttgactttgttgttagtggttactaaaggtgaaaagtgttgcagactgcaaatgcagacctcgccagatctcttgccaatgtgcagtggaatcttgaagtagaggtatgatttagatgcttaactaattttcctttcaaacctgtcatgttatttcattt

SEQ ID NO: 193969 - DNA, 2964 bp, Cannabis indica
ctcaaccaaaatgaagcaatgaattagtgaatcaaggcagcctggaaagggactccagtgctcttgatccacttatctgcatctaaaaatgggccaggtgtgaattgcgcagcttcattcttagttatcacatggaagcccttccatttaactctttggtctgtcttggcacctggtccagtattcccgtattcagcgtagtataatgtgtctagcccaaatgtcccttcccaagctgaccatccagcaggagcaatagcgtcactaatggtgctctcaataaccacagtcctcgagaactctctccatggcctgcccaagtaggattttatggttaacttatcaggaatcaacttctcctctggaacaatactacagttgtggagcacgatgccagaaggctgatgttgctctttcctcccttgagctgtgacagcattagcttgaccatccaagggtcgtctcaatatgagttgcgagttttggataacacaagggctatctccaaaaatgaaatcaactgtcctgaaatgacacactggctgtagaattggcgaccagagagcacatacaatgtgtcttggtagccatccatttggcagttatggaacaatgccatctctcccattactctaagtgccactgcttggtgtccctctggtcctgccgtgttctcaaatcccatgtccttacaaatgaatcctgatgcttccacagctgtaaggaatatgcatgtaagaatgataatttaagaaaattgttaacttggatgtcactttaagtggtgttacatttaaagtataaaacgtcaatgtttttttttttttatttgaacaatcaagcttcattgcttcagatattaaaatttatgcatatcaatatatcatattattacttaccaaaggaggctgatcgtaaggtagttgaccctttggcaaaacttttgctcccagtgacaacggtggcttttggaccatctccatacatgaacacgttaggcatgctcttatccactgtgatgtactcgtcatacactccagccttgacgtgaatgatatattttcctgtgagaccagatttagggtaggcagccaaagcagcagctattgtcttaaattgaccgctaccatcctttgccacaacagcttgaggtacgattttctcggtgcttgcttgtaaaagcttcctatctgaagcagaaacccaggttggaaaaccatcattattggacaaaagacgacgactgttaaggggtttcgcatcgattttcaagccaaaggcatcaagaatatcagacagcccagaaacaatggctaaagcgttgtcggtgagagcagatgcatttcgtaaagtgtctttcatgtgattttgaactttgggctctggtactccatcgatgcatgtctcagcataggtgatgacagagctcaaccaactcttaagctcggctgagcgttctttgagggtatgtgttgcactttcaccaaccatggagaatgaggcttgaagttgatcaacagcgaagctcaacaaatcgttacagtcctcaagggacatcttcaattttggattgttggtgctgttggcctcgaccaacaaagaactagtcaagttcaaggacttgctaacttggtccatggtggctaacatggcagccttgagataatccttgaactcggcgctggaattagtggcgacaggtttaaggctatccacgcaagagttcttgtagttggtagcagagcaaatcaattccaatgtctttgtttgcgaggagatgctattgccatcaccaacttcctcctttttttgattttgaacgtttactatggcgactacagctagggcaactcccactaccaatacaatagatagtgctgacacaactactttccccagtgccatgaaaataaatagaaaaacctatatataaatatatgtatctctctccgacctcttatcgaaagaaatcaaaaactcgtaaaaattattaaatttaccaagtacgtatatacgagatggtcggagagagaccagagagagagcaaaagataaaattagtgctaatgctagaaagagaggagggatatattcacccttcctctctttgtaaaggagtactttattaatttattactgtttgaatatatttgcttgcaaatgaatgttcttatatatatataaaaattgagttatcttaaaatagcaaggctatatataatataactgaattattccagatctgatttgactcttccaccaaataatattatatgtccttatatttttttggtaagccgatatttaagcaacttaattaagtcttgctttgaaatagtatgtctacatatatacaattaggattaatatgtattatagatacaaaaattaagaaggtaaacatttggataaacttacactggataacagggatggatatcattcaactttgtacctaaatttagtgtccaacttgtcttgcctatttattattatttataattttaatttgagaatataaccccgagtctcataaatcataataataattgaacctagatattaatttttttttatgtatatttattttataaatatataattaatattaatattattcataatattaacttctaattaattaattttataatctaattaccaaataaaaaataaaaataacaaaatatcatatataatatacatttataagtatatctatagagataataatgtgtacattacttggaagtctactaatacttttttgcattttgtttttttttttctttcagttaaagaagttatgccttttttggctcctaattgactggttgtttttgattttctagtttaatgaagttttcttttatcaaaaaacaaaataataatatgtacgttacatatttctcttttcatttttattataataaacattacataatcattaaatataaaattatt

SEQ ID NO: 193970 - DNA, 1396 bp, Cannabis indica
tataattttctcaaaatttataaatagttctaatatcaaaatttatatataactagatataaaaagctttctagaatgtcaaaagagataaagcatatatactgaaataaattattttcaagggtgtaccgtactagcacgatcccatgaaaaaattaaatttttgagtcttaatttagaaaaaaaaatgtgctattagtttttaaaaattagtaaaaaaggtatgaatttaaaaagatttttttagcccctaaattaagtggacactaaacaaaagcttaacccatcaataccgccggacctgcgtactattcatataagtaaaatattgttattacctaattaaacattatcttatatatatagcatggtcataaaacttaccatacaaaccattgtggatacaagtgaaaaaagtccaccttctttctctttcttgaagaattggattagtcaaagggtagagactaagtgctattgcattgtgaccaaacaaacaagccatataaagtggcaagaggtcatgaccacctcgagtgatggccaaatcagaattttgatgccttagaatttcaatgacttgtgaagctccagctgccacagccaaggagaatggtgtgttcccttctctgtcttgtaaagtcaaatctatggtgtctttcatttcgttgaccatcattttgaccagatgagcttggttggctctggctgccacgtggagaatagtgtcttgtctgttacttatggatgcatttagagcttgtgggtgatcttttaagatgtctttcactacattccaatctccacttagtgcagcatagtacaacctcacacatactttaaagtattcaattcttgaccctataaacatacatatatatatggagaaattaaaggtgaaaaagtgaacttcattttttactaattcgagtatcctaaaaatcccgagcattccaattcacgtggcagatgcaaattaatcgactattgaccaacttgcatttacctcgtgaatcaggttgctcgggatgaaaaacatcatgctaattcacaaaatagggtttagtttattaccttgtacaaaatgaggggaaggattcctaggtggaggtgttgatgttgtagagccaacatcgatacgagactcaattggttgtgatggttgactttgattttgattttgatttggatcatttgtatttgttgccacaactgcttgggttgtagatgttagcaaactagaacttgcttccgccatttttattgattcatctatatttcataatacatacatatgttttgagaaaaattcatacacactatataacaatagattattaagactaggagagagagagagagagagagagagagagagagagagagagagagagag

SEQ ID NO: 193971 - DNA, 1773 bp, Cannabis indica
tctgtttaatgtgcagttagctgccttatcctggaggtcatttctggcccttctcgtggattacgccactctgtactttcaacaaattcaaagaggcttcctctaactcttggaagaatttctccaagtgacattctgataagggattcagaggtgtcagggaagcatgcaatgataaactggaatttgaatgtaaggattttaatgactgtactgcttggacttgcttttgtattgcatccactatggtgcactaattatttcgtacttgaaccgttggcttcaggattcgagatgggaactgagggacatgggtagtcttaatggaacacttttgaattcggaaccaattaatcatcctgatattggaagtagacactggggtgaaccagttgtggttgtaagtggagacgtaataactcttggaacagcttcaagaatatatgtaagtctacatacttttgttgatttcggcataacatattttctttttcataattttctttgaattcagtttaaagtatcttctaacacagtagaatctatagaaaacactggatatattttctggtgcggcttattgaatactactacggtgtcctttttttctcttaaacagttgaactgcaatttcatacttatggttgatctcgtatttgcaacttttaaccaattttaacatctacctcaggttcatattaagtcacagaaggaatgtgagatcccctttggagttggtgtggctgcagatcccatggctttgcgtcgcggaggaaggaagtttcctatggaagatgtatgcttttatcactggcctcttcctgggattaatcaggtactcaattctagcgagcttttctttttcgttgacaaatttgcatttctccaaaatatttgatagaagcttaactttgcagtttggactttttggtatttgtgatggacatggtggagcagatgctgcgaaatttgctagcaagtcagttttatcttctctttacttcctttctgttttccaaattctttcatctgatagcctattggtgaagttataatagtagtgagaagtagcctcattgtccagatggcacatgtttttagatgtgaaaaattatgtcttaggatcaatggttaatgcatcatatatgttgatgtacagaagctgcttttctttctctgacctctggagtttgttcgtctttcttttcatatgcgtcaataaataatatttagactacttaacaatcattcccatatgactagttatatagatgttccagttcttggtagcgtgtgtgtgtgtgttttatcttgtacagcgtagtgatatttctgttctgcagagtgcttcctgagaccattgcaactattttgtccgactcccaaaaaagggagaaggttttatcactgtgtgatgcttcagaagttcttagagatgcattttttcagacagaatcatccatggattaccattatgaggttttctcctttcttttttttctttttctttttggttcatcctttgcatattattattattatttgaaactcttgttttagtgtgtacaagatatattgttttgaaagaaagtctatgcccctattaatgggctcagcaagcaggaaaaatcagaaaaaaaatgtcttcatatatccactatcttttcaataattttgggcagtgatatgcggttaatgctatagtttatgctaataaaacagtttttacacaggttgtactgcacagtgctctggtatgggctgatggtgctg

SEQ ID NO: 193972 - DNA, 2602 bp, Cannabis indica
aaaacgggccacaagtacttttgttattagctttgagatgacgttgcataggctgatgggtcaaaagtctttcatataatgagtctttttaattttcaggataaaggtgatgagtgttttgttgaaaattgacggattagccccatcatttagtaccgccaagactgctttggtgactaaacttccaacaataggccaattattctagtagaacatagaagaaattttgtcaactctaggactaattttatccaatcccattgagggaagggttgattccacttcaacagcttgaaattgctgaagtaaagctgcattcatgtcatcagtaatcactaaagggatggtgttaaaagtgaagtcaagagctacttcatcaatatcagatgctgaataaatgttgacaaaaaatctcggataacggtagctatttgggttttagattacactttaacacccgcatctgtatagagaaacttgactttattatttgacttcgtagcagattctctagcatgaaaaaacttggtgttacgatcacctgaatgcaaccaatcaattcgtgagcgttgttgccaataaattacttattgctccaacaaggcatcaagaatagcttccgattcttttatttcagccattgaatcagatgtacaggtgttgtttaaataattaactttggactgtgtttctgctatattcttcttcatacgcctgtatttagcaatgtgccatgtttgcagattgtttgcacaaacttccaagttttgaagcactatttggatagggtcatccgattcattattaaaccagctgttggtgatgattttgttgctttcaggatcagaaagtcataacttttcatagcaaaactacttctccttttgtcatgttgaggctgctactgcactgagatttgagcaaaagacgcaaaaattgcacagtgatctaagtgataatagtccaggtgctgcactgtcggattgcagaaagaaagatcccaaaaatagttgacaaaataccaatctaaccgctctttaactgtatgcacaacagtacaattctttatccaagtgaagtggtctccttcgtaatgagtaccatgtaaagagcaccgatctaaggcatctctaaaagcctccatttgagtttcactgcgaagattacccctgatttatcagcattagtgaggattttattgaagtcaccgatagtaagcgatggttggagtggtgcaacatcatgaagacatttgagtagagtccaagaagatgctctgttagtggcaactggttcaccatagaaaactgtgaaatgaaagcttggacatccattagccaccaagtaacaatcaaaaaaggtttgaccataatttatcaaaattatatcaacatcatctgtccataagaccataagtcctccaccaagtctaactcttggagattcaagaccatgattgaaatttaaagatcgacaaacacgcgacatatgttgaaaatataattagaaaattaaaaatgaactgtattactatgtgggtggttttctttttctttcttttttctaaaacaaattaaaataaataataaaaattattaatctcttatgaaataccctattataatcaaattaactactatcatttgattgaaaattaaaggctataaaattgctcttagttctgagtgcaaaagtgatactcacccaaagagtactttatatatatgattttttttattaagctcaagagagaaaattaaatgcctgcaaacatgttattttacatgtaaaattaaatacaaatagtgtacctgctttctttttggtgggtaaccctatatatttcttaatattaatttgttacttgtcaccaaccaaaagtagcttgaagaacttctaacttgattcaagatatttatttcattaaccccaccctgatccaattccttatatatctatcaactatgcatatttattgtatatgagtattattatttcatattttatgatccctacacgacactatatattgtgtgattgatagaatatatataatttaatatttttaaaaaaaattaactacaaattcacacaacaatcaattcaatatattgctttaactttatattcatttattattatgagatttgaagatatagaagccatgatacaatgaaaaaaattagagtttgatagtgcaagttttttttagtaagtcagtatgtatgatcacaacaaaactcaattacaaactagagccaatctcaaaaagaaacaattaattacaaatttttatgagtaatcctacccacttttgatttacactattaaaactttgtacattcatatattgtaatttaaaataaatcgaatgaataatattttttacaattacatatataaattgctggaaatttttgctcccacaaaataatatttctatttttctaaataaaatatactacagttataatgcacttgataatgcaatattatattaacttatatatattaatgttttttttagctacaaatttctagtaagattgcgtctcttcatcaaaaatattaattaaaaagctcacacttttatttaattaaa

SEQ ID NO: 193973 - DNA, 3427 bp, Cannabis indica
ctaatcaattttacaaagttatgttaatttatgattttaatatttaattttgatttttgattgcagataagtatttaaatttaatttttaacagtagtataaagttatatttttaaaatttatgtatgttaagttattatccacatgtcattttcttattagtatatataaattaatttttaattaataaaaaatatgaatcaattaaatattgtcacgtgatcattaacttgacatttaattaactatcgaaaatttcaaaatataattttggtattatgaattgccattaaaaattaaatttaaaaatttatatgcaattaaaaattaattaattaaacttaaatatttatactataataaattactcacaacactaataactatttaagtgttttttttttcaagtggaaagacaaacctttattatactacaaaagaagaaaaagtcttaaatggaatgtgaataaatttgaggatacatacacaaaatttacaaattaggcactatatgtaatttgggaattggatggtgcatggtacatatataataattcagttttttcatgattaatttccccaaaagttgatcttatcaaaccgtacgactaaaaaataataataataataaaaatacaatatttataattttttgctaagatatatatatatataattatatattatggatatatgatgaaactgctattttcagtagggtcaggtcagggaacaattatatacatcaaacagtaacataaatataaaatgaaactcagaccactcaatccaatttttgaatccagcaaaaaaaatggtataaataaatgtttacaactgtatatatagcttctgtacatattagttctgatgttaattaaataaataaataaaaaaattaggaaaggaatacgatcacgtacacgtttttttattttattttattttatctgcgtacctaccaaacataataaattaattagtggtgaccacaatctttttatttaagaaaactaaattatatcatatatatatatatatattgtatttgtactctgttaattatataatttaaaacatgtgatttctttatttgataaaacgtatctaacattgtacaacatttaatgtaaatatagtacatatattattagcttttcacttaaaagcattgactgtcaacttcccatggtttgttttgagagatatatgtgtataatttgttgtatatatagtattcaatataactagaataataaatatatttatatggctatatgcttatatatatatcatatatttacacaaatatctcattgcttatttaattatatacatccaaagcctatgatagagttttgagttgaggattaatctagttacttatttcaaataataaaaaaaaacttttattaattagtgcaattaagaaaaagaaaatcttcactaatgtgtttattactataattatattccctaaaaaattagctaaccataataaacatgttggcaaaacctctttttaatattttctctcaaataattaaacatattgataatacatgtgagaattaaaaattacatataagctagatgcatcacttatttcattgttaattaattagttttaaaaataaaatctcatacatctttctactcacacgtatctattgtatcttctcattcattcaggattgtattagagcactcacaatatatagttaatataaaataactacaaatgtaaaaatatagctgagagctaaaaaaaagttaaatattaatttttatattgtaatagatcttgtagtattgcttatactttggctaaattaacttgctttgacagctataaaatgcgtagtttagttgtcaggaaattctacttatattcagaacttattaataacgaattttatttttgaataaattttcgcctcacttttatagtgcgtttgttgttcttgatgtttggtggttgagaaggttatctcaaaaaaaaaaaaataaataaataaataaatgtagctacaatactctaaattttattgcagtgtgttttgttaaattttgagtgtaaaattatatatacatccagaatataatctataatattttgttatttgtatattatttaaatgatacaaaaaaatgtaaagaatatgatatatgatataatgtaaatatatgtaaaataaaataaaattttaaagaattggtgttgggagtgttctttatgtttctattcgttgccattttatgttagatgatatgtctttttctgtttaaatttgctatgaccaaattttccttttaaagaaatctcatgcatatatatatatatattaaaaacgtataccatatattataaattaaaattaataacctatgattctttgaatgtggtggtatgaatttcaatatatttgaagttaattggatgtagaagaggttgatgaggtttttgttttatcctctattaattctcaagttgttttttctttttttggttgaaagtctcatatgcaatctgctggggttacaatttacagatcataaatgctagctgcccaactatatatataattcatccaaaatatatatgaaaaaaaaaaaacgtacgtaaccagccactagattaattattaaattgtattaatataacaatattattattttgaatctcatattttttaaaataatacaaaataaattttaacgttaaatttttatttatttatttttttcgtaatacaaacttaaaactaatttctagttagctagatgcaaaaaaaaaatataatttcttattataatgctcccaaatcaaattattaatataaaaataaaaataaaattattatttaataaaataaaaaatataaaaataaaatttctttatgccgataaaccctaaccacacaaatatgtgatgagatatatcttagttatatatagatggtgatatctatctatacatataattatatacgatcgagacagaacaagaacgtttctataaaatagtccaataagtttttaaattgtacgtacatgtgtcacgcaaaatttttaatatttattttaacatgattagtatgtggtaaatattattaataaatctagtatttcttaattacttgcatcaaatgctaaattcaacatgaaatatttttatttgttctaaaagcaataatataaaggagattatgttttattagttatacatgaaaactctattgaaattgtgtttggttcaaaaattgcattgtttagttaatttttaaaaagaaaaaacttcaaagtctatactacatatgtatatatttttctatatatgtttatacataatatatatgattttgttaatatcattgagtaagataaaggtggaatttcttggttctttttattgaagagtgcatat

SEQ ID NO: 193974 - DNA, 933 bp, Cannabis indica
atacgaagtttctatgaattagcaagccaaaaaaggtaaaatcaaaaccacacatgtaagctaaatccatcattaaaaagcacataaatcaaagatttgagtatctcgaagctgttaggaatatgggacccaataatatagtctaggaagctcttttagtaacatcaaagctaacaaaaaacaaaaggacaaacaaacagcctacatgagtttaagtacctaacagggaaaacaaaagtgggtaggaaaaaacacaatcaaagtcatccaaatcaacatagaaacatcacatataaatccaactcatataccaaaatttgtctatgtattgaataagatctacattgttgttaaacttcaagtgcccagttatcaagctcaaatttttacctgaggctcagtgaacttgacccctgaccgggcggcaaggccggcgagatcatgctccatgtactcaaataccaagtaaagactacaagacattcttgatgtagctaatccttcaagcttaagcacattgggatgatcaagctttctcagaaccagaatctctctggccatgaatttaacactctctggctccaaattatcaaacctcaccttctttaacgctactattttcccactaagaagatctctagctttatacacattgctataagtcccttgcccaatctgaacaaaaaaaaataaacgataatgaagatgtttgattttaagatttcgataaataaataataaataaataaataaataaataaccttagccagtctctcaaagctattggcccgacgaggggtccaaccctggatcgcatctccggcagcggctaatagccaagaaggccaaccttgctggttagtaagaaagggttctggcctaggtttccgttgctcaacaaccggtaaatcaccgttccgtttactcgtcct

SEQ ID NO: 193975 - DNA, 1424 bp, Cannabis indica
tttttttttaaaaatatttgtttgaattgtgagcttagcccactttagcttataactctcatcatcctcatattcattactaaaattctttcattgcttccatgaaaaatatgacatagtttatttaatactaggaaaagaacataacatcacattatttgtgtatgcatatatatattttctaacaattaacacatatttatataatatattatttttctttaattttttacatttttatgtttatttttttttaatatttttacaatgttctataaaaattatacaaaaataacataaaaataataagaaaataacaacaaaaaatcaagaataaattaacaagaatacaacataaaaatagattaaataaatatattttctataaataaaattataaaataacaaaaatatttaaaattctggacaaccatattttttttttgttattgtgaattaatcatataattaatttaaatgaatttactaagtactaattatatttttttcctttcaagtaaaaattgactacactatattgtatacagctttgggatctaaaacatgaccattcaaaagtcccagccagtgatgacgtcactgaagaacaggtactattagaagtggaaagatacgaagaaattcttggaaatagaaggcattttgcgttacatgcctttgtttcaatactgtcgtttctagttttcgggttagtgcctcctgtcgtttacggcttctcattccgcgatgagagaaacgacaacaataaggacctcaaactcgctgccgttgcagctgcctctgtcgtatgcatagctttgctgtcgtttgcaaaagcttacacccaaaagcggtcaaagtatataaaaacggtgtcgtattatgttgtcgttgggtttggagtgtcgggtgcttcttacttagctggattgtttataaacaagatgatgaagaggcttgggtggtttgaaccaactactcatgctatcactatgtctcttgatgaaatgagttggagttcatggcaataaattaaattcaagttaggtaatataagtacgtacggccatggatttttttttttttcttttaaaaaaattgtttactttcttatgtacaatatgtgtatgatgtgttgtgtagagttgatattttgcttaaacaatatgtttggtaggaattgtttgacaagaagaaggagtcctctcaaatttaaaaaatttaagtccttctaattttagggaggattgaaaaaaaagcaaaataaaaaattataaattattatttacaaagtaaaatattaatatttaagggctcgttttagaacagtattgtaattgtattaaattgtattttatgcaatatttttattgtaaaacttatatgtgttattaacttttattggacaccttaaatatataata

SEQ ID NO: 193976 - DNA, 1710 bp, Cannabis indica
agaacaaaaacagtgctagctagcacctctaagctaattaataatttataagttcacaaaaaagaaaaaaaaataaaggaaaagaaacaaaacccattattatacatatcctatatatggtgatataaatatgtatagatataggttacttaagggggtagactatacttgatatttattaattatgattcccttgtatattcacctatatatatatatttatatatatatttggtttggcaaaattgtgagtctacctaatataatcaatgaaaatgtgagtcaatgggatggctcatgattgttaatgggtggcttgcgacgtacccattcccttgtaatctttatgcattagactcactatctctttggctgcctcaataagccttcttgtttcatctgttgcctcctgtgagttataataagtagttattatataaattacattaaaaaactaatgtttaacatgtctttgaaatcatttccaattatacatacctgagagttcaaagtttgttgagacattcctaaaagagaatattgatgatcatttgaagcttttatatgatcctttcctgcaataaaatgagcaaaaatatatctgaaaactaaaccatattttgttgtggacatacaagagcaacatgtaactaatttttttttattttttttttggcttcaaataatttatataatgaataataattgtaagaatacaactaattaaaatgaaagaacaatctgatgattccaacatctaaaactttgcatacatacaactacatatttatatatatatgtgtgtgtttaaggtttgtacacatgtgatcatcaactactaaagctcctacaattagaaaaaaaagcacaaaaaataattaatataattaagcaaaaaagatcgatctatcccatctttgatctcttagtttttttttctttttttttttgactcaattatgtttaggagggtgacgtttaggcccatgataatcagcattgaaagccacaaaaccagctactaccactactttcttattagtataggccatatctctacttgtaatacttttctgatcatcatcatgatcttcttcaagcactttattacattttacatgactaaaacccctctttattccttgcccaccacaatttgatccatcaatatcatcatgacttgcacctgaaatctttgggatcccagcaacagcaacagcaacagctcctccagcaatattattgttctcttctctcatcatcatcatcattttccttcctccactcaataatgatgaattatctgaatgaatattaattaatattatgaacagatcataaataaatcattaattgttgatcttaaatgaataaagtaaagaaatatatgtatttattatattaattaattaccttgatcatattgatgagcatatgcagaggagtgagtccataagggcaatatgtatcatgatgagaaaaagaaggcctaaaatagaataagctgaccattctgtaaagatctctaaatttctctctaactatttgcttaattttatttatcttaataaaaagtagggctataattcttgttgttgaacaacaaaaagatcaggggaaatatgagatagagcataagaggggttttatataggaggaagagaactcttcttttcaaacccaagtcaaacttcctagggttcagatatt

SEQ ID NO: 193977 - DNA, 834 bp, Cannabis indica
atgataaattatacttacatgatcataatgacaagataagcttattattttcaagataacgttctcgatctatacaattaattaattcatcaataatgctaaagtactgtctactatattgtattttagttgtgagaaaatatgcattattaagtaggaaatatataattaataattaatgatgtttatgttataaatttctaaataaatgtgaaaaattcccttccaattataaaaataattgtaaatttctcctttgatcggttgcatctgattcgttttacaaatagttgtataattattgtaagaccaattcaaggttaatctattatgatttgagctagagttcagctaaaaaataattatatagattaatagtataaaatttggaactgtgtgtattcataagtaattttaattaattaattaatgcttgaatgtctaaggttattatttatatttaattatctaattaatttaaatttagttaaataagttttaatcctataattatactcgtggtaatatctacaacaaaagattataataaacgaaatgcaaccattttttttttaattattaattagttacataattagaagggaaagtgtcataaaaatataattaaaaaaaatatattttcaatcataattctaattctagatgtaaaaatcctatttattctatagtaagttaataatatatgcaatgacttatacaagttggtgttaatataatatagtaattagttaataatatatgcaatgacttatacaagttgcttttgtagagatctattcacgttacttactaaatgttttaatatactaatat

SEQ ID NO: 193978 - DNA, 1758 bp, Cannabis indica
aatagtacaaataggaccctgaattgaatttttgtcaaaataaagtttaattataatccgatctaaaagtgctatgacaaaactgtttacattttttgtatctgttcgtattaagcattgtcttcaagttggttgtattaaaaaaaaagttgtcaaaaattaagctcagggtcctatttttactattttagaaaatacagggtctattttgtcatttaacaaaacacagggtccaatctgtaacttttgcaaaacacagggtccaaaatggtatttaccctaataataatgataatgatgaactaggtagatgacttttcttgcattgtttgtagactcattaaaataaaaatagtagaaaattttctaatttaaaagaaaaagtccaaaaatatacacacacatgagatgagtgtacatacaattgtagtctgaaattgaagaaactcattcatatttatcacataccacagatacaaacgaacatagaagacccaaaactaaaccaagtgagaccagtcaacccctttttttgagctccatttttaacaagagaaaaaagaaaagatagtaaacatgagatatctactaaaatcttaatggttgatacaaaactttgttgatcatatatatgatatgtttactatcaatgaatgaatatcatatttccatatctgacttacccatagcattgtttgttggcatcacaaggcaacggaatctgtaagtaagactgtatgtaaagtgtaaacaaagatgaatattaaagtacattagacccctatccacaagaagaaaatctcaccaccattcactatcaaaatatatgttcccccacctatattagagacccaccatcatcaaatgaccaaggatgccaccgtgaacacggactggaccagacccaactgttttgtaaaacagcctcatcttcacttgctcagccagtaaataaatatgagaaaagtgcacacagatgcaacaagcgagagtatgatggtgtccatggacttttttctctttatcgaagaaagaatatgatttacctacaacaatcaagatatgtgtaacactcaattaggaagattttcttctcttcttgctaaacatgctcaattccaatatttgtagcctactaacattttcttttaaattattttttttagttattgattcatgacatgcaatacaaacccaaaaaagaaagaaaaaaaaaatcatttacgagctaatgtgtaatgtgtgaagataatacttctgttttatagaaaattaaaattataataattgaaaaacaatgagcaaagttaagttccataccgttggcaaacggctgccaatattgctgagcttcgaattgataccaccaaaagttgatcgttgcatgacaagagaaccaagtgttgcttgagcttgtgaaattacagtatccatctgcaccaacagtataaaatgagagaagttagcaacttaatctcaagccaaagagcacttcgagatatttgttgtcagaatgaaatgattaaatatagttagtaatctatagtacatataacccatatcaccagaaagaaagggggaaatgaaaaagaagaaaatgataacaattgagtttcaaataaaaaaatctttcagaacagtaactgttgtcttctccttacaattaaattagaacaactaacaagctgagatggccaaaactcagccaccgctagcaaacccataacagattttcctccatgtcaaaaaagtaaagat

SEQ ID NO: 193979 - DNA, 2242 bp, Cannabis indica
caagcccactattggaatcacacatatcttttctctacctatctcctctgacagcaacaaatttttcaaaagattcttttcataatctctaccaaaaaactcagaatcatcaatagatgatattgagggtggtttcagtgattgaatcttttccacacggtttcccaaatgaaggatgaacatgtgttctttaaaagtttccaacctctcaagaagattcttcatatcagtttttctgtccttatcagttgagtttaaactagagaagaatttccttaccttggttttgttaggctttaactctgcatccaccttatgtttgagagcatcatattcaatttcctcaaagaggttctcagcatcttccacagcaattttaagcatgtccagccactcctcaactttggggtttctcatcatctgcttatgctcagcatcaccaagtacctcagaaagagatagcaatgttgtcttcagcttgtcaagaagcccatcaaaaccagagtttttctttccccttaagaagcttgacccttcagaagaaacgatcttgttcagcaaaaacccaacagaagcagcaataacaggtcccactaccaactctacagccatgattctcttctcctcacaagtacaataaatgattatcagatgtttcttaattgctattgaaaggtaataagagaaaaattaaaaacattaaacattatattattacatcaacttggccaaattaattgactattcaaatacatgaattatttaagtaataggccaaaagattgtttgtatcatgacaaagcaatattacttatttaattaattacaacttcaaccaatgtggattgtttgtatgtctttttggtggtgcatttaatattaatttgtatagactaatggttacctaacataagttttatatgttccgccaggctccaagtccaactcatcaattattaacaagtacttggattattttcttttggcaaatacataaaggacaatatgaatatgtgaattaagaactagaaatatatgcataattcaataatgtgttcaagaattaaaggtatatacataaatctgtcaagtataaacataaacaaaatacccactaacaatttcaatggcttcgaaatcataaattaaaatcaaactctaagaacctattatgttgtcacgctagttttgcacatatctaatgataattttaacatatctggagaaaacaaggtgtggagattgtatagacctgttcataaaaaagaaatgtaaaacaaaaaaaatattttctttaggcaaaagtttaattaaatatatatatatttttgactaattagaatctttatcatgtaataaatcatgcttttgaatttttagtagctattaaaaattttccaaaaattattaaaattgttaaatctaaagacatttgtcaattttcattcaattttactaattttgtgattgtcgaattatatatctaccaaatcatgccccacatgtaccaaattaaggtctccaaactttcatctatgttagactttcatcaatagttcaagatatttttaacagtcttaaagtaacatgatttattacacattaaaattgaggagtaaaaattctaattaagaatttttttcaataaaacaaaaatagcatatgaagtagcctagccattactcatttaaaaaaaaaaaaacaaaaaaaaagtaagagtcgttactggcccactcatgaagtagccgttactctcccaaaacttcattacaagttaccagtgaaaacctttgaaacctaaagcatcgcctacagaaatggccgatttctctttcctctcagacacagacgcttctatggtggacgaactcatttcccaaacccgagatctctgcgttcttaaacaggtctccgccatcaactgctctggttttgtcgatactcttctctctaatgacctagagtcatgctttaacagactcaaatcctttctggccaaaaattccaattgggaaactttggttatctaaagaagcttattaacaagaatctctcattgactctgtgtcctctgtgtatttgctttgtttagtctgttagtttgttagttagtttaactgttatgacagttaaaccttttagtctgttggttgttacaactttcttaagttagtttagttcaccaactaattgagtccaccgactcacctattgtatatatatacctctgtacatacaattc

SEQ ID NO: 193980 - DNA, 1364 bp, Cannabis indica
taaaagtaaaattttttgtaatggtgatcgagaagatcgtatgtatagccgaaggccctacacaacgttgtacatagttagattgcggaacattgttgtactatgcttttatgtgttgacatcatttgaattggagagttgagatagttatggaattgagatagattataattactcctcaatattatagtaatacatcaaaattaaattttacaaaacacgggaaacaactgacaagtaatctatatattcatggagtaataaagataataaataatcttaaaattcttaacactaagtggtatgatttaccactctcacttctgacctcaagctagtaaaatcatacaagattttgtagtaaactatattacatatacataacgcagccaatatccaataatacttatccaaacgactgtcgtttaaggtttccacaaaccaactagtattatctccccatgcagtaatcttaagaaccgataagacactactaacttttccaaaaccgataatggccatagaaaaaatacccatgacatgatctgaaagagtatgagcttgatgattaaagactaggtcaatgcttttctctaaaatcccatcaaaacccccaagaaggaagaactgtggaaccaaccaaaacatactcatgggaattatttcaccatttttcatgtaaggaactttatctaatctgcgcttctcaatgtttgcagcagcaaaacaacatagtattgcgaaaattatcggcactgctattccaacacaaccagcatattttgaagaggccacatcattgtcatttctgccttcattattgaaattgagtagttttttcataattaccaaataaattatgggaaagattatttgggaaaattcatagcatagttgaagtacaccgagaggaactttatatcttccaaccatgttgttcatagtgtttgcttgttcaataaagtaagtttctcctattgaagatacaacacctaacatgaaaaaggtcatgcaaaatgggattttacacaaggcctttttagtttgatcaatgttttcgataatctccattctttgctcctcattgtcatatggtaatgttattattgctctatctaggaacatccaaaaattgttgtataattaaataaatctacgtgctatgtgtgtattgtataaatcattatgagtgctacgtttatcaatagaatgaaaagagggagatatatatatgctattatatctaaagaaatctacaattattgcaatttttttttagtttatagcttagatgataaccttagtttgataattagatgtgactaaaacacttaaactataaatatgagtaatgataaaaacac

SEQ ID NO: 193981 - DNA, 2538 bp, Cannabis indica
ccaaaatattctaacttaatataatccattaaaggacaaaagaattctagagaaaatactattttgcccccttactcacaccaaaagtctcatagccacctagggatattttagtcaaacctaacgcctcaaatattcccaatattcccaacgtttatgtatttgtcctgctactattaaaatactaaaatgtgattttaatagccaaatgccgcattctaatattgtggagcacacaatatgcgaaaacataaaaaatataaaatttcatgtatggcaaatataatacaccttgaattcaaataaatctccataaaattataaatcataattattaatctaatttcataattaaaccctaattatctgctaattctaaattaagactaagcggtctttacagatgtcatcacaaacaaccccttagggagctacaatgaggccatggagcctctcaatgaagacagtgtgcctttttgggctacgattgatcacgtagtggaagagatagcggctctagagcccttgcgtcaaagggatgagctggatgctacttgggagtcttctccgtccacatttacccctacgaggtccaagaaccttgaggctaaaattttggtcagggtcttccaactggcctgacaagtgaggagcaccttgcccatgcccctcttgagagttggatggtgtgttctggaccccacgcaaaataaggagctattctgccactctattcatactttaaggatatagccagctattttaggatctacccaacacagttgactctgtgcacaccttccgcatcctggaccatgaagtatccctagcatagccgccaatctttgacatgttagagtcatttgtgtcacccaactaaatatagcccagttggctaaaatagaagtaccctatctggccctgcacatggtttgatttcaaattagaaataccacctgatcttgaagggagaaggttgcgtccggcccatctgagtatacaaaacaaagagggcagacatatatttaatccccttcggagggctcccatatttaaccagccaatacccaccctaaagcttagggataaagctaagatagaactaaccatatcctttcttttccggcctcaaaacaaaatatttctaagttagcaacgaaagagaacttcatcaagtacaacctctatccttctgcgggcaagccttcaagttcctttgataagatttttaagaagaagaaagggaccaaaaggaaggaacttgaggttaatatcccctttgataagctttctgagaagaagaaggaaaccaaaagagagagggctgctcggaagaggcttaagtgggatgaatccttagggtaggttcccatacttataaggccttagggaacagaacttgcccatcatgtctgcccactccctgatgagggaaagggtaaacgtattgctagtgaggaaagtgaggaatagtcctcttcaaatgatgaatgctttcagggcagctttttttgggatgatattcctgggttggcggagggtaaagatttctccaacttatacttgtattcttctctttagggtaaatcttctaacttatatgccttgtgtctttgcaaatatggcttccaaactacaggaatttgttaagagaaaaccactgggtactttaagggaggaatccccagccaaagctcctcagaagggggagtcttgctctgctcgctccgacctgcctctgcctcctccctactttcctctagccatccagcccattgttaccaacttggaggggcgcccacctcttgtaaccaggaaaataagctgggtgttggttttatggtactaaattaggtttgcagcaaaagagttttgtatcatctaattatcattgtaccatatcccaatagatctccaaatgtatgtacactaaatcaaaataataaatagtaagtttagaatgaatacctcttgaagtctacaagggtatcctcaaaacttctcatatgttgtatcccttagtccagatgatgaggaaattacaattggactcaaaccagtgtcttctaaatcgttcgaacacacacaaagaatagtgtgggctattgggataaagcgtataggcttgttcttgttgagttcttaatacatgagcaagaatagatgagagaaaaaataatttcctttttctctctaaattttgaaaatttaagttaagattaagtattcttatttctcaaatcatgcctacttataatagttaaattccttttattttaaagcatatttaattatttaaataaataaataaatatctataactgaattctgttactgatatttatgagggaatctctcaaccacttgagagaatatctcaacaaccttaaaatatataaccacttttcaaattagacatttacctaattaaattaattaaataactaattaatccaaaagacaaactccatagggacatgatatgctataggtgcctacccttatcttcttggagaaggttggtatcttttgtcctga

SEQ ID NO: 193982 - DNA, 1564 bp, Cannabis indica
aaaacaatactttataccaaattccaaaaccgagactcaaaacctctcattaagatatgaaaagtacttatttcttcggagcaaaatcattaatatataatcaagaaaactatctaagtctttggctttatcaatgatacaaagtcaacaacccaaagtcttacacatcatcaaaaattgctatccaatatgagctgtacgctaccactcactgtccacaataacattgtaagaaacttcattctatgaaaccccagatagaacccaaaaataaatattattaaaaatctatataaaaaataatctttaaacatataaaaactaagcatgaaattgtatgtaatttaactgataagatcagcctcaaaaataccggcaccaccataccatagtatccaaatacagcctaagacaggttacgaaatcatataaaatccaaaaacaacactacatgccataacatattgtaataaacaaacgaaacaaaaagacatactaagtcttagcctttcaaagggttcttttggttttcttgtttctttggtaaaatcaataatcatgccaaatatttataacaaaaataaacaagcaagaaaaacccactaaataacataatttactaccccaaatgagtagttcaaaaaaccctattgaatagttcgataaaccagaaagaagattcaaagaagaaccaagctgacaaaacaaagcgcgtaaatttgcaaatttaagcaaaaaaaaaaaaaaaaaaagaaagccaagggagagaaaaagcgaaaatgaaggaaaacccaatccacatcgaaaaacgatcaacggaaagcaataaagagaaattgatgatgtaattaccctttggttgaagaagatgcaggggaattgtatgggaatggcaccaagaagaagaagtagtgtggtgtagaaggaaactatgtgaaggctttaggtaaataaattggaatttttttttttaaatttaaaaaaaaaaaaacaaacaaacaaaggaaacgcaaaatgggtggaaaaagtaaatgagttaattatttttttaaggaaaatatattttatatattatttttaattttttttttaaatttatagtttgggttgttacagttatttttttttatagtttgttgttatatgaattttagttatgaattttagttatagaatttgtatgtataatttcatcaaaatattattttatttattttttttttaaaaaaaaatcatcaaaatattattttaaagtataaaaataataaaaccctaaaataattttgtcattatgcttattaatgtaaaatcgtaaattatcatgtatggtaagttggttggtactatgaatatgactgaaagtaggacccaaaatgtataataataaatggccaattatgtaaaacgtcctccttaaaattcctcatcaagagtttttttctaaaagaggcgcgtaattatcctcatcaagagcttttaaaccattggagttatggaaaatgtgtatttttggtatcctatggtagtaaaagagtaggaaattgggttttttttataaatatgg

SEQ ID NO: 193983 - DNA, 2626 bp, Cannabis indica
caaacgctagatatttttgtccagatgaatttttactttatacgtgacatgttttaaaacaatattaaaatatatatactgacgaaattaaaaaaagataattttataaattttatatatttataacgctaaaagattattacgtttatactgctcacacactcaaatctttagttgcttatactattatttagtctatttatttttatagtaatggcaacaaatatttattatcaaaaaattctataaaaaggaaaaattattgccacaattttttttcaaaaaaatccatttccataatccatatggcttaattgtattttcaaggatttcaaaaaaaaaaaatttattttaaaggtgccagtccaagatagtggcgcgacttatactttaaatccacgcgccaaaatataagaaaatagtaattagggagcgattcttattttttatctttcgaaggttgcgtcgctttgggactgtaaaatgtagaaagtaatttaattttcttaatttacctaaaataaattattttcttaatttacctaaaataaatgaatgaataataataaaaattatactactgccagcacggacgcttctgttttctctcagcttttttattttatcatttggtgtcctcgtgatactttaccttctctctttactaaatctctgcctttctcactcctcacagtcacagtacacacactctctctctccctcttaacatatacctcataatattatgggtctacttcgccggaaaaccactcgttgttttgtccaaatccgattcgagaaggaaccattgagaagaagctaaattgtaggggaacagacccatatcgacaaagaacaagccgccattgttgtttccttctttgtttgtctacatctcaaactaagaaatgggtatgggttttttaagctctctgttttgttgcttactttacttattgatggtactcagtggtgggcgactcaccaactcggaaccgactcaggacaagcaagctctccttgctttcatctctaaaactcctcacgccagtcgaatccagtggaactcgtccgactcagcctgtaactgggtcggagtcacgtgcgacgccaacaagtcatttgtttatagtcttcgtctacctggagctgacctcgttggtccgattccccctaatacactcggccgcctgagtcagctaagagtcctcagtctccgttccaatcgacttactggggatattccctctgatttctctaaattaaccttacttcgaagtttgtacctgcaagacaaccggttttccggtggtttcccagcgagtctgacacaccttggtcgcttgggtcgacttgatctctctactaacaatttcacgggctcaatcccgttttccatcaacaatctgacccacttgagcggactttttttggaaaacaatgggttctcggggtcccttccaagcatttcgaacgtcaatttggtcaatttaacgtctctaacaacaacttaacggctcaattcctcagagcctgtcaaagtttccggcagactcatttgccggaaaccttcaactctgcggaggaccattgtcgtcgtgtaatccatttttcccagctccggctgaatcgccatccgagaacaaacctccggcaaacccagttcataataagtccaagaagaggctatcgaccggtgccattgtaggaatagctattggcgccgctgtgggtatttttctcctactgctcattctctttttctgtttaagaaaacgccgacaaagtcagccgccgaagaccccaaaacctgttgtagcgacgcgttctgttggtggcatagctgaggccggaacgtcttcgtcaaaggacgacattacaggtgagtcaactgaggccgagaggaatcggctagtgttcttcgatggtgggatttacagcttcgatttggaggatttgcttagagcgtcggcggaggttttggggaaagggagcgtgggaacatcatacaaggcggtgctggagcagggtattacggtggtcgtgaagaggttgaaagatgtggtagtgagcaagaaagagtttgagcaacaaatggatgttcttggacatatcaaacacgataatgtagtacctctcagagcgttttacttttccaaggatgaaaaattacttgtatatgatttcatggccgccggtagcttgtctgctcttcttcacggtatgttatttaatatcttaatctctattattaacatattgtttatttttaatttaacttcgtagaatgtatgttttctttctggtataaattttattttatgtatatcatcttcaatttccaagatacatttattatttgagtatcttgggctgttacagtcttgaaaactgatcctttcaatttatatatttcttgggtttaaacatagtttattagtaatgctggtggtggaaattacttaagccatgtgattatctgcaaaaacattcttagctttagtctacaacttttattagttgattacaaattttgtgtcttcccaaaaatcccaaagatgtaaaataatacaccgcccctatgattaagaatcgagtcatcaacatcattctgctccctttttct

SEQ ID NO: 193984 - DNA, 3456 bp, Cannabis indica
atgtcccaacttaaattaaaaaactgtagagaaattaggagaacatacgacatgtctacatatataccttagtgaataaaacttaaaaaagaaagaaaagaaagtcgtgtaaattaacgtgatagaagtaggaacacacaaatcatacttatattcactattttgcaaattacaagcaagacactccttaaatgaatataactattaattgatattttttgtagtttatctgctcacaaaggggtgtacctctatctcttcattcaatttaattcgtattattttactcataatgtatccgattcgtactaggtgcagaatttatattttggattcaatctaatctatatagtaactcaaatttaatccaatccaatctataagtgcggattagattgattattttagattgattactttttatattagattatttaatatttattaaaaaatatttttttccttcacataattaacaacaaaataaaagaaattattatttttttatgtctctaacaacaaattaaaataaataaaaataacaaataacaaattcaaaacaagaagaaaaaaaatatgtttaagaaaaagtttaattttgttgtagctagattataattttcttataaataagaatggaatataaatttaatatataaatttaatttattacgttttaaaatatatctatatagtatgtattaaatttttcaaattactattttttacattaaaatatagttgcatatataattttttaaaaatatatctaaatatgtgtagattgaattagatcagttacttttacatgtcaatcaatatccaatccgcacaagtacgaattttaaatttttcaatctaattcaattcgcacaagtgtggatgtctgcatcttgcggattggatcggatcgtgcatattggattagattgggtattttatgaacactatagtatatttttaccaatcctatatgaatatcgggttgcaaacatttaattgtgaccctcccaattaaaaattataaaaagttaacccgcccaataattttttcaatttggtcaggttaacctgtccaaaccgatctttttttttttaattatttttagtttatagtattcaaataattatatttaaatattcaaataattatatttaaaaaaaataaaaatatattatttatattttaaatttaaagtgctatagtctaaattaattttaagaactttaacataagacaaatataattgagtaaatattaaaatattaaacaaacattcgagtaataatatggtgtagattttaagttttaagttcattattcaaatacaataaaaattataaaatctaaattttaagttaaacactacaaattttaaactttaaatacaaaatagttttactaaatgtaatttatgtaatatattatatacacttttattaaaagatataaaattcagtttaattcatttattcaggttaattgggcagtttcaaatagttttaaatccacccaatatatttattggacagtttgaatttttattagatttttttgagttgtattttttgtcggtttatttggtttagtttgagcgtttattcgagttggacggtttataagggataataacagtgaaacttcctttgtaatcgtgtttgtaacactttactctctacgtaaaatatttggtggcaaaattttttatcttcgaaaatttgttggagttcactccttgtagcggtgacatcttccaacaactttttctttatttttgttcaccgtaacgacgctctctaaacttcgctgcaacatcaactttcaggttttgagacttcaacatactccaaaactttaacatcggtttttgagtcttcttgttctctttaattaaattatccaaccatttacatgaaattcatccattttctcgtagaaagcaatgtggcctaaaaaatgaaaaaaataaataaatcaaaaactcacaaatcaatgttaaaacttaaaactgcaaaagccataacactaaccttcatctaaatgaaaaagaacttgcaaattgtatgcagaaatacctttatcaattttatatacatataaattttaattaaatatatttgtaacttaaaatctattccgattctaaagtaatgtaattaagagaattgttgaaagacattattggtctctaacacccttctcggtgtcatactgctattggtgtaattaagtatcagatcctataacttaagaaaataacttttacataatattgctaatcaattgtgagacgctacatataaaatatgttggacactactggtactgaatagcaatgctcacatttaatgtgagtactgctattccaattcaaattcctactaatcatgtaaataactgatttttgatttttgatttttgattttgatttatccatcgattgaagattcaatttaatttttagtcattccaataagtgtaagtagacacaccattagttgtatttttgttgtgattactggaataggcgcatcattggggagtggtggacacaaaatgttggaatagcaggatagaggaacataaatttagtggaacaaaggcttacggatccagcaaacttatgcatgtaagtaaatcattattattaatataaacccctatttatgaatacagtatccataaataataaaaacatttattaccaaactttttgactttcaagtttataaaacattctactttttaacttattttattttattttttgtttaatgaaaaatcagctcatgtttctgaaagcactagccataaatcttgtacaacttggttgtaactcagttcaatgcattgctgtccatccaggaattgtctcttctaacctggtaaattactttactatatgtatctaattaataaattataatattaatcttttttgtaaagaaattataatattgatgtgaacacgttttttttttttgtttcttatagattctgtttttattgatacaaagttttcgtgctttaatttattaggttccaggcgtccagaaaaaggcattttggatgcttgactcatcagaaggttcgaaaatattgatatggtggataatatataaaaaaaaattaaaatattaccattaaaatgactaattaaattgatttacattttatttatgtatgtatggtactcatttttagtattttcttgcattaattaaaagtaatttttgaaggggcaaggagtgtgctgtattgtgctacaagtaaggacgttgtggagaacttggataagggttttgcctactactccagcaactgtaaaccaggaaaaatgtctcccatagcagaaaatatggagacttgtttcaagatatgggatgagacattgaaaattttaggattagaccctaattatctatccacctccaaaatttaatgttacaactgtt

SEQ ID NO: 193985 - DNA, 5408 bp, Cannabis indica
aattatttgtaagaaaaaatagataataaaggttgtaaaaacaaaaagagttgttggagtaacattattgtctaatatatgggcatggattatggttcacgtggtcttattcaaataattttatgcaaggtagttgggtggtagtactagtaatatcataatgtgtttaatgtgcatatatacatagtgtttttttttaaaaaaagcgtattttgataaatagaacttgttagacctcacggtcagtacataatatgtttatcgagatagtagataacgggataacctcaaacctcttgtgggacttagccacattatatgcggtaaaattacaggccctactgatattagaaaatataataacattctaattgcataatattataccgatataactctgcattgttatgaggcatcaaggtatctagtactattataaaatagtgacactctataattaattaatggttctttgtaatcattacaaaagtaaaatatgtgaaattcgatattaaattacactagcaattttacacatcacacggaaacctttctcttctatatttggttagcaatgacatattatttattgagaaatgttaaaaggcaccagtaatgcctaacactcttctacatgtcaatatcgatattaatgcaatcaagtattgaatctcattttacttaatataataccttttaaggggtatcattaatcaattgcaaagtaacagtgtaacacatctagaatgtgctagacatcactaatgctcaatagcaatagcaattgctaccattggtgtttggtatattctagacatgttgccttacgattgattagtgacactcctaaaagttattacattaagtaatatgagaccagatacttaattacacaaataactatattaactcataaaaaagtgttaggcatcacaagtacctcttaatatttctcataattattacatcaaaaggtatgtcatctaatattgaaatatactaataacaatatgtaacctagtactcaacacttacctcttagcatttctaaaaatataatattttaagtagttaatagtcaaaaatgaaagttttaagtaattacatagtgtaattacacttaattttataagaggcatgagaataattgaaatccctcaattatctttaattacacagtttggtatgaaatttagacaaataattacacagtttggtacgaagtttagacttaataggaatgaaaatgtaacatttaaattaaatttgaatgacaaaggatttgtgttttcaaataggccttactttttaaattaaaatggtagtaatgttaatcccttcaaatgcataaattttatattctctccaagtctactccctccaattctactctctctaactcgaactcacatagacatagcaaacaccctattaaacgacatttgattagagagaataaaaatatgactaaaataaaaataatattctaatactttaaaataaaactaaacaaataaacagaataaaaattgtttcttttcaatttcattctattcaatcaaacaccttatagtataattacacgattaaaccaatatatcaaatcatataattacatccaattacacacaaatttaattacaccacgtgcgctcaaagaataactttatcttcaaatgaatgtattttcccacattccttttaattgagcaaaacaatgcaaggactacttgcatgttacattaacataaaataaataaacattgtttttatccaaatgacactaaatccaaacatttatttattttctgaaatggaacttttaacacaattgatatacctaaaattataattaatatatctaaagttacaacatatgtatattttattaaatgtaaaaacaacatgacagaatttcttttaagtaaaaaatgtatgtcaacaacttcaatttcttttccactcgatcaataatatatatatttttttttcttttaacattgtttttccactcaactaatcttgaagctgcaaaattaatggagaccaacaggcacaaattacccgaggaaaattaatataaaaaatgaaccagaaaaaaaaaagaattacatcacaccagaccagacccctaaaggatatatttgcatatataaatatatatatatatatatatatatagagagagagagagagagagagagagagagagaaagaaacaacaaatttgacaaaaactactacaaacctgacaaacccacataatatgacgtattgtgtacttgttgttgatcattgatcagaccaacatggttgatttgatgattgtgttcatgagaacaaacccatcgggttatttttcgcttatgctgcaatcggatcctgcaaatagtcaggaaagacttgaacatcagacttaatgagaatgagaacaaatcatagaagttgagttttttcttatctattttgaatttcgattactgctaaagatagcagctaatgatgtttatgttttactcaaagagtgaatttttttttttaaacacagccaaaagtgcgattcttctactctatttaacatggcattggtgtttgttggtttcgcaagaatacacacactatcttaaatatttttctaagttgttttctagaatatcattaccttacttccccaaaaccgaaaaaatctacaatgataagaaaacactaaggttcagtttatttttaagccatggagagcaaacaaagcccacttgaatggctgaaaacttccttcgcataagagttgagactgggattaccttgcccacttgaatgtactatctatttgagttatgtattttcagtttcaaggcagggttacaagtttgactgagctaaatatctcaagactagttgaacattggctcctatttcacccatctaatactgttctgatctgtcctatcttattctgactgctaagaactgaaagagcaaatacctagtggatacaaattaatagacttataggcgagagatgtacattcacattcactgcattggattgaaatgacgaaaagtaaaatgatatttgacattagaaacacacaccttcgtcgtcaagtttgtcacagccatatggaacttttctcttgtttttgtacctgccacctgacctgccttagctaccttactgaatgcgccgtttaaccatgccgctccagcagttacgtacctaaatatcagcaaatgagtccatcgatttatattggttataatgtgacttgtatgcgtgtgaaactacatagttgatttaaggatcaatatttattatcattgaaatgaaaataagctttgatttcttatccaagcgatgctcttatgccattaaaagaaatataatgttatgcttcttgggaaataatttcatacctgctagtttttacagctgatcctgtgttattaatcttcctttctgcagcaaatattgcagccattgttttatctgatacttgaagcctttgatcaacggattttactttctcgttaacaacagaaatcccgactgtcaatttttccgtaagccctacttttctgtcaaatgaaataaccttggcagatgcactggctcgcaactgatgcttttcatcaaatgctttagccttgttcacggcatcttgtctgatagcggaaccctttgcaagcatattagcaactgcatcttgggctttactaacatactcccttccattgacacgcgggctatttctgtcctgctaatgaaggcagatcaacagagcctcacaaaatcagaactttgtaataacaacttaagtaaaagctaatgaggtttaccaaagaaaatagagctcaataaaacgttatagaaagattgtgctcggtgctggaagagtgtcgtgccacaatatgcaatacagtcctacgtatctcaactaaagactggagatgctaaacaaaaagatatagtccattgcaatagaacatccatgggtaggaagtactagaatgcaaggcaaactgactatttttcattgctcgaggcaagaatatctctctaaaggaacccatttggttactcaacagccccagaaaatcgctcggagtacaagaccataataatgtaactaaagcaaaaaatatataaatatttagcattgtgtttccctacctcaagatttggtgaaccaggttcaggaacaacacaaacggcattttcaaccatccttgcttcctgcatgaattgcactaatgaattcatctttggaagatttaaacaaagcaaaagcaaagatattgagcttgttgaacaacttacttgtgtctcgtggttaggtacatagttttcaacaggtgttatactcacaatctggtctactattgttgctccctgtgaaaacagcacaattttaattcactaatataagtataaagaaatgcacataaatgttgctgcagcacaaagtgataattctcccacagtcctactatattttcctgtcagtgacaggaaaattaaaaaagaaaaagacaacatcgtcagaactcagaaatgctcacaacaaaatctgattctaaaagcatcattgttttcgaaactcagcatacaaagttaattgacacaaaataaaaataataattgaagataactgttttacatattactcaaataattatagataggatattttggaatgcataagttttctaaattaatcttttgaatatggattggccttaccgaaaataaagttttccatctctttctttccttttacatttagcataatcagtaagaatacccatatgaaatgagcaaactgagtttaagttttaatttgaacccttgaaaatgttaggaatacaaaacaattcgattttcataaactagaagctctaaaaattgaaccataaaccattcgaaatcgaactgaaggcttgtccactccaaaaacacctcaaagttgagttcagagtcaaaatccaaagaatttaaacaagagggagaaagaagaagaagaagcgtttcattgcaaatggagaaagaaatgaagacaaagtagttgtggagttgaatcaaatcatcattaggacactagaacataaacaatatctcctaagcatattatcaatgcacagaacaaacttcatggtaacaatttgaaacaaataagggaagagtcaataccgataataacaatgcaatttcaagggctttaggatctttgaatgtaacaaatgccgtctttgattgcccatgttcactgtacaaaaagaaaaaacctcatcataaattttaaaaatattttttattttttatttttgaaaaagtcatcaacttcagatatctgcagaaagaacaaacaatctagaaaagaacaagaaactctagtaaaactacgaagcca

SEQ ID NO: 193986 - DNA, 2608 bp, Cannabis indica
tgaccccgaaccccagattagggtccggacccggaccctgaactaattagacctagacttgatccaaaactcgaacttgaaccctgaccttagaccctaaactgggccccgaccttggaccccgaaccacgaaccaaggaccccggacctagactgggcttatcgaacctggatccgactttaatgaaattaacaaataaaatttacaaaacacacatttgttttttatttttaaaattgaaaaataaaagtagttataaaacacatttttatttttcaaaagcataagttaaaaaaaataacttttatttttttgattaaaaaattaaaaaataaaaatatttccaaactttaccttatcttttttttttttctaataatttgatttaaaaacttaaaatagcttattctatgatttattgcatctaggcttagacttcctccaactcaaaattccatgtttttaatatatacttcttgtacaaaatacttaaataaataaaaagtaattattgtaattttgagaaaatgtggaagaaattaactccatcttcttcaagaaactcataacaaagtatccatttgaatgggggtttcttcttgttgttgttttattactgctgttgacaagccaaaggctaggtaatattatatcataacaagtgttaaacaaaataacaacccattttgtaaaaaataattttttttttcaaagagacaaagtaaattcgaaaatttctcacagaatattattcttaactaaatcatgatatttccataaatagattttgtgttaccttagaaaatattatcactgagattgaagatgaaattagtttcgaattaaattgtttcagttagtgcagttaattcaatatgtaagtgattactgcttttgatgtcttcttttttatttttatttttcctttatttggttctgtgtgagtggttcaatcttcaatggtttaatttagttaatttagaggtttgaagattgtttataaaaattactattcattaattcatgtttggattcgctcatagaggtattttctcttgagagggagggatcaaatggtctagtcagttacagggatagtttttctgttgcgtaggatcatgattagaaagaccaattaagaaataaacaccaataaaatatttctattagggtgtccacttgttcaacctttttaagagatctactataaataattcttataacttatacggttaattgcgtatataaaatagtattaaactcgtaactagtattagaaacagaagaccacatatgaacaacactaaataaaaaactttattataaagaataataatatagctagcattttttaaaaataaaaataaataaataatatagctagctatagcccataggtaggcttatacatataaagagatttataagtatgcattcacactaaggagttgaccattttatgtagagaacgttgaaaaggtcttttgtactatcaataataatggactttaaatatatccttctttttaaaatttgagaatgacaatttcatatataggaagacatgttttgtgctatgatcatgtacagctcttaatcacaacacatatcattagcttttgagctatttaattagggactgaataaacatatatctttataaaaatcaactaataattattagattattattttgtataaataaagtctatggcgtacgttattgcctgcatcacatcattcccattacttccttcatcttctaattaattaagacagacatagaattaagacattctttatataaatattaatgtagccattaagggaagcaacctgacgatttatctatgttaatgtattcttgtatagaggcaatcaaaatattttaattagctaaaatatataatatgaatgatttactctcgactaattaacaaggaaaaatattgcttcattatcataattaaatatctcaacttgattagtttttctttttttatctatttgctagtcctcaattaattatgagaaatagatttggttccagctataggcaatggcattgaattaataatggggggcattaatttttaagacaaaaaaaaagttactaaattggctgaatagtttatacaattattattaggacccaaaaaccaggaaaatgatatatatagtgacaagaaaagaagaaaattcaacagaaaatcttacgtatacaatgaaaagagttgttgttgtctatatatttggagtgaggaactttatatgtggaagcatatcggcaaggatctaatgtcaaacaattattagcagcatttaattttccttgtaaatataataaaattataattatttgattaagactctttaccctattcaattaaggtttaatcaattaggctagctctgaaggaggtatagtagtattcatggatatagccacaatatacgtcccaaaaaatgtttgctatgactcatgagctaaactccacacaaagattgtgacatcaaaacaaaatctaaacataacgaacaaaaattatatggcatatcctaattatggataaggaacactaatcgatacccaattatatatatata

SEQ ID NO: 193987 - DNA, 1385 bp, Cannabis indica
gaccgcttcttcggatttcgaacgacattgtgtcccgtcgttttgagctgaagttccagaaatcgcacctgggtttgtacctcttggaccattattattattacattattattctcgagtgggatctgaattccctgaaaagtgtgactcgagccaagcccgactccacctccgccgcccacgccgccggctaagcccactccacctccgactccgctgattccaaatccactgcctctgtttttgccttgtccgtattggctatttgtgaaaaatgggtggctttggttctgggctgacgacgaagacatcaacccggatccaagatcgattgaattcgggtcggatcgtaaggttctgggccatgccatgtcaagattgagcggagatcgggaagagactgttgccggatcgaagaagttggataaagggtcgaacatggaggactgctgctggtggtgggtgtgctgctgttgcggcgcgtggtggctgcccatatggccttgagggttggagctcaaaagggcagagatcgattcggcgcgtgagtcgtactcttcgtctccaccgctcgaggattgcatactcccactgttaccagagtccattgcttctggagaacagagagagagaagcgaaaaacaaaggaaagaattggtaagacgtggaatagaacttagcttagctagacagagatatatatgaagtttcagagagatttgcttacacaaacagactcatttattatgatcagagaaagaagagagagaaaaagataaccccaaaaaaaaacagagggtttctcgaaggagaacaatgatcagaaagtactagccatatatataactaaataaatataaatcttaaaaaagcaatttttctgatcggtaactgggatatctataatgggtttggcttattttttggattagagcaaaagggtactagtatttttttaaaagggagagaacagagttcaatgaaattgataggatgaaagggaagaaaaagaaaaccctctttggttttgaattgatgggttttcttttctctttttactatatgtagattaaagctgaatttagggtttttgttggtcaaggaaaaaaggaaataagaaaaataaaagggagggtttctaattgttctctctaaccttttcttctcaaaaaaaaaaaaaaaaaaaaaaaaaaaaaaaaaagaaggctgcttctactgtttggcggttccacccaaaaaagaatacagagtgggtagctattatgggatttggccaagtgcttagcttagcttagcttattagctctaccggtcaaagtatgtaagtgttgtggtttgtatttgttaattaagtgtgaaacgaataatgaaaaattaactaagtt

SEQ ID NO: 193988 - DNA, 1392 bp, Cannabis indica
attataaacataaaatgatattacaaagaaaaataatgtagcaatttctactgtgtgggaaaagtgccacgttttcaagccttgaaatagtcttcaattataattcattttaatgattccagcttttaattctttactgtactttttgcaactctaattagaggataaaaataaaaaattcaacacccaaatttttagtagaaatatctccaatcaaagcttcagacctcaataattttttttttctttttcgaaacaaaatgatttttttaagcaaagtacaaaataataattataataaaaagaaagtgacagaaagcgatgatggtaagaatgaatggatataaattgtgtgtaaatgaatgtagtagagacgaaggaaacaaaccaaggaaggtgttagtgacgtttttaattttatttattgaatcacttttctaatttattattattttgtcaaaataattaacatttttttaaaaataattattaacataaaaatatgtaagatttttatagctaaatttaagctagctaattctctaaaatataaataaagagtagtaaaatagtattaaatgaactttttttaacaagtgttatcaaatgagttaaacttgatttactatacattttttttatctttaataaatagtatttcttgaactataaatattatattatttttttttttacatataaacgagtgatataattatatttgtttatttaattttaacaaagtaatgagatatcaacggaagtgattgtgtgacaagtggcataattgaattataataatataatcaaatattgtctttctaagtttcggagtcaatcatgggtttctgatgtcaacggttttacctaaccaatattatatattattaaatattatcccgaattttcttttattctcatacgacattctcttctcatccttgtatttttattgaattgcatatatacccctctactctcatttctactctcattttattcgttttcattagattataatttatatatatttatggcaagtactctgtacatgtacttcatttgtattcacatttatttattattcaccaataatctgactcatattaatattaataataatactaagtacataaccattacattatttatttaatacaactgtaagtaagcaaatttaaaaataccgttgcctttttatttattattactaattaaaattaaaaatggaatttattaataataataataataattattattattatttacgttctgcgggcctaccgtacacccgcggctttcgtcttcactcagaataatgaagtagacagagaaatatttgactttttcttaacagagaaaccagaacagcaagctctctctctctct

SEQ ID NO: 193989 - DNA, 995 bp, Cannabis indica
cagttggaaaagtcatcacatataagtaattctcttgggtgtggttcctccacaatgaaatgccaaaagaatcgtcctctattgcctaacaatagtaacttaaaataattaaataaaaaagattaaatcataaaaacttgaaacaacaacacctaagcaaaacaatcactacctagagatcaaaacagaacaaaaagctcttattatatttattaccttaacattatttcctaaaattagaatttattataatggactttctccttcaccttctaaatataccatttttctaaagctggcaaaacaaaccattactatactactcttcttccttgtcttcccagaaactgagcaaagagaaaatctcttgaataaaaagaatatatatatataaataaacaagagaagagagaagaagaagagaagggaagggacaacaatggtgtttgatggtcggcatgtgcttttagtactcgccattctttcggttgtgctgtcttctactgtcgtttctcaaagagggagacatattcagggtgttgtttatgatggaaggtctttgatcatcaatggaaaacgagagcttcttttctctggctccattcattatccgcgtagtaccccagatgtaattacttgattatttagaatccaaccagctgatatatatataattaatcatggattcaagatataataaatttctgatcattttgtggacatgggctgttttcagatgtggccagatctaattcagaaggccaaacatggtggtttgaatgtgatccagacatacgttttttggaacattcatgagcctgttaaaggcgaggtgaaacaacgtttttaatcttttttctttatagaagttacattaatttagtacgtactttgctttacaaaaaagaaaaaaaaaattaagtacgtacatatatatatatatatatataaattatgtacttccttctcttggcttatatttgtttatttttgtc

SEQ ID NO: 193990 - DNA, 1430 bp, Cannabis indica
attagggttgggtccatgtttagagtcgaggcgaaggtttgggtttggggccaggtccaggtccggggtcagggtctggggtccgggtaagaggctggggtccgatttcaatttcgagtcctggtccagggttagggtcggggtacggggttcgggaccgagtccgagtccggggctagggttggggtcaggggacgggtgcgggttcagggtttgggtctgggttcaggattcagggttctgggtctgggattcgaattcgggtcgggcttgggtccgggtccaagtttccattcgggcctggagccgtggtccgcggttggggtctgagtccatgtccagggtttgggttgagatcgggatcggggtccaggtgtgggtctaaggttcgggtccggggtccgagttccaagttcaggtccgggtcggggttcgaaactggatatgggtttgggtccggaacggggttcaaaattgggtttgggttcgggttcaggtcggggtctggaattgggttcggggtccaagtctgggttggggtttgggttcagggtctgggtacaggttttaaggtttaggtttgggtcagagtccaaaatattgattaaaaaaaaagtgtttgaaatttttttgaaagtgactttataagaagcagaaagtgagagagaaagaatgaagaagatgaaagaggctcacacgaaagtgatgagctttgccactttatatagaggattcaatatgagaagtttgttactatagctggcactaagcacaacaaaggacaaagttagttacaacaaaatcactgaaaactatactcactgatttttaatttactgtatcctagcatcctccttcaagttacacttgggcacctaagtgttaacttgccccttaagtagatgaattgagtgatggcagaggtttggtgagaacatctgctatttgataatgtgtgtccacattatcgaagatcaaacttgctttctagcactttgtctcgaacaaaatagaggtctatctctgtgttttgtacacgcgtgatagacaagattcaatgcaagagagccaacactaagattgtcacaccataatataggacattgaggaagaatgactgagatcttagttagaagagattggatccaacctaattcagaagtggcaagggcaagagcgcgatgctcagatctatacttgatcgaccttcgacactttactttttggagcaccaattgatgaagttttgaccaagaaacacacactagcctaaagtcatttttttgtcatcatagctaccagcccaattaaaagtcaaggtgagaggcagaaaaaaaggagagaccaagttgagtggttcctatgagatcaaattcagctacatacgaagcatactcaatgcaaaaggaaggtgatgaagaataaagaaa

SEQ ID NO: 193991 - DNA, 1922 bp, Cannabis indica
gaaaacaacaggtgaaaactaataagaaggataaaattaatgatatgttcacctatttatagcgttgtatttgcgtttgttttttgcgttgcgttttgtagtttttttttccaaaagtagaactatgacagaaactgtccaaattgtaggtactctaccatgacatcaaacatagctgaggcactgaactcagcaaatttagcagcaagggaaacaccagtgacaacattaatggagtgcttgagggcacaaatgcaagagtggacatacaataatagaaaggaggacacaaaaatgcacaacaaggctgacaccatcatctgaagaaaaaaactcatagggaactatgtacagtcattgcgactaacagtaagttcagattatcgttcgcaataaagtaaaaataaaaacagttgaaagcaatatagaaattaaatatttgtaaaacaatatgatatattattacacatagtttttcaaattattccttgttattttcactaactataattaattttaatttttgtgaaaagaacaaaacaaaaacatcgagtttcattaattaattattacccatacctagaaaatgttaacgacaaaaccaaaaatctagagttaaatttgggacctaataaaacataaaaaagtttattaatttaaccttttcgattagatcgaataattattattttattttttttttttaaaaaaaacgtcattattatatggtaaaccatgtatccatttaatgaaaaataatcatcaattaactatatattaattaagataaacataaaattaaaatatatatagatatatatatagattaagcttaaatctccttcttcactgtcttaaaaaaggttaatagtaaaaattaaatagatattttgtagaaaaaaaaatactacaaaaaataactacttttagtaactaattttttagttacaatataaattttttgtgactaataaatatgtatttttaatcacaactaaaatttacttgcaaactaaaacatagtatttagatacaacttgtaactagtttaatttaagtcacaacaagtaatgtgactaaaaataatatttaagtcacaaaatataataattactaatttttttttttttatttttaagttctaaaaaaaatttttttattgtgactaaaagtaagattgtttatagtaaaaaaatattacagaattatgttattttaattcataaaaataaaaattttattaaaccgataaattaactgttaagtttcattaataaaacgtggacaaaaaactcgaaaaaaaaaagacgtaatagatttggttagtgcattagttcctaaaacataaaatgtcacaaaaccaacactagccacaactaatattaaatgagaaacatcattaacacaatagaactaattaacataacatttttgactttaagtattattaatccaagaaatagcagactccaccttaagcacactataactacttaataatataatacttataaatagataagtatatataatttgaatacagctaataattctaaaaattataacagtagtacaaacttaattattatatgaaccctagattttcggcaattattatatataatatggacaaaaatatcactatataactcaccttcacctaaagccataaattttagttgaaatgaaatatcaataataatagtaaatatataattaatgtacctaccatatatatatatatatatattcatcataaattaaaaattaaaaaacaaagaaaaattaacaattaataagaagtttttcattatatatttcaaaatattttttttcattaatggaaatacaccgagcaatcaacgaagtaacttaaattataacttaaatttatatagcaactaccaaagcaactaacgatg

SEQ ID NO: 193992 - DNA, 1049 bp, Cannabis indica
tgaattgagcattttgttgaaggtatccctaaagaaatgaaagcaacacccatgttctatcctttgtttttttctctttttttattataaatctttctttcacaaacacacaatttcaagattgtaattatatacccaaatacctcattttctcctatatttttccaccaaataatttcatcattctcttaacatactatagttttgccaacatggcaatctcttttattttcttaatactaatcttcaattaaggttaggtgatttgaaacatatctttaaatagctcccaccaatatgatattgacatgtcctttgtgactcactaaagattgatggtgaaatctacagccttagagagaaagaagacaaacctatatttagctccacctcaataaaatattcccaatgactaattacgtttacttattttttttctctctcattcaatatattgacaaagttgttcatgggccaatcaatatgtccaactaatatttattttgggcataattgaagtatcatgtgggtgtagcaattttgagttgagcataatgataattcattaaacttttttttttttttttgggtaataaaagaaacggtcatgagaatttgtatttcatctatattttctctttaataggagaacaccacatgtcctaactattattttacttgaaaataaaaggattagcatgtctactatattagtcacacaattccaattcatgacctaacactatctatataatattatattgattgatcttttagcttataacatgaagatttggttcttcaaccttaaaattaactaacttcatttcaatatggccataaccagatatccaagttaggtttaggatctctaacttaactcaatctcaatgacatacaatttgttcgtgcaattcacaaaaaatataattttgaccttacaatgggcaaggacaataaaataagtcatttcatattcataacattcaattcaaatctaacacaccaaactggtggcctagggggtaatggtagcatctttggagtta

SEQ ID NO: 193993 - DNA, 2024 bp, Cannabis indica
ttttttgtagtgagtcttaatgcgccaattttagccatttttgtcgattactttttattttgcgccgattaaaattccaatactgatgttgatttatcgacccattttgcaaaaagcgctagaaaaaaaaattctattttactagcacaatatctaacttttgctaattactaggtaaaaaaaatacgttgacaaaactcccatttttcttgtagaggtctctttcattttatagtagtgaattaaactattaattatgcgttcactcatcaatccacactaatttgtcttattaatcggccgtagatactaatatatacaattcaaaaatttcaactattaattatttaatagataatatttattaacaattatttcctttagaaaaataatgaaatatcattaaagtgaggtatatggtaagatctcaaaattaattgataatgaaataagtagttcatatatatatataatattaaatttaaaaataaatatctatatatatgtatagttaaagtaaaaaaaagatatatataataaataataactaaaatttgaaaatatgatatcttaaacaaaataaataagataatgcactatttaaattttgaagtatcaaaatatctcttaacttattttaccaaaaattaactaatctaattaattaataaataaactaaaataaagtaaattatactatatatacactctgtatatataggttcgatcacttaatggccgaatatggtggtggtggacggtcagaaaagaccaaagggaagcccatgcaggtcaaccaccaacggtgttggacagagataggagaaagctctaatcaaagcttatacaggtctcatcgactgggtttcaccagaccacgaagcctcacgactttaggaccttactggtcctactctcctatcgacgtcaatcaaggaccttatgatccaagaagatggataaatcttgacaataaactaatagacttattagtagaaaggggtccaattagagtgagtgatatagagattctaaaagatgttggtagacatttttctacttatcactatacaggaaatttatcaaatggagaataatatgatagaaagtggttagtgtattcaaagtgtttaaataaagtatattaattttgttgtaaatcatttagtgttagttctagtacgatgaaccaattgagcaatgaaggaactaaaaattagaaatatcttggtgataggttaaagagtcatgaaacaaataacgaacatataatcaacatgagtacttggcttgatttagaatcaagattattaatgaataaaataattgataaacctgctcaagaaagaattaataaagagaaagaacattggagaaattttttagaaagaataattgctcttataaagtgttaagctaaacataatttagcatttcgtaggagtcacgaaaagatttatcaagaaaataatagaaactttttaagttttgttgagatgatcactgaatttgatctaataatgaaagagcatatttgtcgtattcaaagcggtaaaattcataaacattatttaggacataatattcaaaatgagttaatacaagtgttgacccacaagataaaaaatttaattttaacaaaatattaaagattgtactccatatttgagccaccaagagcaaatgtctatggtcttaaggtgtgtaaatgtttctttttgttctattgaaattgaagaataccttttagaacttttgaatgtggtagatacttcaagaaaaaggactctttgatgaacttataagagaaattaaaaacttagaacttgataaaatgatgtaagaagacaaagttatgataatggatctaacatgaaaggaaaataccaaggtgtgcaaaaaagattattagatataaatcttaatttagtaatttgtgatgctgctacttcttgtgttagaaccatatcattttttgggattttacaactgttaattctattttgtcatatttaattgaaaaa

SEQ ID NO: 193994 - DNA, 1570 bp, Cannabis indica
tttaaaaaagagacagaggtcaagtgaaacctcccacgtatattagggaacctcgcagcggaggaataacttggtaacagatttattgtaaagagcagtaatcttagataagtaatacctagtaattctcagataaaaccttagcttgaaaaacgtaggctaaatcgaagaaatctgttgcagaatgcaactccattctctagtgagatcctggaaggacagaccctcaaaacctttggtcctatagacacaagtagcaacccagaatttgaccttttcccacacctcctctgtactttttgctgaattttcaaaattctcacatttctttctaaccatacagcccagaacatagctaatatggctgtcgtccaaagcctggaagccctcatatctccctttagcttgcaaagtaacatctgtcaacaggtttgggcatgcaccacagtacaccaaactctctgatcaacctgctgattctggtccatagtgtctggctaaacacacactctaataataaatgggaagaggtttctcaactgctcttacagcaaatgcaccagcccagtggtaataatttgcaaggcctcctcttttgcatcaattcatggacatttagtttgcctaaagcaagaagccagccgaaaactttgatttttgaaggagcgcaatttttccacagaattttagcctacccttcctctaacctcctgtggcccagaaacaacctcttggaaggctgatttgcaagaaaaagtgccactggattctggtatccaaattccagattcttgaatcttccagcattccagccactggcttgtgctcaagaaactgaggcaaaaccagaaagtttgttacttctgtgtcttgcaagttccttctgaaatgaaggttccaaccgaagttaaacattgatgctcctatatcctcgaccgccatttctttgacccttgtgttccttgcagtagattactcttgccaactccgggaaaaaggtctagcatttcctctcctacccatatgtcctctcaaaatccaagtagctggttcttattcatgttcactttcatccgtgaacgatcacaaaatgcttgtataatatccagtgatcctcggattgagctaatgtcttctacaaagaatactgtatcatctgcaaattggaggtggctcatacaaagtttgttcttcctaacacaaaatccttcaaaggaacccaattcagtagacttatcaaccatcatcctcagtacaagttccttcattgcaagttttctttacaagtgttcctttacttgaaagaaggaaaaactagacaggaaaagctattttctaggctctatggatggaagaaaaatagaatctttgaacatgtagaaagaaatgtttagactgcatttgtgaaaagatcatacattggatagcttatggtgaaataatgtcagtatttcaaaaatgtctcatcccctgattgtcagtttataacgacttgtaatgtctaatgtttcttgttttttcagcttttagtgggtgtttccactcactattattatgttcaatacaagta

SEQ ID NO: 193995 - DNA, 1212 bp, Cannabis indica
ttaagttactacgtacgtaaatgtatgtatttttatatggtccataacatattatcatttattgagatttaaaattatacgtaaccccaaaaatgtttcattgcaattattttgaaagcaacaatttgtacaattgtcaattttgtaaggctgaaagagtcattttgggttaatttataaactctaactattgaaaattatatattaatttagaaaaagaggccaactttctagattacttgtcgaaagaaaaagaataattgaaatgaattaattaaaggataagaagaaaaaataatcaaacaaccacctaataacttgttgaaagatgaagatattcttttgttgtctttttgtagtagttaattttcatgatgacataaaggacttctcatatgtgttaataagtaccattagttatatatatatagtcaactttctttttcaatttagtatcatttaaatcatatggaatatattatatatataaatatttgtaagtaattaatcaaaatcttataatatagtggtgggaccaaataaagtttttaattaatatattattctcttaatttaatctcaagaaccaaaaattaataaagtttacaatctatatatacatgaaaaaaagatattatatattatcctctaaattaatttcaatcacataataataggccatgttatattatatctatatgtatatatatatggccttgttgattgtgactaccagtgataaaggtcttttaataataatataagagaagaaaatacttatcaaattaataacaagaatcttttagttatagtaaaagacaacgtaaaaatgcctttaatctatctttatatacatgtataattaattaataatctaaaaaaaaaagacgaaactagatattgttgcaacttgctacaaccataaatttcttttttatatatatataatctattttactcaaaccaagcataacaacgtaagatataaatgtcaaaaaaacaaaaacaaatctcaatttacttccaaccatatatttaataaataaaaaatatatatttttaaaacgacgtaacaaattgactgagataaataattaaaattctacctatcacacaacccttgccagagttaattaggagagagctcatatatatataaagctaactcaactgatcatttatatataaattaatatgttttaatatgtcccc

SEQ ID NO: 193996 - DNA, 1049 bp, Cannabis indica
tttataccgcaaatttactcttattttttttaaaaaaacaaaacaaataacttttatttttattgaaattaaaaaaaaaaaaaaaggtcagatatcaccattgcttttgtagttcaaccatttttctccaatatatagccacacttaaatgtaccccacatctaaaaaatcaaaatctcctgttaaaaggtagtgtcctatattctgttaaattaattaaaatttgacacattaattaattatttatttaagaaaaaattaaacctctaattgaataaaacaaaaatagttaacataataaatataaattagattagttggtgtgtcaaattttaattggtttaacacaatatagggtactaatttttaataggggatgttgattccctccaacaagctcggatgagcaacgttaatacatagtatagaacattggagttgcttatatatagtgttgctataaatgtcattacacacaatttattcacacacttctctccaaaaaagacagcaaaacaaaaaaagaaaaaaataacaaattggtgtaaaagaaaaagaaaaaggtgataattaaactatggagctaaggattacctcaagagaaactgtcaaaccatcttccctttcgaagtaccatcttcaaccctacaaactatgcctcttcgatcagtttactcccatgacatacgtctcactcgtcatcttctaccgcacccctcttcttcacaactccaattccaacctaacctacctaaaaaactctctctcggaaaccttaaatctcttctacccactttcagggaagaccaaagacaacctctacgtcgatgacttcgacgccggtgtcacctacatggaggccgaagtcagttgcagcatggccgagtttttcaagctcggccaaaccgaacttgctcaacgagctcgtcccctttcctccactacgcaatgaagtagtggaagcttcaccaaaaaagagaagtactaattcctcatgttgttgggtttcaagttaacgttttcgaatgtggcggaatagctttgggtac

SEQ ID NO: 193997 - DNA, 2067 bp, Cannabis indica
atgattaggaagccaatgatcaggtatagttcgaatttcactcccacttccaacttttcaaatgagacacgaagccaacaagtctctgccccataaaatgcttctccaagtgaaagaagggttatgaccagggacaacagtaagaatagaagtctgagaaaaatagcgagctttaaggatcctactgagaagagagttaggatttgaaaaggcgcaaaacttagcaatataccacttataaattataattatacagtgcatccccaaaaaaattataagtatttttctaacgaatactttttaaaaatatcgcatataattaaataataatatcttttaaatattattacattaattcataggagattcaatatttaagtataataatagtaatattacattaaatagtaaataccacaagtgctttataacatttagcattgtacaacttttcaacactaaaattctcattcattgaatttgaataaatgttaaacccacgctcaaccatgaatttcagttgcattttatttaggtaacattaaatagtctcccccaaaattcaatatgcttcactttcaagaaataaataatagagaaatgctaaagggcaccagtggtgcctagcaccctcctatgtgtcaatatcgctattggtacaactaagtatcgggtcccatataatttaatataatagttttagggagtaccgctagccaatcgcaacgcgacatgtcgcaaaggtgctaggcaccactgataatgcatatctatcacacttatttacttcttttattatatcataattaaccactcgagttgtttcaaaatctcacatctataaataaagggggggcagttttgttttgtttatttgagtgaattagtgatcaagaaataacaaaggttgaaaaacaatgagtaaagaggaagaaagagttagtaaaatccaagaagaagggaatattgggaatcaccataataataatgatgatgagaataagaagaagaagaagattattgattttgagatgcctcttcactacccaagatacaagaaaagagactatgagattatgcctgagtggaagcttgacttgcttttgacacaatatggtttgcctaccaatcttggtgatgatgatgatgatgataatcttaaccacaagaggaaatttgctatgggatcttttctttggccttctcaatatcatcaataataatatcattatattattagtcatatattatatatttatgcatctttgtttttgagatagatggtataaggatttgatgtagtgttctatataatgatctttcatttggagtttttccattttcttttgagtctaatttttttgttatgttgttccaaataaagaagaattaattaccaatctttgaaccctttgtttaccaattttaaatctttaaatggttggtttttttttttaccaatttcatttctacaaaaccttatttctgatcaattaataaagatttcatcaaacttgagaataaagatttcatttttaatgttaggttatatatttgatcaatttatgaatcattaacttcaattgggtaacgttcattttcatcttttatttgcatttgttctcatcaaaattaataactgcagaaattaatttgcttcacgtttataattttggggtgaacaaaagaaaacaataatcaaaaaatgaacggttaattttaaattgtttttttttcttgagattaatatatatacatgatttttttgttaacttggaccataagatttgtgttgagtactagacttgtgccaaaatttaataaaaaaaaaacgataaattagtaatatattgctaaaatttagcttggtgctcgttcttatgatttttaaattaaaatattaaatgctaaaacaaatacccacttaataaaattcacctaaatcccttacactactaagaaaaatccttttacatttttgttttatgttctttatatttggattcataatgattctaagtctattcttctaatattttcttacttcttttatttttttttttattt

SEQ ID NO: 193998 - DNA, 2728 bp, Cannabis indica
tatatatctccaaagagctcaccatgacatgtctcccctctcttgtggaatcacatttggaatagtaaaattttagagcgttacaaggtcatgtagaaaagcgtcctttcaagtgctctcctgatctatcttggcccaaaaaaatgcacattgatgagacacaatgctcagtttgtgagattacagcggaatctttagaacatctattcctttattgtaatttgacttactatctctgacaatcttccttgtaggaaatttatcccattcccaaggaaagcacgcggatgggagattatgttactttcatttggggtttgaataaaagaggaatcaatatagacaaggtcttcctttatgtctcgattgtggtcgacattatttgatgcactcgtaatgataaggtatacagtaataacttgggtagtattaaacattatattaattttgtttataattgttatgcagactataagactatagtggttccctgttacctctgtctcatcctgaagtggcgattaagtggtccactcctctgattgattggatcaagcttgtaagagcagaactaagagagaagatagagagaaattgaaagagaagctctgtccttaactggagcagaggagatgtatttatatatcttgagaacttaacaatattacaatgccacatagactggctttaaatagaaagctaaaacagaaaattaactaactaaatgaagcctaactaactctaacagcccccctcaagttacaatgggttcccgaagtattaacttgcccctaaaattatcgaactgagtttgaggaagaggcttagttaggatgtctgcgatttgatgagtggcagagatgtggcgtgtgtcaagttcgtgggctaggactgtcacgaatgaagtgaagatccacttcaatgtgcttcatccgttgatgaaagacgagattggatgcaagagaagtggcaccgagattgtcacaccaaagaataggacagctttgtatgtgtattccaagctctttgaacagagattgaatccaaattaactctgtggttgcaagagcagtggcacggtactcagattccgttcttgagcgagccactacggtttgttttctcgagctccacatgattaaattgtggcccagatagacgcaataaccagaagtcgatcgtctgtcatcaatagagcttgcccagtcggcatcagtgtaggcaactagattgagaggagatgctgccttgaaatggagaccatagtctattgttccagccaagtatcgaagaagccgtttgcaagcagaccaatgttcattggtgagagcttttaagaattgagacagcttgtttacaacaaaagagatgttgggccttgtcagagttaggtactgaaggcccccaataacactgcgataaagagtgggattttccataatagtacccatggaggcagcaagtttggtgttggggcacattggtgttggtgtgggagtagcagcagccatgttggtacgagtgagaaggtctgaagtgtatttggcttgagtgagatagagatcagtggctgttcttgtaacttcaaaacccagaaagtacctcacgagtcctagattttgagggcaaactgttggtgtaactgagaaattaagtgatgaatataggcactatcttcacctgtaagaaggatgtcatctacatagattagaagaagagtaagtttgccttctcgttggaggtaaaataatgaagtgtctgctcttgagttatggaaaccccactgaattaaagcatgtttgagcttgtcaaaccaagctcgaggagcttgctttaagccataaatggctttgtttagtttacagacatggtgagggtgagtctcacttttgaatccagctggttaagccatataaacacattcttgaagatctccattcaagaatgcattgttgatgtcgatttgctgtattggccaattattagtgacagcaagagaaaatataaggcgaatggtacacggcttgatgacagggctaaatgtctcaaaataatcaagaccttgggtttgctgaaatcctttggcaacaagtcttgatttatacctattaacagaaccatcttggttgtacttgacacgatgcacccatttattgtcaatgattgtcataccaggttcatagggaaccattttccatatgttgtttttgatgatggctgtgatttcagtttgcatagcattcaaccataggggatcttgaagagcagccttaagagtttttggttcgatactgacatttgaggttacagtaaaggctttgggtttcctaatgccagctttagcacgagtgaccatatgatgtgtgttaccagattgttgttgttgagtgcttacaggttgatcattggtgatgctagcagcagggtcgattatgatatcgggttcatgatcaatagccgagggtgacacatggatgttgcttgggagaatatgagtgtcaattggagagaagggtgctggtatgacatgttctggaggattagagggtggggtaacaaattgaaaaccaggttgctgtggtagagagaaatgggttgctgtagtagtgggaatacatggttgtgtctgtggtgtgggggtatgagatgtagggtctgttataaaaggaggtggtggtatagggaagctgtgaggagacaaattggttgttgatatgggaggagagac

SEQ ID NO: 193999 - DNA, 1589 bp, Cannabis indica
gttaacaaacattcttaaagggagcattgttaatgtatttttttatatatataaaaaagataactcattgtctaagcttcagctggtggatttgcaaatatttgctgcaccgcgaataactttgaagcctttggttcccacctttccttgtttcgctaatgttgtgatctcattgatggagaaggttagtagaagtagaactttatgacaccaaagggtacttttattctaatgaaattaaccatgtaaacatcttagttaagtatgtgaaactgacccagatgtcatgcagcctcatgtagattttggcttgaaaatattgggaggggatatcatgtcaatacctggcctctatcatttcattcaggtgcttcaccagtaattttgtttagatagatgaaatttgaatcaactttcaactaattgttttttgtgatttcaggatactattaagaaacaagttgcaaccctctacctatggcctcaaactcttgtaatacctattcttgatgcttcctcgtaagtgttaagtgcttttgttacatggtggatatcacttgtgttgatctctcttctctcatgagaacacattgaaattttattcttactgttcttccaataatagagtggctgtacagaggcctgtgggaatcctacatgtgacggttgttcgggcaatgaagcttttgaaaatggacattttgggtacttctgatccttatgttaaactcagctttagtggagagaggctttccgaaaagaaaactactgtgaagatgaaaaatttgaaccctgtgtggaatgaaaagttcaggtttattgttaaggatccacaacttcaagctctagagttacaagtatatgattgggacaaggttatttttctcttacactagttttagtttagacactaatcaactcaagttcactacttgcattactaaagtaaaatcaatcatttaaatgtgtttcaaaatcaaaggttggtgggcatgacaggctaggaatgcagttaattccattgagtctagtaaggcctaatgagacaaagagattcacattagatttagtgaagaatacaaatgtgaacgatcctcagaacaagaagcaaagaggccagcttgtggtggagcttacctatgttccttttagaacaaatagcatcacaattagtgacaatggagatgaatctaatgaaaacatgagaaataggaaaaagagtagactgaatgaagggtcatatggtagagcaggtttactattggtaactatacaaggagctgaggatgtagagggtgagcatcacaataatccatatgctttgattcactttaaaggcgaaaaacgaaaacaaaggtcaactttttcctcctcatagttgttatcaataccatagtttgaagttgttgaaatcattttattcactttgtgttttcagatgatgaagaaaactcacacccacttggggtgaagaattccaattcatgcttgaagagcctcccttagatgataagatccacattgaggtgttgagcaaaagaacaggccttcattttcgatcaaaggtatatatatataatgttacaaat

SEQ ID NO: 194000 - DNA, 2455 bp, Cannabis indica
ataatacttactattcaaaaaaaaaaaaaactttacaatttcataaatgaaaaaataaaaaaataaattaatagaaataacttacattatttgaagcgaacgacgtcgtttaatcgccgacacgcgttttgaagcaagcaaataatagagtgtgggccaagggccacatattccatttcagatcagattccattttactcaaaaaaaaaaaaaaaaaaaaaaatcacattccatttaaaacttaaaaacaaaatcaaaaaaaaaaatttaaaaaaaatagataaataattggaatcctaattcagtttggttttatctataaaacaatataaataattgatcaaaacacaactaccccaaagggtggcaatcttttctgaattggaatcttcaatttgattgatcaaaaaagccttcaatcttttcgtcttctctggttctccaaattagggtttctggttaaaaatccccaatttaatcgatttcagaaaccctaatttgctgaaaatcgtcgctttgatttctttattcttcttcgattattaccgtttggcaggagcaacgttttgctagccactcatagctgccggccgtagatgaagcacgagaagaagaagaagaagcggagaacttcgcaggctccaaagaaggtcgaccccgtgaacgaagagaagaaggtggttcaagcgcttgctgaagctttctcttccgcctctttggatgatgccatctctgcttaccgggaagccaaaggtgatccggataaggctgcagagatattagggcgatccttgtatgagagttctgacgatccgtctacgagctccacatcgggtgaatgctcgggctctggatcgtcagatggttatgtggagatgagttacgttgacaattttgtgaaggagaaggattctagagcttgtaagcagaagaggcaaattgcggccactggtactgtgtctacagttctgggaaaggagtacatgaattcgagcccgagaaaggatccaagaacgatgagtatgaagctgaagggttttggtaatgggggtttcgacgaggagaaggctgaacagtttctttgttctatgcttggagaagagtctgagctgaacttggcgattgttagagatgttctgtgttagtaattctgtcttttatttatttatttttattcaatcatggtgtatgtacggatacctctgggaaaatgacttggacttatcttattatgtactttgaaattattccctttttaaacagaaaattatacatctttaaaagccttttggaggattgtatttttgttttgcaagttattaaacagaaaattatatatttatattttctctgagtattcttttttttttttttcttacaggtcaatgtggatatgatgtagaaaaggtactgtgaacattgagtttgataattttatatcaatttttcatgtttatccttaaaatgccttttcatctcctgcaactcatgtaaaatgtttacgatcaactttttgttatttcatttaactggtttatcaatctctggtagtttgattgtctctttaaaaatatttaatatcaagttttgaagtgctgatatctgaattgtggatgtgccgggacattattattaatatattagtgaataatattatgtgtatttacaaattacatgggttcatcatcaaataatttgcagaaggagttcctgttccccaaatattgtaggtttagacagggatcattgtttgcaaataataataataataatttgtacaagaagcttttcactctgttttttaggagtataaaattttatagtttacttcgctgccttaatttagatttggagtttgtttttgttggttaggcactttgtgcttatggatggttagttcttaatggaaattggacacattatccatttctctacttttctttggactcatatgattaggctgtgctggtgcactaatatatttatgagattgcagacaatgtggcattaatttttttttttattttatgtcatgctgttaatttctagtgtaaagtgtaaaaattctctaccgatggttgtctggaatataattgtcaattgtctgaattcttgttcacctaggacttggtttatgattttggaagatgacaagatgtcatgggtttttctttttcacccattttgcaactgaaatgtcgtgtgtaaacaacagttccttgctgctatagtctaattgattgtctttatgattttccaggccttggatgcattgctagatttatcatcttcttatgatcagtctacaaatggtcctactcctagctatagtctgagctacaaagacaatagtagatatcctaacgaaaattgtgataatgtaagtgatatcattttttagatgattttaagtgacttgtaatatcttctcctcccctctcttctctctctctct

SEQ ID NO: 194001 - DNA, 1689 bp, Cannabis indica
ctccaaatataacttggattgttgccaagttctgttgaaaggaaattctcattcataaaatactgagctttatagactctagaaaccaacgaatcaggcttagtcagaaacctctaagcgtgttcacccaacatagccaaattgaaatcatcaagacatcaaaaacccaatcccccaaccggcttcgaagagtcatggacaaattaattttgccaaatcaatctgtttttgtcaaaggtagatggattgttgaaaaacctatcaattgctcaggagttagttaatgatctaacaaagagggaatgaaaaaagactgttgtgaggattaaatgtgatatgtcaaaagcctatgataggctagaatgggattttattgaaacagtcctcaaggcctatggtttcgactcctccttcatcataataattatgttttgtatcacatatgtgagctttcaagttcttcttaatggtggtccgacaaagactttcaagcctcacagaggaatccgtcgagggaaccctttatcgtcgtatatcttctttccttatctggttgctaaaggaatttggcataccaaagaatttatctgaccattctgcttgtcctattaaaagtgagtcccagttagatttttggaacacctagtggcttgttggagacaatcttttgcccaaacatggtgaaaatcccttagttaatagacttgttagagtaagtgatttagtcgcaagagatacggatggctcagatactgagttgactcagagagttttcagtcctcaacttgtctctaaattgtaggctatcgactcagcttctctcccttattcagaacagggttttttggaatcccatatctaatggaaccttcaacctcaagtcaacctattggacgctcaataaaaagagatttcaggaccgagttcagtcaatttgcaagatgttgtggaaagctaaggttcatgatcgcctgaaactcctctaaaaactctaccaaaatattctacccacaagatagagacttgcaactgtgcttggaaatcgtttgagaccttgtatgctttataaatgaaaatgaaggtaactccacatatcacctcttttgtgattatccagtattagaagactttggtttatgagcagctggattattcacctagaatctttcaatcttaccattagtggagtattatctatgcatgttgcctgttgtctgaagtttggtgttatagaaacatgactttccatgacaagacaactattctcttagaggagatctttaagacagtggaatgtggatagaaagttcactggccataagagagcttataatgacaaggaaacagttcctactattaatgttgatggctcaaaggattagattcccacacctttttgtttcaaagcttgggttattggggtagtcaagaatttgtagctgcgttgggggtggttatcaaagaccaaaatgaagttttggccatcaaaaggtttctatccatgaggcccttgaaggtgagttatatgttgtgttatcactggtttgaagattttgagggagttgcaatttactccaggagttattttctcaaattgtcaaaggctgatccaatcaatagagaatagagttgtttcaagttgttcttttgcttctttctctaagcttcttaggtggcgtttagttggag

SEQ ID NO: 194002 - DNA, 1331 bp, Cannabis indica
gtgacagtatttttgtaaaattttacccaaattctaacatttttgtaagtttcccatttttttaactacggcccattcttacacaattatcactggactgggctaccttctttctcccaagttcgttacgggttgaagcccacaacaacttgaactccaatacatctttcttaattttttaaaacaatttaattttttagttttcatattaaaataaaaacagtttgttttctaccattttcgcttaaaaacaattaattattaattttcctattaaaataaaaaaaacagttgattttataccctttttactttgaaactgtcaatgtttttttcccatagaaaacagctgatattttaccaaattatagttgattttcctaatcaaaaatataaatttgaaaaaaaaaaataaattgatgtcgtatatatgatctttttcttccaaaaatagtagaaggggatggtttgatttgctttgttcacatacacataatagaaacttttttcattcatatatacaattatcaattatgtgtttaattatgtgtttattggattgcattcaatagttttaagttaattaaaattcaatctaattatgtattgaattttagattttaatatttgatctggttcaattaattttaatcatctaatcgatctaatatctattattaaatatattgaatttgatcatttcaattcattaaatatatttcatgtatatttattacattgattcaaatttatctaataagacttaatattttctagatcgaatttattaaattagatttgataaagaagaagtaaattttaatcctaatcaatggcttgttgctcatagttctactgtgatttatctgtgtcctggttttgtgctaggtgacgggtctaagcagtggcagccaccacttaaaaatagcattaaggttaatgttgatggcgctatatttgttgacactaatcggtttggggttggttttgtggcctgtaatgcacaagggttgttgatcgaaggagttaccaagctttatcaaggatcggttacaccagagtttgtggaagcattgggtgttaaggaagctttaagttggatcaagcgaagtcaatcttgccaaattatccttgaaaccgattgcttactgtttatacaagctttgcgtagttcaattgaaatgatttccatgtttggtcaaatggttaaagattgtaaggctttattgaaagaaattcaaaatgtttctatcttttttgttaggcgatcaactaataaggtagctcacaactttgctagagcttccttatcttatcctgattgcagtttc

SEQ ID NO: 194003 - DNA, 1946 bp, Cannabis indica
ccttcaatctttgagactcatatccacgtgttgtgtccatatttaatgctcgaaatatggtgtaacaattgtacccctaaaagagttttttttttcatttttttaaaaataattttacaatcatgattaccatttgttattttgtgtattgaggaagtttcttgatttttttcttttggtcgatttttatcttcctaataaagagctaatcatggattttgcaataaattcttgtcttttcaactaacttgtaagttgaattacccttaattaaattttcatttaataaaataggtgcttacaatattgttaaaagacggacattttcatccctcatcaccatttccatcactattttctaagaaaagaagaagtacagaaatcagagtttcctcttttcacttttctatgtatgccctcttggtctcttcactattttttttttttacttttctacaaccattttttcaaaacccaagaaacacttcatttctttcccttggatccgtcgagctttagggaaaacttcgtcaaatccatcatcaatctctgatcacggtaggtttttcttatccccttgatgtaaattttatgatatgtttcgtttcttaaacttatgattttaatagggtttttaatctgatttgagttagctggggattttagttatttttaggatctttgtaactctagatttctttatttcaaattatgtggagttttttcaaggtagttttctctttttttaaaagaagaaaaataaatctctctgaccttgactttgaaaacctagaatttttagatcttgaaattcacttttcttttgccttaccctttaagccaaatcttgaaatccctaaaacaaaactcaaggaaaatgatgtgaaaattcgtgaacacactgagaggttaaaaagctagatgtttctactcaatttagttgattcataaatgaaattattgaaggtaaatggtcttgtttgcgagaagccccctagcccgagcctctttattttattaaataacctttggccaaatctttgtttttacccctcgttaatgttacttttttgctaggtactttagatattcaacttatggccccttcaaaatcttcctaacctaaactaccctaaaatctcactgtgcaattcaaagctgaattttttgaatcaaaagtaacttctatggccccgcatgtcggtctttctttacaatcatgtggcattaaataaggctacaattttctatgttggtcagttgagaaatacaagaagagttgatttctacctagtcaacttgctagtaactcagagtgtagtatgagcgactctgtaagaattggggcttggagtgttgaacacgcaagtgttggggctatccttcctttaaagatctattttaaagattactgcaattatgttaggatttccctattctagttgattcctaatggttataggattttagattctcataggtccttatacatatattgggatgggaaggtcttgaaccatacaagatcactttaatgtacaccctcaaagcaactcctacaaggaagaattgttccagaggctttttctacctcaaaatttacataggtgatcgcaaagttattgtcaatcaccctaacaagaaagaattgaaggactgattcttttggactactgaactacatccttgtccccatacattttttcaaaaaccttgcaagtttaacaaatcactttatctgtttctcttaagataattttcttgcatttatttcaatctcacagcctcctttttactttgacagtgatgatgctaaaacctattccatctaaaattatgtcacaacatcatcaaattctagtgaattttacatttagaatgagggcatcaattttccttcttcaggagccaaacctagtatcatgtgggttgcttggaagggatca

SEQ ID NO: 194004 - DNA, 1042 bp, Cannabis indica
caccaataactttatacaaaataacaagagaaaaggttgcgatggggagaatcaaaaaggtaaaagaaacaaaggtcaagaccactactagcccatgtacaccatctacatgaagctagcagagtcccttaaaactatttatgtagaaaatgagcaccatgtaccattccctgtactagagtccttgaaaggtgattgagcacgaagacattcatcaaaatactatcaatatcacaaggacctaggacaaattaccaatgagtgtcaaaatctaaaagacgaaatagagacactcatccataacagacccctagctcattatgcaaggaaaaggaaatacaatcctcgaggtgccaatatacaacaaccaatggtaccagagtacaaaattctcaaccttccaatgcatccacaaggaggccaatcgggtcataacctgggcttaccccacccgtggagggagtagttgtgctacgaccactaccctagaggaggttagtagcacactagtgaatagtggcttcatcaacaaataagtgtgcgtcacacgcatgggaaaagaagcaactagattaataacaatgtttagtcaaatatttatttttgcatttttttctattagtttatattttttagtcaatgaagacaattagttattaaaaataattatagtcacttcgccaaactctaaaaataagtaataaaggatactaattaaaccttgttacttagggggaggaagggtatagatataactatactcaaatgaaaaatcatataactatcactaaaaaattatttgttgattttgcaccgcaagaattatttatttcgatcagtattttataacccataaaagctattggtatttatccagattttgtttttcattattcgtcgattaagtcgaagcatcatgaatagaaataatcaaaaattctgtataatcatgaagaaagatcctttgcattgagccatacacttccattatattgacaattttgaaaagctattcacaccatgatcatagtatcatggcggt

SEQ ID NO: 194005 - DNA, 1737 bp, Cannabis indica
aaggatataaaaagttgattagaactttttagaaaatgcacaaaaaatgagaagattttaattccttccagctttgtatgaaaaaaacaaaaaaaaaatggacctagttacaaacatgaacacaatctaaattagagtataaacatcattgatcaaatttaataggaaggaaaaaaaacagaaaaactggttgacattactaaagcaacaaatttgcaacaataatcacaatcaaagtgatgatcaaatcctttaagcaaccatccaaatttcaagaaggtcttatagcaagtacatcccagctaaataatacatgagcaaaagaaatagttaggtcaactataactataaggtctcaagaagcaatataatgctaaaccatcttataaaatttaattttccaccatacaaacaaaaattatgataatatctattgaccatcaaaaggtgcgttttttttttacagaggctgaaggcttcccataacaatggaagtcttcgcctaagccagcctgggtaagtggtggtcagtagtccccactaccatatgagttagtcggaaaggcagatagctaagccgagctaaaaggagaaaagcaaggcaagggcttagcccgagcacagaaggcaaagcaaatcaagatttttctaaagaaaaagcgggtgactacacctatctaatctaacaacaaagctctgataattatgaaacgcatataagatacagttgaatttctgtctaggccagaaaagttatgttaacaaaatagtcagcacaatcctgacatgacctaagataccactaaagggctaggataattcctattattaattctagctgagcgtggcttgaccaaagactcaaaagcaaacccaactcacaacatgtataccaactagtgaaatatgcaaaataagtaccaaaatgtaacccgcattcaaacttacatgtttatcagtacaatatctgaaactgctaaggcaaaaagggcactttgcttctcaaaggttgtatcatcctgtgagaaagtgagataatataagaaaagagtatcagcattggcagatttgttcacaagatgaggccaaatgaaagttcacccgttaagacttcagaaaaacaactcccagaacattaggctattgttacagcattcatgcattctcaaatgaaaaagcatcaaatgtgcatatgtggtatcaagaatatacgtacagaagagtggctacgacatcaaatagttacaaacaagaacaattacagacagatgtaaatattatgagataaaagtcataaagaaagataaaagtttaagaacccacagttgttgctatttcttctttaaatcactagtacacttatttttaccttaattctctgcatgaagcctattgtatgtgaaccatttttaattctgtcataagagttcaacgattatcagactaattctaagtctagcactagatttatgcgatgcaaatgttcttttcacatctccaatggtaggacacaagcgtactacataagaggtcattggtcaatatacttaatactagaaattattttcttcattcaataaactcctttatcttacaaaataatgatagagaaatagttcaagtgcaggactcatttgttattcagcctcgattataattgaattgaccctactgttgagttacttattcaatgttatgcatcgtatgtctttcaatattggtttgacaaggaaaact

SEQ ID NO: 194006 - DNA, 2015 bp, Cannabis indica
aaaatgataagggtggtcaaatcctagagtactctttacttaacattggttctccccatctcagattctcctactttgaactttaagtttgctcctatcttaagaattatgcatgtatatttagagatttggtgttcccaatttacacatgttcaacttagaattcaaattttggataccaatgactccttccagctgcaaattgtccccgcagggatacatttcaacggaagggcagggtcaattttggatagtgttgctgaaaacttatttatccttttctttttcacggtagaagttgttgctccaccaatacaggttcttacttgtaaatttcagctggtcattaactcttgtctgaattggacgtacatatatggtctttaggtacatggaaaacgtctatattactcccctagatctctattataataagttatattttgcactcaacttgatgctcaacttggctaagactttttgagtcaattgatggactttagaagagcttttcaatcagatataaattcattttgtctttacttcgttttcagggacccatgctaaagattaaatatagtgaggaggagacctgaggccttgtttggttgccatacaacctggaacaatggatcccacttactggataagcctttggaagtttccaaagtacagattttgggacccctggcacttgaaaatgcatgcatttctttaacatttcttttgtagcccagtagcttagctggagattgctcagtaatgatctgaagattcatgcattcaagtttatgaaactctgcagtctcttttcatttccaagatattgcagtatgacttgctaagaatgattaaatctttctacagttctacacaacttttgtaatttcgttagtgtgaatttagtttataaagccaaatcatattttgatctttgtgcatatatttcgtgtgcatagctcaagacaaggcataacctatatgatgatgtttttacatttctcttatgcaacattaacatgtttatagactctggagaagtattttactattgtagttgaccctttttcacaaacaaaactctattcttatatatcaggtaaaaaaaaagggcttatctataaactttctggacgtgctgaacgaaagaagttgctttcagtagaaaatttatgaaactctctttaacagaactattttacattggtggtcactggtcagtatacttattgtcttcaaggccaaggagacaagcaagtatacagctcctccgccggcaactcagttacattttctgttccatagttataataattttgaagcgagcttgaactaccacgatcatccacaccagatggtgctgaaatcacagaaggaagagaagccacgggagacgagcggacaccaccaccatcgttggctgatacacgaagcagcatctcttgagccctgttcagctcgtgtttaagcatcccaacctctctctcaagccttctcttttccaccaagacgtcctccagcttcagttggatacttctgtaatcaaactctactgtctgtgtcttgtgtcgggctcgccggttctggtaccagatggcaacctgtcttggggatagcccaagctttgaagcaagatgaagcttgcgttccgattggagcttgtgatcattggtgaagctcgtttccaagagccttacttgagcttgggttagccttctagttctgcgctgccctgtaagtggtttagacaggtcttggttttgttgtgtctcctcaataagtatgtcgaagcactggaaatccatttctttttgtggaaaacaaattagtttcatatcatttctctgttaaaaggtttattatatatagatttttaagcaagaggaaaaatgaatgctagtaaggacgacctgtcaaatctttagtgttccccacttgtgaataaatgcttgtctcattaagaacagagagagagagagagagagagagagagagagagagagagagagagtagt

SEQ ID NO: 194007 - DNA, 1564 bp, Cannabis indica
gtaacatgtatcgatctttccctttatttcttcatttgtacaatcgggataaaattataactatataaatacatttggtttagggttgattaaatattggtaggttttggtaaatatagtgtaaacttttaactttctgcgcttcaataatagttactttttcttatcgctattgattcttactgatattttgttgtacattttacactaaataattaatgacattaattttatttttgcaatcattcaaacaattcagatttttaatgtactgttaaaactaaaagtgatgttattaattttgattacagcagaaatatatttacataaacacgatgaaagaaaatagtgaatgaacacgaaaaaatcaacaggttgacatctaaaaatttgtaaaacttttttttaagtctccttctataaatactgagtaataaaatcaaggtattatgctataaataaccatgccattcttctacatcactctgtatattattagaatgtcccattttttctttgtgtgtgcgtgtgagtatttttatttttggctggaaacaacttgaaagcatattcccatattgttgatggattggatttggtattttacttcaaaagataaagtaaaataaattgatacaaatgcatagagaagataaacactgatatcattacatattgctaaggaacaacactacacaaaagaccatgaactaatcttaactacggcacactcaaactcaaactaacttaattactaccttattagaaaagcaatacattgatctagactccttaaacctcaaatacagagtgagcaaacaaaaagctatagattgatagataacaaggctatgattgtcaagccaagctaaattaagaacaagagatcagctaacaacatgatcaggggttgccagtagcagtgacagaggcagagccagaagtaggagcaccgccgcggccagggatggggacctcaaaaccagggttggggatgaatgtgtcatcagcaccaggaatgtacttacgctttggtctgccactgatatcgccaatgacaccgccaatgacaccgccaatgtgttttggaggagcataagtgccggtgattggattgtagttcttgtaagaggggtgtccgataccatggccgtgaggtggtggcagcattacacgtccaaagccaggaaccagaacagtgccgtcgtgatcaaccagatactcgggttgtttcttgtcaactactgtcttgggattgtttggtacactacgtgctgctgcaactccgttagctaaggctagtaagagaagagaagccaagagaaagagggagcattgggttttgtatgccattttcttaattttcaaccttaagtattggatggatgaagaaagatgaggagaatgatttggtggcagaatgggagagtgtgaactcttcttatagctgagtatttgagaaagttgggtgaagtttggcggtgatttaagaaagagtttctcaaaagtgaggcgattgataatattaaaatgaataataggatacaaagctgaaaaagacaga

SEQ ID NO: 194008 - DNA, 1068 bp, Cannabis indica
aatagtgccatgccaattttataagtaattaattaattgacatgaatattattttttagggaatacatgcatgcacataaattttttgaaaaaattacaaaaataactcatttgtgtttttgactttagtaatgctattaaaattaaccatttttgtaaacattgtaaatttattttgaaaataattaagtaatgaaaaggagaatattaaaatatctcacatcaatcatattacatttagacatgtgataatatatgcaccttaacaaatattgcattaaacacatgtgagcgacaggttccttttttgttttaagaaaataaataaataataaatagaagaagatcgtacataatatttaagaataaatttagagatttaaaaaaaaaatgcacacacaataatttatatctaaaacgattttatataaatttatttattttaatatgtattattattttattttatgttcatatctaatattatttatttatttttatatataattatttataaaaaaaatgaagtcatttgtaatattttaagtattattttatattatatatgggaattgtatttttttttaattatgtaatcaagattagttatatattattgtatagttaatgtgtgaaatttaattgtgtcacataaatataattattattgtatatatttatatgtatagtaattagttttagaactgtatcaattatcatttatgcctaatttcttttttgtgtccattagttgatttgtgatcgaactttttaaatggagtacaattaatttgaccacttttggttttgttgattgaacacgtgtgaattgtgatgatggaccagaccactccatacataaagttactttattatgccattttggtaatgatttttgcatttacattatgcatatatagataaattatgataattagaatcaatgaaacttcaatataactataaaaggttatatatatattatttataaatttttaaaaaattataaataatttcagtatcgaagttaaaattcgaataataacttagcatgtgtataaaaaaaac

SEQ ID NO: 194009 - DNA, 1017 bp, Cannabis indica
aacaaaaaaaaagaaaaaaaatgagaaagttagtataagataaccctttgtttgattagttaccctttagttatcctataacattatctttgttatgaagaaaagaaaataaagggaaacaaaattataggatagataaaaaaattagaaggaaataatggaaaatatatttccttcattgtttggtgggtagaaaagaaagaaaattaaattgttatagaattacaacaataaccttaaattattaatatatttttcttacaaaaataaattagtaattttatatcattgttgttctgtaaaagttttctttccatttttctctctaaattgggggagaaattttttaatgtatcctatctcaaatttttctatctaaccaaacaaacattctttttacttctctccactttttcttctaattaaatttttctttactctcctttttctgtcataccaaatataaatttttttcttaaaaaaaattatatttttgtaaattattttgccaagaaaaaaaacaccataaaaataaaaaatttccttaaaaatatgtactaaacattatgtaatacaagttttttataatcaaaattcttcaaatttcacatgaattttaataaaaatatgaagagatttgatgctacctctatggttttcgatcaatggtttactcaaaatttgatttttcaactatattaattgatggttttcgaaaccagatatattttaccgaaatatttttagtgagtcataataaattttcactcaattatttgtttaacataatttgaactcatcaaattttactactaattaaattatttgttatatctttatttttttgtaaggatttttttatcattattagctaatatttttcataatataacaatgacaaattttgtcattttttttctattggtgatagttttttattatgtttgccaaatattttaatatgtaagcattttttattttaatacaactcattgattcatgttttatttttatttt

SEQ ID NO: 194010 - DNA, 1967 bp, Cannabis indica
tttcagggacacaaagcatatcatttaagaacagatgaccagattttgttgtgtattttactgtgccagatgtagtgacagtgagtggaaaaccattgcctacaaggagatgggttatacctttcagatctgccttgtgttgtatgtgagaagcattggcagtggtgtggtttgtagctccactgtcgatataccaggtattttcattgtgagcatcggcagtagtaaagtaagcttgttggtcactggttgtttgattggtgttggtgttttgggtgttttgaggttggttggaacctggtgcttggaaggagatgtcaaatctgtggtagcatttggatgctatgtggcatggtttgctgcaaagttggcagatgggtctgttattgttagtgcgtcctctgcctcgaccacagccacggggattgaaggaacggctgctggagtgttggtttgggttatgggtatggctgttaaggttcaaagatctgcgcatttgagtggcgagatgagcagcaggcatagatgagtcgtttgaggctgaattgagttgttccaaacggatttcttgactttgcaacatatattgcacttcttgcaatgtgacttgatcatgcctagatgttaagttgaccaccactgcctcatattcatggccgagtccaccgagtatgtaaagaattaaatcatcatcagatagaagctgacctgcggcagacaaaccatcagcaatatttttcatttttaaaatataatcatgtatagagagactcccttttttgagagactgcagctgaaatcgaagttgcagagttctagctttagagctggtggtgtataagttttccagagtgacccagaggtcatgagaagataagcagttgaccacatgtccaaacatggactcagaaatggagttaagaagccaactgagaactgattgatccgtgcgcctccacatcgcaaacccgagatttagttgtctcggttcatctggtatagggcctccgattgtattatcaacaaactgaggtggacagtgttttgttcctagaacatagccctcaagatcatgagcccgaagggctgggagagcttgggacctccaatagggatagtttgatctatcaagttttatggtgagtggggcaaggctttgaaagggaaaagattggactggtggagctggagttatggctggtgtgttgactgtgtcagctggtgaaggttcatttgcagggttggatgcagatgacatttcggctgatgtggggttttccataaatcaaggagcccaagatttattcagctctgataccaagctaaacagagtaaaaagaggagaaaaaggctctgtatattgatgttgtattaattctctcagctcatttacgaatgaattcaaaggggaaataaatacacacaggaatgtactagaacaagcattcctattggtcatagtaataacagaaaaatattctcttgggaccacataattgatttggtgaatattctttcattgtcctatgattgtggctgattacaataattaggcctcattaaattctgggctttcctcttcgggctgggctattgtagggcctttcatttcaacatgtctgaactccatcgtctttactagtacagaatatgatacattaaatggcacttttcaaattttgaaacttttccgtgtaaaaaataacataaggcagttcatactaatttgattagattgtgctcttaaattttgtatgttgtttttcaaaatatggagaacataattttgtagtggtaacagtaagggcatagctcaattattctaaatgatttgggagacacaatttgacaatatacttcgagtgtgaaataatgacgtatcaattttttacaatgaaagatataataaaatagttagaaagtaaatatcttaattattctttattttaaaatattttattaaaaaa

SEQ ID NO: 194011 - DNA, 1761 bp, Cannabis indica
taatactaaaaaaattgacaaatctcatgataatattttggtaattggatcaatgaatttgattgaaagttataaataataaaaaaaaataacaagaacctttattttcttactaaaagaactaaattaaatatactttaatgcaaaaatttaaaatgaaacgttaaatatatgtgtgtaatataagtacagatataagagtaacaaacaattaataattaagaaagttttacatacacacatgtaataattataatatagatatgagagtacacgtctaatggggggttgtctatatataggtttaattttgatgattaattttatgtgaaatgttgttcaatatacacaatagtcatatagatatttttttaaaatttttttattagaaaatagatattttttacttaaaaagtcatcaatttaatctgaattgtgaaaatatggtggacaacttttaaagttttcaactattagagtatttttttaaaaaggggtctaggtctggtagtatatatatttatatatatatatgaaacaaacgggtttttcaagtggatttgtgtttgactctcgggtttttgggtatcacaatttcagaacctgaacccagtgcagtgggtaaatgggtgtaatccgaacccgccctataattttcaccttttttttggggtttccaaatttcaagtcgggtagttaggtttctgaccaagtgggtgagtttttaggtacgaatgtgttgccctttcttgtttaatttgatttgactacaaaattaaatataattataattatttttaataaatttatttaatttgtggggattttttactattttgtagtataattatacaaaaaaatatatatttattttttaaaaatataatttttcaagcggggctacagcccacaactattgaaaaggtgtgtccattcctatatgtaatatttgtaaataaaagatatcaatggatcattattaaaaatgtaaagtttacattttgataaaatataggatacaaatgagtatttattcttaaattaattgatggtaattataattcctttaatctaagcactttctaatattactttctctctgaatctaacttacataataaatatcccactatagtgttattgaaaattcatagggcttgactagaattaaaataacatataatgcaacggaaaaatagggtaaatattattttagactttgtagtttgtaaaagttatttattagaccctctgttttattaaatgacaaaataaatttatattttccaaaatggtaaaaataagatcacgagctcaatttcaacaattttaattttctaatataaccaattttaagttaatttttaacacgaacagatataaaaatatgtaaccagttttatcataatatctctagatcagattattattattaagttttattttaataaaaatcaattcaaaatgttatttgtataattttaaaaaatacagacaattaaggcataatattgaaaaaataactatccacaacaaaacaataataaataagaaacttagttccaattccataaagaaattttattaattaatttcaagcctgtcaaatacgccaatatcggaaccagtgattcatcattatgcatatattaccacttttgggagctgtatgtgttatcttataatctaattattaaaactttttttggggaaggtcaatgcagtaacttaaacgaactttccttacaataataataataa

SEQ ID NO: 194012 - DNA, 2199 bp, Cannabis indica
ttttttttttattgagaaatgtggtagatctttttctttttcaagaaaagttattttactggtacatgtgtcaggggacaatatattcgggtcaagtgctactgatgcagctgaatctctttttggtgcgtttcgtcctgctatggaatctggaattccttgggcagcaattctaggaaatcatgatcaagaatctactatgaatcgtgaagaattaatgtctttcatctcactcttggattattcagtctcacaaatcaacccctcagttgaagaactttcaaatgctgctaaaacaggcaaacgagaaaccattgatgggtttgggaattataatctaagagtgtttggtgccccaggttcccatttggctaacagcagtgtactcaatcttttctttcttgacagtggagatagggagacagttaaaggaattcgaacatatggatggattaaggaatctcaactccgttggctttattatgcttcgaaaagatcccaggtacaagaaataacactaaaaacagctacaaaaaaatttatcgtttgattgattctaactaacccttttttttcccttctttaccgcacgagtgattagaatattactaaacttaataattatttacaaaattaatatgaaaaggtaaaggcaatctgtcaatcaaggttggcctaatgcaatgaatttactcgctctgataagttctgttgaattcttttaaattctactctactttgcacaaatccaattttatagctaaatataattgtttcatatatttccttgttattcaacatcatatatgtgaatgactgttaggtttcctagatttagatttcattaaattgttgtaggtcacacactaacagggcccaaagaagtgtactaatcgatcgcttaatcctttgacactccccacaccaccagccctagcatttttccacattccgatcccagaagttcgtcagctgtactataaaacatttataggtcagtttcaggaggcagtggcatgctcatcagtgaactcaggtgttctacagaccctagtctccatgggagatgtgaagggtgtgttcatgggtcatgatcacaaaatgatttttgtggaaatctagatggcatatggttttgctatggtgggggctttggataccatggttatggaaagtacgggtggcctaggagagcaagggttatattagcagaactgggtaaaggagaaaatgcttggatgggagtggagcagatcaagacatggaagcgtcttgacgatgacaatttcagcaagatagatgagcaaattctgtggagtagcgatcatggtcgagaataattcgatcgggaaacaggaaaacttgatgcaaaccatgccagtatgctgtacatacttccaatgcagttgtttttgtttacacagcattgcagccttgatttagtcgtttgtaataatgcttgttgttcaacttataaatcctgcttgatgtgatgatcatacaaaagaaaaacaaagcagaaaccttattattgttcaattactttacacggtacctagtttaggattgttttatgttgattttgaataatgtttggttcaaaagaaaattttaatattgtgtatggtagtgttgcatattcactacatgactcttgtcattatttatttagcaaaatagtaaaaaggaatgctatcataggaaacattcaaccgactcaaagaattttaattacattaattaggataaacaagacaatccaagattgtggaagccatttttacatagacccacgtccttattgaatagattgaagctttaattgtcgagcgtgaagaagacaccagtgacttcaacaatgattgaagtaaaaaagaccacagattcaatgatagagttgatagaatcgttctcgaaattatttataagtatcctaatggataagtcacatagagatagaatggaaataaaatgaaacaaaatggccatactgtatattttttttctcttcaatatatactatccctaaattataagataaaacaataaagcaaaaacaaacgacaattagagaagaaaaaaaataaagttaaaagaaaaaagaagctttatcaaacaaaaaaggcacaaatagattgaataagattatgattattttgaataaagtcattcattaaaaaaaattgaatgaaactaatt

SEQ ID NO: 194013 - DNA, 1811 bp, Cannabis indica
ccagcagtacgtggtggggaagagtcgagtacattgtattggtgtcaatctttcttcacataatttggtatgacatttatttatgtacggagtcatgtgcattttttgttgtatgtttatgctgtttcggtggtggttatgcttgaccgattttttgctggatcttcctcaaatatgttctcgtaaatatattcactaacattttaggcagtcagagtacaataaaggtatattttagcaattatgcgattcaacattatgcttttcttatcctaacatataggatatttgttgtattgtttgatggtgttggtaaaagttgagagatgttattagaatctgaaaccaaagtttttttctttctttctttcttttggttgtcagcgacaagatgcttggagtcttcatctcttaggcagcattcgtggtccaataggtccaatctcttccagatgtaaagttttattctgcagatctgtcttagttccaagtggaggaaatgaggttcctattatgaaatctgccgctgtagttttgacaaggtatcttttttcttttcaaatggcactttatggaaggggttcttacagaatgtttgggaacaagttcatatgcaagaatttatttctttttaaactatgatttttctttctagtacgtattgtatgaattaatattttattattctttgttctattatcagggcaggataatattgcactgtctttctaccttagtgcaatatatatatatatataaatatatatatatatatatatttattgtttcctattcattgtttaacatgattatgtttctctgtgtggaaatctaaagcaacttctgtattaacattcatgtagatcattatatgtttgtttcctattcattgtttgacatgattctatttctctgtgtgcaaatcttaagacacttttgtattaacattcatgtagatcatatgtcgctgtacgagaaagtcgtcttgtactgcagttgattccagcagttggtatcattgcctttgctgcttggggtctagggccactcgtgcgcctgggaagggttttgttttttaatgtacggactctattgtcctctttattccatattgcagttttgaaagttgacaaatgtatttaatttcttggtttactgactatgcctattttgcagagaactgatagtagttggaagaagagtagttcacattatgtgatgacatcttatatccagcctttgttgctatggactggagcaacacttatctgcaggtcttaacttgctgctttagaaaaaatatggagttagatttcacttgcaataatgtcattgtttttctattaactacatatgatgtgtttcagagcgttggatccggtagtcttatcttcagaagccagccaggctgtgaagcaacgacttttaaattttgtacggtcattgtcaactgtgctagcatttgcttattgtctgtcaaggtaggatgtagttgctacacttctcagaacaagttactacaactttgtggatattcaaattatgttcaaattaagcacctttattgtgttaattaaattttctgcgaatatctttttgttctagttttctggcatgattttttttaccacatttttgcttgccttcacgtgggtggggtgtaaaactggacagtatgctatcattatctttgttcttgtttaggtgttttagaattccaatatattgtgtttgctcaatcttattgattattctgttaattcagtataatgcatcttgtgttagggtctgacaactgttgtcttcccagc

SEQ ID NO: 194014 - DNA, 1290 bp, Cannabis indica
gaaaaaaaaaataaaaataacaaacaaacaaacaaacaaacatgaacatagaacgtacttagggtcctttagattatttttttagaagggattattttacaaatacacaaaaataataaaaaattacaaaaatacggtttcacagaattttaaatatttttacgatttttttttattttatttacagaaaatacaatatttttatgttgtactcttgttaatttgttattgattttttattatctgtatgttattttttgttgttatttagatgttattttcatgttacttttatgtagttttcttgttatttttatgaaaaattgtaaaaatataaaaaaaattctttaattgtaaaaatataattttttttataaaaaaaaaataatatcttatgtaattattcatttttagaatttataatatctaagcgttattagttttattacatttctcttgatcatatattcaaattcgaatcctaccttcctttcaaaaaaaaaaaaaaaaaaaagaaaaatcgaatcctaccttatgtcaaaaaaaaaaaaaacgaaatacctacctattcttttaatatcaatgaataaataaaataaaaactagtaaaaataattcttccctttgatattcgatacgtcctagtaattaaaatttgactttaataactaatattcatattagaaaggatttttggtatatttggccatgccgcctgaatcagaagctgattcttaagatagagaaatatataatatgatatttaaagtatatgggctaatattcttaatatatatgttgtttgtctagtaaatgaccttcattgtctttatactttctttttgaaaaaaataaataatgaaaacaaaagcaatcatccatttttttataattagatgttaaaattattatgaatatgtttcaattagttttttcttcaactttttctaaacatataacttgataatgccttgtgaactaaggttcccctatattttatttaataaaatttcttttagaaaaaaaagaactattttcatccttttttgtacagatagttatccaatatattaaaataattctaaaataatataattatttataaagagctctctatatttatagctaacattccaatttaatttgagagtagctaatggagcataattttaatatatcccaatattattataggttatttgagattttttggtataagattatttttgtataaaatttatagaaatgtatatggttataatattagactagatgactattatttagtgc

SEQ ID NO: 194015 - DNA, 1720 bp, Cannabis indica
taaaaacaaaagtgttactaaaatattctcttttctatctctccaattttcctttcctttcctttcctttcctttccttctatattttctttccctctacttttccttcgtctacaccaattgttgatctctacgggtttaacaaaggtctgagctttttgagaatggcggaggactcagttccatggaagactctacacagcagagagtaccaaggtcacaagaaaaaggtattcactcactcactcactcactcatccatcttctttctctattgattttaattttatttattgaaataggttcattccgtggcttggaattgcaccggaactaagctcgcctccggttccgttgatcaaactgctagggtttggcatatcgaaccccatggccatgtaagttccccattcaatttcactcttaaagctttgaactttgaactttttctgttctaatttgttgcttaagagacaatagtttcattttctgagtaatttggagaattggtaatatctacagagacataaataatgtgtagtgaatcacattcacctcagtcatgaaccagtaattataactcagaaatttcatcactaaatcagcaaaatgaattaagacctaaaattgtgaatgatgctaaaagctatgatgtagcaaagaatcgaaaataaaaggtatggtcaaaccaaagaattacaatgctttattgatctgaaaccaaagaattacaatgcttgttattcggtaccaagttttcaaaaccaaacattttgagatttagaattattagatttgggtagggaatgtagagattgaaaatttttgcatatttcattttctttgagtttatagttggttattgtgtgtgttagggtaattattcgctaaaatattgtaactacggttttcttccgtcacaagtgagggctcttaatacataacagggtttggccagtcttaacaatggctgctttatctttttcaaaaaaatctgttttctcagattacaactatctcacttgagaagctttgtgatcaaactcacacaagttctgtgcagccctccctcgtctcttagttctctctctctcaacttggtaccgagattgcttaggttagtcggctccacaagtaattataactcagaaatttcaacactaagtcagcaaaatgaatcatgacctaaaattgtgaatgatgctgaaagctatgatgtagcaaagatttgaatataatagaacacaagtatatacaaggttcaattacaaatttacaagtaaattgagtttggatgtactttctttgatctgaaaccaaagaattacaatgcttgtagattacacctccttgctcagtacacacacaaattctgtgccgcccttgttattctcttagttctctctctaaacttggtacctgtaaaaaagtttagaaaagggtagtggttacttgtacctgaacatcacaaattagaacaatgaaaaccaagaattatactagtttagaggaccactatgaatatacattatcacagtcacagtttgagtgataggcctcatcatagtataaatctcaccaccatacatctgcgaaaagaaacactttctcaactgttgtgttccaaaactcttaaaactcacagctttgcacaatagagtcggtcaacaagttccttaactttttataataaaggttttgctctggttcttgcttatta

SEQ ID NO: 194016 - DNA, 1825 bp, Cannabis indica
atgctcttttattagttatgttagaaatattgttttctattttggaagtttccacatgttgatggtttgaaccgtgatttgctaacatcatttttgccatatctacctgcctataactgcagcagagatgtggtatgctttaaaattgtctttatggttaacagtaaattggttcaaataaccatgtatattatcttctctcattcacaagttatacaatcataagatctgaaacaaattctgttaatcaattatttaacattcaactttatgtcttatacctggctttcatcctttaattctgtttccctttcagattttgcagaacaacagtgatgggtccgaatctggctctttgttgcagtccatgaatcactctcttactatatttggttcaaggcttcttaggcactgggtaaggcttgcatcttattgtaaatatattgtgttattatataggtagttactaatgtttaatctactaaattggacaggtaactcaccctttatgtgacagaaacatgattattgctcgccttgacgctgtttcagaaattggagaatccatgggatcatctcaagcctttcaggaggatgcgaaagatgtacaaacaagaaacccagagctttatcatgtgctctctttggttttgacaaatttaggaagagcgcctgatattcaacggggaataacaagaattttccatcggactgccacgccaactgaggtagtgaatgctaccttcactggtctattacttggtctattaatttgtaagaattgctgagttattgagttttgtagttcattgcagttattcaagcaactttacatgctggaaaacaacttcagcaactttacagtgaagtagacgaagagagtaatgaaaatttcagcacaacaaatgtgtgctctgagcttttaaggaagttgatactagctgcatcatcatctactgtgattagagtgtctgcaaaattgttgtcttccctagacaaagatgcagctgataaaagggatctgcaaaacttaatcatctctggtggtcaatttcttgaggtttgtacagagttttgccttattttttgtctttttattcatttcatacatgctgttcattttttgtaggttgctagagcccggaaagaggttcaatcagcaaatgagaaattggattctttgattgctttgtttcgcagcagcttagaatgagcaagctggaattcatgagtgtgtctggaacgacgacatttgatagaggtaattattcataatcataattcaaaaaaatgtatatctattattttattaataattgcatgctaacacactattcaacttttgattgtgtatgggtacatgtatgaatttgacgtgttcttttctttctttgctatggtaaattttacttttagagactgcagtttaaatggagagagggagggagagattgccactgcaattgatgatattttatgtagcaaacttttccatatatgtaataaataacaatcctgttagctagaatgttgaacctgctcgttattttatttgtgtcggctgcagttatctgttgatgtaaaggtacccttgaattgggtgaagatcaatagtaccaaaaaaaaaaatccggtatcacccacctgaagtgctaaaatgccttagataagctgtcactggcaaaatgaggagcttaaatattgcttgtcaatctgcttggaatagctttctagaggaatttggtcaaatattattctgaattcagagctgctgttcaagcactggctgctttagatttgtctgcattcacttgccattctttcg

SEQ ID NO: 194017 - DNA, 2136 bp, Cannabis indica
aaaaaagaagacaaaataccttctctgtaagatacttgaaagctactttcttctgcccagcctcatatatattacattcagagtatatctatttgtggaaacccatgaaataagacacaaaaacaaactattatcagatgaaatcctcaaaaaccaaaaacaaacacagaatcattgagttatattatcttcacctgagattctacactggcacaaacagcatatatgccccagtttctggtgtagttattgtaaagatgaacttttccgaatctaacacgagggtgtcgctgtcgagtcccatcaaagaaacaatggtgaatcgttacacgaatgcatctatcgcttacatgagaaggatctgctccgatcagcattgtcttgtcatgctgcgcgaaatgacacctaaaaaaagccaatggtttaaaaacaaagagctgaaagagtgaactttggggattcaatatctcaccttgagatggttatatcagtgctttcgcgggttatatctataagtccgtcatcataatcgcgaaggctgcatctatcgatccaaatatgttgtgatttcggttttatctgaatgccatcaacatcaggccctctaccaccttcaaactccaaattgcatacaatgacatgttcacattccttcaatctcaaaccttttccagtaagttttatcctttggcctcggccatcaattgtcttaaacgatgaaacactcaagtaggatgaaagatgaattgtgccggacacttcaaacacaatccaaagtggctctttcttacgacatccatctcggagtgatccaggaccatcatctacagcaacacaaacagtaatgaatctcctaaacgtaacaaaatttctttaaaattcgacaaatgctcttaactcaaaatacaaaaacttctatgaaaatcactacactcgaatgtcaatcacaatcaccccaacataacaaaaatctcccaaattcgaaaacagaacattgacatgaagatcacttcattcaaatttaaatcacacaaacagtaatgaatgtcctaaacataacaaaatatctttgaaattcgacaaatgcccataactcaaaacacaaaaacgttttctatgaaaatcactaacatccaaatttcaatcacactcacctcaacataacaaaaatctcccaaatttgaaaacaaaacattgacatgaagatcactacattcgaatttaaatcacacaaacagtaatgaatctcctaaacataacaaaatttctttgaaattcgacaaatgcccttaactcaaaatacaaaaacgttttcaatgaaaatcacactcacccaaacataacaaaaatctcccaaattcgacagtaggaagatcaatacattcaaattataatcacacaacaaaagaggaaagcccaaaacacaaactttttaagggggtgagtgagtgagtaagaagacaacctgctaaagtggtgacatggtagagtgaaccatggagaccaccaatggcgaaacgaccgaaaccttcggcctgagaggctagggctcgcaagcttgagtcaacatgaccataagggaaggtaaaggtgtccatgtgaggagggtaaaatgtggttgagctggttggaacttgtggtggtggttgtgagggaccgtatttatagggcagagctccttgattttgattattgttatggtgtttgtggtggccgtttcccattaatggctatgtttagaagctctaaaaataaatttacttcattacaatcaattaactgttactgattataactactgaaactgaaattgaaattgaaattgaaattgaaattgaaaccccaccattacactgatcaaaactgaaagaaattaaacaaaatttattgagatatatcactactgattttcatatataacgaaagtatataataatattatcaaaaccaaaaccaagaagaagaataatgattaccaaatggacattgaagctcttgaattcctatatgaaatgtgtgatttaatacccattagaatttcccagaaaacatataataatccatacattattcgcataaaattaaacccataacaattattcatcaattcaataataataataaaaaaaaaaaaca

SEQ ID NO: 194018 - DNA, 1356 bp, Cannabis indica
aacgattcctcgtagacatcactccaaattggattcattcaagattctttaatcaagtatttactatatactaattcatagttaatgaatctcattcttcttcttcttctttctttcttaattgttaactttcagttcttttaattactattagctgaataaagatgggcttctcatactcaaagggtttagattctaagctcaccaacgaatcttccccctgatttacagaagcttaaaatgtaacggtaaggtataatatatactatagatatatataatatatatttttctatcctccttttcttttagagtaataataacttgggtattgctcttctttcttttaggtagcatttcatgctttgagatttgcagcaccaataagagagttgggagaacaattagcaaagagaatgtggatagagggtccgtacattgctctacatctccggctagagaaagatgtttgggttagaaccggttgccaaaccggtctaggacccgaattcgaccgagtcatagccaaggtccgcgaatccgagcctgagttcctaacagggagcctaaacatgagccatacacagcgaaaactcgcaggtttatgcccgcttaacgccttggaaatggctcggtttttgaaggcgttaggggcaccgaagagtactcgaatatacaacgcgggaggagagccattcgggggcagcagggctatgcagccactcatttctgagtatccaaatctcgtgacgaaggagatgttggcgcgccaaggcgagcttgcccagttcgccaacaagtcctctgctttggctgcaattgactacattgtgtgccttagtagcgacgtgtttgtgccatcacacgggggaaacatggggcgtgcgttgcagggtcacagagcctatgttggccataggaagttcattaagcctaacaagagagccatgttgcctttctttgaagacaccaccatttctgaggctgagttgagcagtgtggtgaaggagcttcacgctaagtcgttaggtcagcctgagctgaggaattacagacgagagcgtgatgtcattgcttacccagttcctgagtgtttgtgtcaaaaaccataagaagacaccaaatggttttcttattggaaagtttcacactttgaaatttgtttggtgctgttattcttttgcattttagcttaaaatgtttagagtaacgcttctaataataattagtagaatttcattttggttaaagacgttttctatgtgtaactaaccaactgttagtaattgatttactttttttttctttacgtggaaataagccaattctgttccaaaatgtagggatgtaaacggg

SEQ ID NO: 194019 - DNA, 3954 bp, Cannabis indica
ttttcgctatctccagaaaggcgtttatgaattgtttgaagagcattagatggaataggtcggccattgtagttataggacacaccatcagtcatgtgaacctcatgaggatttttgttcgatatatattgtgagtatatgtccaatggtaccgggggtctataagttgtgaagaaagcgatgctactctcctcattttccatacctattatagtagttcatagtaagaattttgatttattttaactgtttcaataaagatattttattattataaacattctttctgaaaagtgtttaggatatcattaataaaataaaattgtaaatacattaagaagtagacaaattatttcaatttaaaaaataattttttaaaagtcaatttagagaagctataaatcatagcttcacttctagcttaaaaatgatagtaaagataagaaacaaaacaaaaggtttacttaattgaaaatcaattagtcttctatatcataaatatatttatgtacatgttgtcaatgtagagtaattagttcataaacaaataaattttgtttaggtagagtttttttacttttagagcgttcacatctcatgagctaaacttagttcaaaaggtaaaaatatatatataaaaaaaatgctgttaaaaatgagttccatcaaatgattagaatctcaaaaatgacttaaataagctaattagccaaagacagctaataattatatatatggcaattatagtactataggtaatgaataataataataataataataataataataataataataataatagcaaataacatcatataaatatgatagcaagaaaaagaaacaaaacaaaagatttacttaattgaaaatcaattagtcttctatatttattataaatatactatataccttgtggatgtgtagaatcgaagccttgccaagtcttggatatataatttggaagaaagataattatgagaaacacctatggagctacaactcctatatatttatagtagttttcaaccaatcaaaattctccacctaattaaccaaacatcttagttaacataatttactaaccttccaaacttggttaactttaactcaacagatcatgcacatgaatgtgtttctcatgtatatagtagctggcaatgctgtcctagttatagaggtccattgcatttatcatcatcatcaatggatataaattggaaaagccaaaacacacaaaataaataaataaataaataaaaatctattaattatagagtttgagggttgaattgaatcggattagattattaagattgaattgaattagattgaattgatagcggatccaagatttaaatttagggtgggcattgttatgcccatatttcaagcggccaatataaacatatgacacgtaaacatgaagttagaaataaaatttatatataaataaagaggaatgtaataatggttacatcacctcggtccaccatcgccgaaggtggctcaaccacgtttagccgagagaaacaagaaagagagatgcatattgaaggagggagctcacaattagtagaaaggggcactacaagaaatgtcacttttgccagcacatttttgtctctactcattttattacctcaaataccaacatatttttgtattagttttgaaatgtatattgaaattaaaaatatttttattgcctcattttatgctttttcttttactcttttttttttcctcctagctagtagctaaaatcatttttttttttttgttgtgtgaatagaggtgacaacacattatatatgtgtatttttttctttttcaaaattttaaaaaattttttaaactaaactatttattaatttgactcaaaaattataccattgtaatctattttttatgatgatcattttaatatatgggaagcatatatttttttgccgctacagaaacaaatgactcgaaagagtaatttttaagtttcttttctatgtatctagttaacaaaaataatcaaactctcaacttaaacgaaatttaatatatcagccaattttataagttattaagtaataagtttatacacttagcttattttgtaacaattttgatatgtttctaaaataaatatatggcaatcacatagtatcttaaattcaatacaacaaccaacatttactccatatttcttagaataaattacatctcagcaattattaaattgtttagggaattattgttggttattaaaataccagctattatgtaatagtttcacacacataccggtggtttactgtacttgtagtttttttgaaatagattgaaaacaccaaggacgaggcacaacaaaatccatggcaaacaggggtgcatcaaagagcaggacatgatgatagccaaccaaaacttcaaagatcaacaagagtgtgaaagtcatcaaatctgaaatgtgctaatgttgatatagctgaagaagaaaagttcaaaaaaaaagaatcatataaagaggcataccaaaactccaagtggctaggagctatgaaaaaataaataagtgcgctaacgaagaatcagacttgggagttggtgccaaagccgaaggaagtaaaatttattttgtgtctataaggtaaaaacttatcctgacggctcaattgaaagttacagggctcagttagtagctcaaggattctctcaacagtatgggttagattatgacgagacatttaccccagttactaagattacaacaatgcgagttttgttagcacttgcagctagtaaagactatggcagatggatgtgaagaatgcttttttacatgcagaactagatcgagagatatacatggtgtaaccaagaggatttgaggatagagcacatcctgactatgtttgcaaattgaaaaaggcactttatggattaaagtaagctccacgggcatagtatgccaagattgcagagttcttagtagaaagtggatatatttcatggtgcatgcagattcaagcttattcattaaagtaagggaagcaaaaatcgtgattgttctagtatatgtcgatgatctcattatcactggagatgatgatgcagaaatttgtcaaatgaaggagaaccaattagtacactttcaaatgaaggagcttggagaactgaaacacttcctcagattagaagttgaccgaactaaggaaggctcatttctctgttagcaaaagtatgctaaaaatttgctgcaaagatttgaaatgcttgagtgcaagtccatctcaacacctatggaagctaatgctaagctgctcatgctgaaagtaattcgcaagatggagcaatgtatcgacaactggtgggaagtctaatcctctttacattgactcgacctgacatttcttttatagttggagtagtaagttgatatatgcagcaattaatgaagccacatttagaattagtactacgaatactgaagtatgtaaaagataccattaactatggtctcttctataagaaaggtgataaggttaagatcgttagctactgcgatgctgattatgtcagagatcatgatacacgacgattaactactgggtaaacttggatttggagtagtgtcgtagtatagcgaaaggcaaccaacaatatctttgtcaaccacagaagcagagtatagagcagcagcaatgacgactcaagaaagtgcgaggttgatgcaactaatgaaggatttactccaatccacagattttgtagtgccactttattgtgataatcagactactatccctctagtagagaaaccagtgttttatgcttaaacaaagaatgtggaggtgaaaaactggtactgaaacagttttatacatattaagggttttctctctctctttgctccttgcaacactctgagttggtgccatggtgaaaacaaggtcc

SEQ ID NO: 194020 - DNA, 1444 bp, Cannabis indica
agactctttaccctatttggttaggttagtttctctttcctttttgtccaccaataatcaaagtgggttttcttgccataatgggaatgggcacatgccacgtgtcaggtgtcgttttatatcatcatcaaagatgtgttggttccataataaagtttcaagctttgtcgtctctgtccaacgtgtcatgctctcaaccctcaaaaatatcttgctcacattaattaacttctaccgacatcaaacttaatttatatcttcactcccccactccttttctcttacactcttttctcactcccaataaagtcactgaaaaaaaaaagaagagaagggaataaaaactataggaaaactcactaagaagaagaagaagaagaaatgggagaagcattgtataccattatttctcaagttcgtacagttgctgggtatacactcatctttcttaaatcttgttctttgaattttttttactactatgtattataattttttttttaactgtttgatggtataattaatctcttgcaggccttgtttgacattgctttatcccttgtaagttttgtcattattattatttttatttgttaagtagtttttgatgagtttaattattattataatttaggttttaattttatttaattataaatgtaggtatgcatctattgaagcaatggagagcaataacaaaacatgataatgaacaatggcttgcttattggattatatatactcattccttgtctcttattgaaatcatcatccaaccagctctagagacgtaagattattactatacttaccaatttgatgtgactaaagtaatgtgcttttatttacctactaaattactactatttagtaacaactaacaagtaattttttgtgatatttttttaaaaaaatctatattttaactaaaagatagttttttttttttctttccctttagtgcatataaccatccactagatgatgtctctttcatattattctcctccactcctttcaataactttgctctccattttttatttagtggctacaaaattgtttagatatttgaaataaacaatgtgacatatagatttgataatatacacaacatgttgcgtggtgtagtggtaggaatcacttttattgacattcttctttgcttgagtcaagagttcaaaacccactacaacccctcttaaaaagggtttggcctctataaggttagctgttgtaggtagtgtcatctgtgtgataaaaactcttgaagtgattaccgatgacccgattgtgggaggctaagttatcaggcacctatagtacttgacacgtaattcaggattgtcaaaaatgaagggtggagaaagaatttgcacacgtatgcccttcagtttatatataaaaaaataataacaaaaaaaaaaaaaaaaaaagaaaaaac

SEQ ID NO: 194021 - DNA, 859 bp, Cannabis indica
ttttttttgaaagggatatctacctagtatttattattcaagtatattggtactttgaacattcttctaattcattattcttatgggaaatttggtgaatatcaaacaaatagatcgaagagtactatcttgtagaggccagcatacattttcatttttactttttaatgttttaaaatcaaaaatatgtttgataattataattacttttagttttgaaaagtaaaatgaccaatgatataagcagtttacattcaaaaagaccaatgattataagcagaaagattttcagatcgtgatctttaaaattatggcaaatttcaccaatgtaatatttatagttggggaaaacgtttatacccataaatttgatgataaaaataagcacacattaaagtcataatatatcgacaagaaaagaagaaaggcctcatgtgaaagctatcatatatagctctgaatcttttttcttcctcttctttgaaattgatatcatttaactttggacacatctacttgtcgcattgtcgaaatcgcacagctacaggtgcctatatatataaatatataaatatatataaatatttaatacgtgtttgtgaccactatatagctatatttttatggccaatatacaagtagttttcattttcacgtgttggctgtagtggagtacgtatgagaaagttacttcgttaggagacaataatcttaataatttagttaattagcatataattaaacaaggccagcttttaaaatgtatatttttagctaattattttgttgttgtactacgttgaggtagagtaggttgatattattattagttacgcataatgttagtggtatgtatatt

SEQ ID NO: 194022 - DNA, 3880 bp, Cannabis indica
ccaaacttttgtcaattcaatgagtggtagtgtgaaataatttgagagaatttgcggttataattttttagtaatgaatggcattttatttctcatgggccctgtatgttaacataggtacataaatgtgggatgtctcttttaggacttgcactagctgacaaagagtagcttcatgcctaaattttttggtacttgtccggtataacaccccttctatgttccatgtggataaactaggccatcataatgagaaatattgagaatttttttagtggggtggaaaattacagactttttttttctctggtgtatttacaagttcttgtagttttcatgcacaatttttatttggttatgatgtgggtatttttttactctggttttataacagcaccagagaaagcacaccatctagcttgataagggagtcagacatcttaagaaatccgggttcaaccacaaggcggccaagttcaactgcaactaaccaaagggtgaggaatgaaatgcaaagaaatatcccaacagcacaggagatcgaagagttttttgctttcgccgagcagcagcaacagagaatctttattgagaagtatactatctctctgcattattttgagtgtgaagttttgactgctagtggtgcacaatttgggaccacagctaacaaatatacaaataactgatgaaccctttaatattattttttcaggtacaattttgacatcactattgattcgccactccccggaaggtacgaatgggtgcaagtcgttccctagacgaggaacatttaattggaagttgaatttgagactgcaagttctgagtccataattagtgctaagagaagttggattaactattaataacattgtgaacttgactgaaccatttggtatttgctcaagtacaaaagtaggtttagtttttttacttgagagaaaggaaccatttgagaagagattggaaaaaagaaaaaagtaatttaggctttgattattctgttgatgtatctatcactagattttcagtttaaaccgttgtccatatttaggtagaatgactcatctcttcagaaataaatgcaaacaaccaatttcctttctcatattaatgttttgtttttgtttttcaattgtcttttttattgtagtatttttcaccctcaaatgaaacataacttggttattatttcaagtctttgaagttgatgtttgaatctatcaaaaaattactctttttagtctagaactcctctttattttcacctaaactgtaataaaaataggatatggtaaatgaaacagaagagccatatttatttatgtaaaaaataaaaatttgggaagaaagaatggaaggtgatgttgtaggtttgaagagcagttttggattgtttataggagtcgtaccactgaagactcaggctattctgtaaatgtccttttatttttgtcagagttgattgttagtttgttgaaaattaggtccttatttttttattttatttactgaagtggtggtggtaaaagctgctgcagttttgctctagggtaatttattataggatcctttattttatatatatatatatatatacatatacatagcaaagtagtggccatatgtggggattgtaaaagctattaattcacatgtgggttatgtacggttctgtgctctgttacatataatttcatttcactacaggttgagacaagtattgttcaacttagatttgatgatgtcttttatttctcttccatccctttcctttgccagatctttttgtccaacccaaccatgcttgctttgcatcaaattgtagggtttaaattgttgaaacttaaagccccaatttttgtacggattacactgattgagttttacaacttttatggctttgaaatcctcaccatcttcctctctctctttctcactcaatcaaagcctttaatgtttatgaatcccatataagtttttacttaatcagtaatgtcagacatgaaattggttatgggtcttctcttcttgtttggttgccacattttgtttgctttttttcttcttattccaaataattatagactaaacgcattgaaccagctctgattagtcgacatcaatagcgatacatgtgcaaatatgatcccaaaaaaatttgatgagaaagcaataaatgccagcttcaaacatggaccatgcaaacccatgttggcagttggttgaaatatacttattttttgttttttaagttttgtattgctttttgaattctattattacacgtattttacttaatgaacaaaacgacagaatgaaatgtataataatatatacacaaatctcatgagtgagatttgactagtgtcggtgagtagatcaaattagtgttttttagaaacacagaacatcaacaacaacaatatatgatgtgactttgaacatatcttttaaaatcttaaccttggctgtgttcattggtacagtagggtacactattcaccatttacttattcacattattctagagagagagggcaagttgttcagtgtcttataccaaacaaacccagagaaaatttacatgtaatgaagacaaagaagtaaattagcaaaatcttcaacaccaacttgagaccccccaaaatctaaatcaaaatctttcttttcaaatttttcatcttttgtataatttgcattctccataaaaagcaaaaaaacaaaactgttgagttttgggtgtgtgtctaaatacaaagattagaatgaatgaatgagcacaatgggggtggttttcaagttaggttaactgatttgaggttttgattttatatcatgtgtgtagtgcacttcttggaatgagtggattttcactgaaatacatacaaataaataaagtttgtaccctgttatgtgcatgtaaaaaaaatcatgcagaaatccaaatatacataaaataataatatatactaaaaaagcatcaacacagatgacatgcatgaagaaatattatcactatttttttaatcttctttcgtactagctctgttgacatagagcaaaataacagaacttgttaaatagtaattttctaccttacaataaagacaatcataatattatctggctatggtgttgaaataaaaaaaaaaaaaaaaacatatatgctaacaatgtaaagtaactattgagaaactgtattaagaaagagagcatcaacatgtacagactacagatgacatgcatgaagaattattattattattattgttgttgtttttaattttcttttgtacttgctcagttgccatagagaaaaattacagaaaacttgttaaaaaataatgctattctacctcacagtaaagacaattatgatgtgtggctatggtgttgaagggggtaaatttgctgaatttgtctctgacatttcaacttcacatgcactcctatccgttggttttccattctccaatgcaatctctctccttttagctagtctttttgcatgaagctcgtatctgataataaatacaaaacaagaaaatcaaatcccagttttcagaaagtactaaaacaatagcaactattcactattatactattcactccaaagtccaaacatcctcataaacttttttctttcttctttcaataagttaccctgaaatcgtaccattcacacatggaaccacttggtagtgcctcacacatcctacatactcaattccttttaaaaacaataattactcacacaccaccacaaactactttaattagctaaatcaagtttaaaaacaattcaatcaactatatcttccaccaatcatctaacaactctatttatgctttctaatcttcttccctaagt

SEQ ID NO: 194023 - DNA, 830 bp, Cannabis indica
actgtccattcgccgagaaaactctcagccttcgtattttgcctgtgcttgttcatggttggcctactagaattcctcctctctataccaaaagtccccaaccatgttttagattatcaaatctagacatcgatagtgtatgatttttatttatttatttgattgattaaagtagttgaatgatgttcaaagatgagagatgttattttgttattaattttatccattattgaatatttttcatctgttgatatagttgatttaattgattacatgcatctactactaagtgtacaaatcaataatctaaaagacttgtaacaatataataacaatttttatttacgattgctaaaagatgtacaaataagattagaatacactattaggaaaacaaatcaattcaaatatgtttttgatgatattttagaacagcacaaaaagatttaagatcttagctagacccttaatatgttcataataagtaccttaaaaacaacatcgcttggaagaagaagaactaagaaatttagttggagttaaatttagttgtaaatttaaacatttgggactagtttaagagtggccatataaagggtattggagtgtgtgagtagggttgcaacaatgtaacttgaaaattgtaatttcgaaaggcaactataaaagaaaaaaaaagtatctataaatttatgtcttcaaataataatgacttacaaaatctattttatctagggtaggaaagatagggtaggaatgatggaaaggaagaatgattgatagggtaggaaagatagaaaaagtataggaatggaaaggaaatgagtact

SEQ ID NO: 194024 - DNA, 1272 bp, Cannabis indica
aattccattttactatttcttaaaaagaatcgctgaaaggtatcactggtgcctaacacttttatcgttataatactgctattagtgtaattaagtatcgggtcttatataaattaaaaaaaaaaaaaaaaaaaataaaaatatggctaatgaattatgaggggatacctataaacaatgctctttctcaagacataaccccctatcgtttctctttggcatttctaaagactaacaatgtcactatccatttagctttaggacaatagaaagtcaagtcaagaagactactaaagggttgtacggacacacatttatatattaaacaacttcttcgtatgtaagtaattgccttttttccttgacgtttcattttctttcccatggaaatagtacacactactatgcatagtctccttttcctttgagataatactttacttaaaggataaaggttcgttccaatgtaaataaatgatctctttctttgagtgattgattttcattgtactatattcaaatactttttctcacacttgattgatttcttaacacagacccatttttttttttttgttctctgttttcctcactaagcttcggacccaagaaacctttttttttttaaatgggttggaaatgatgttctaagtttttcaatgcagagaaaataagtgaaaaaaagctaaggagataataatgatgatgatggaagatggggaaagttcagataggaggaagaaagagtctattgaacagtttactcaaactttgttctcttggactcttgatgacatttctaatgaaaatctctacaaagataaggtcatactctacatatgtaactttgttaatcctttttcatatttctcttggaattttgtcaaatgggttttgtttttctttctcttgtttgaatatattataaaaaaactgtacggaaattcttcatttggaatgtttttttttcttgttttaaagctattaatgtgtaatttgtggattattttgcgaactggtaggtgtcctgtaatatttaaggattttttttttgaaatagggaaaacccattttagtaagaaattatagaaattgataaaggagtttttcattctatagtgttattttcaagtggaaataattctcatagcttcttacttattgtaaatgttgttgcattgcatgttttaatcaattggcttgttaggattcgtttgtggtaacgaagttgtgattgtgtttgttgtaagttcttctgtcatgatttttttt

SEQ ID NO: 194025 - DNA, 1324 bp, Cannabis indica
ttagggcacaaaacctaacaacttgcaccaagcaaagaaattagagagtatcatgagacttttttgccccaaacgacgataagtaatcaacccttgcaacatagctactacctctgctacataaggttcataggctgtcgccaccggcactgcccctcagtagagaacctcacttggtcgactcatcaccacagcccaagaccaatctttcactcttcaaaattaacattagcatccacaactaagttgacgtcccccaactctagctcctcagttggagtagcattagataggtcgactgacattgaggcatttgacattaccatcgtacaagaagaaccatgagcatcttaatagcaccaaaggaaacataaagatcattgggtcaccatatcatcttggagtaatttatggtcatgaacaaaatattcctcctatgccaaatctaccaacagagaataacaaattttttcatctcctgtggtgaaataatatccatacaaccaattaataactcatataagttggaggccagcttaagagcttccaaacctttgaacaaccacccttgtcttattcctttgagcaaaggacataaaaaaaggacttgcaaagtagtctcataattttggaaacatatagggcatacctttgcaatattcaagccataacgttacaaattgacataacaaggcacgaaattaagacatactttctaaacaaaatttacacttagggtggcactgaaagagaccacatgaacttcccaccagcgaggttgacttgaggaagttgacacttgaccccaccctactctcgttatagagctccaatacccactcttaactgtgtacataccaatattagtaaaaatgcaaaatcaacatatccttccaaataaacaatgaaataggaattgataagatatctttagcttcaccttcatcaaagagctctttaactaaaagaaaatatgacttaggccctatccctaagaccaaacataaaaggaagctgaacatacatctttgcttgatgaaaatcagtgaagttggttgacatctctatgaccatagaatagtctcaaagaaagccactaatcttcttgacacattactcattagtgtcgattagccacgagcattggtactgtgaaaagtagaagtacctcaagcgaccactatgtagagaaggctttaattccaaaaaccagttaatgtcatgtgtaggagactctcgcacccttgctttgcgtataagatgtacatggtagccaagtacttgattcccttttgtgtgaattgcatcagagagattttataat

SEQ ID NO: 194026 - DNA, 870 bp, Cannabis indica
ggttctcacaaattttcccactggattttacttcttatttgttttcatttcctggttataggttcatgctcgtaagaaaccaatggctgaagatgtggactatatggctgttgctagtatgactgatggaatggttggagcagagctagctaacatagttgaggttgctgctattaatatgatacgtgatggaagaactgaggtaatactttcttatatagaattgatagtcttctctaatgtaatatttatgtttgagaaggagagtacatctatagactatttggactcaaaatagtgaaaagaacaagtttatatatcaatcacatttcttttacatgctctattttggcttctgaaagtgatgtttttcagtaagggtgtgtacgtatagttgcctgagaaacatgtgataacagtacttgtcttagtgtagtaatttttgtttgacatttgcagattactactgatgatctcttacaagctgcacaaatggaagaacgaggaatgctggacagaaaagagagaagctttgagacttggaagcaagtagctattaatgaagcagcaatggctgttgtagctgcaaacttccaagatcttaaaaacgtcgagtttgtatgatcctaaagccttatttgactgaaattttgtggatcgaatgtctcattgatgcgtgcactttgttgcaaattaagattttttgaacttgattggcactctctcaaaataaagattcccgcaagtgttaagggtaaaaagtaacaatatattgatttgcttgcagctcactattgctcctagagctggtagggaattgggctatgttcggatgaaaatggattctgttaagttcaatgacgggtttct

SEQ ID NO: 194027 - DNA, 998 bp, Cannabis indica
ttacatttaatctatgtgagacattatagatatcaaaatcaattggtgataagtagagtagtccatattcttatatagtgtttaatacttttacatttaatccataaaagacaatgttcttcaatatacataatttttttttctgataaattttattacaccaaagttaatatttatctaattattaacattttattatagagttaaaaggttgatagttattaagtgtaatataaaatgtagtaagaaatattatatgattcattttagcttagtacacttaattataaaatccttaaataaaatatgattgtttatacatagtagtgtaaaactgtaaattatgtgtgtttgaggcaaagtgttagaacaagaaaaaagacagagttggaattgagagggcagttttatttttggatttctttcctcatttatgaattttgagagaatactatttattattggttctaaaaccaggtgggttttttgtcagtttattttgtgttgtaatgatgtatatatatatgtagtatattaaatgattgtttatggaaagggtaaacgagataaacatgaaaaaggttggcagaggagtttttcctttcttggtcagcactgaaaaaaaaatcaaacacctgggagagtgagtgagtaaacaaccgggaaaacgaaaaaaggcaaaaccctttttgaactagtatataaaggggtggtctgttcattggaaaagccactcaaatttcaatccattttgtagctatgtcttctttgtctcaagaagttctcaagcacaatctaaccgatgttggcaggagactccttacaatttctggctccataactgaccttctcaaccttattgaagtaatgtcattccttttcattttgtttttcttcttttttgttgtttcttttgcttaaagattatatcttttttaatgggttttgtttgttttcatgttttcattagcagagagacttgaaattggtgctctcac

SEQ ID NO: 194028 - DNA, 1714 bp, Cannabis indica
aaattaatgtagaaattaattcaaatgtattagaatatttttatattaagtataaaatcactaacttgattttttaggtgaatatttcatatttattataattgatttcaaaacaatttttttgattcataaattaatttattttccgattttagtagagactgtctactaaattagtggataaactgatgatcatacaaaaaaaaaaaaaaaaaaacttgttttttctttttatataagtaaagtactttttgtaattattttttagatgaatgtttgacaccaaagttataagagagttacggttcgattaggttagaaaatatcataatataaattaaggggtcattttcctttactaaaacttgagcaagaattatagaaagaaagaaatatgtttatattagtggaaagttgattttatcctaataccctaaggtagtagctgaaattcttactaaatatattttaacaattactacaaatacaatttggtggcctaagtattcaaattgtatagaaaatgtggaaaaattacaacgaatatgaatcaaatcaactaaatctttaattaataaaattggcaatgataagattaataattcacacaaacaagaatctaagataaaaataagagatgataaacaaagtatttaaaattaggaaaacaataaaataataaaatcaataccaaattatatattggctcaagtcatataaattgatgtgatttatggttttactttagttggaacaccaccaaaatttcatttattaattgagcaagaacatgatacaatacattactcaagattgattcttgtttagattctttcaaagtgtttatctctcacactcttacaccaagaatttttttcatatatagaagatcttcttcatacaaatctaaaacctaatctctctcttttctttgtactctcaatctctctcttcgaaatcgtctctcaaaactcgtttgttgatctcatccctcaaatgataagttggtagtatttatagataagggaaattcgggagttgcaaatgccaagttgttattggttaattacgacctaataaacttaataaactcctcataacaatatctccacatcagcttaagttaaagtgctttcggatgagacgtacacttcctgaaagaaagaccggagcatacgttgaacggacttcctagatagaaaaggcaataactggagtcgactatatatccagaacttccttttaggatggaacagctagccatccgaaatcccttttcagagaaagactaactttcttgaagacaccttccagagtggacaggataaactcctagaaacgtctttttgaatgacatctatcattccgcaagatttcttccgtatggataagttagactttcaaaaatatcttaccgaatgacatataactttccataattagaacaacttttataaatctttttatttggagaaattatactacaaaaatcttatcatatatatgctacacttttaatggtcttcttatacataattttttcaactacttttttaggaatttttcattttcattattattattttatttttgacaaagttttacaaacttatgatttattttatagacatttttttaaaaaaaaacttaattaaatatatggaaaacaagtctactctttagtaagagtaatcaattagtaaccgaccttaca

SEQ ID NO: 194029 - DNA, 1888 bp, Cannabis indica
  modified_base (1884)..(1884): a, c, t, g, unknown or other
tttttttttttggttgggatttgaactaaacataataaataagttaagttatcaatatttgtcagcttcacttatgtatccactagagtttattattagcagagttttaatctttatagccatttttctctatcaaataaaacagatcgaaacgtatacgaaatataccgacctcgttatacttttaatcaaatccatgcattaatattgaaagaataagacgcgactatatatatgcagacagacttatataatcactcttatcacacgtacgtaaaatcattcatagaacaaacaaaacaaaaagtgaaacatcaattctctctcaaaaagaaaaaaagtgaaaagagaacacacgaaactcacctcgatgatatataacaaaatgaaaagagacagttcataaaaaacaatttatttaatttgtagcattaaacagtaatagcgccatgcattgctactcaaaacgtgctttaaaatcccatattgcaaatataagacagcactagtactagtagtactacactatatatatcctcacatgataatcaataagtgatatggagctgaatatgatagaatgaagaaggggtagtagcaatataagtatatagtagtatataatattcaaaatcatacactacgtataaattaattaagcatggtgctgaggatcaggtcctcccggtgccaccctatccaccattaccgatcttctttttcccgctgctacaagtttcgaaacgtcgaaccccaacttccgcaacatctgtccactgcgtaggtctgaagatgatgatgaggatctcatcatcatcatcttcatctccagtacctctacatctccacggtggtggtggtgatcattattaatagcaatgttatttcttgctgcctccaacctcatgaaaaggaaactcaaaataataaccatcttcataacaaacaaataagttctgctatttgccattattgtatatattgttatatatatatgttgtttgagtgatggagatggagaaaatgtatggctattgatgatagtgatatatctctctatgctttgtgtaagaattctcctaataagtttccagatacatattcaggtgtacgtggtctaatttgtgcttgtacatattatatatatagtgtgccaagtttactttgtaatatgtattgtgcatcatttttggctaatgaaaaagaatatatatttttatatatataggacaaatattctttgctttaggtgattttgttgaatagttgactataccatgtactaattaaaagcttccataattatgttttgttgtttaagtaataaagtattaattaatttaattgtgtgtgtaatttattttgtgcatcaaatttattttcttttctttgtggttttcagcttaaataaaatatataatcatgaaaattaatacaattcgtagtccatgtgcataaagttgccattgcatttcataaactatatatgtatataaatatagatagagacatgcagacatgtgtgcgtgactcatgatcagatcatcaacatggattcctagttttgcttcttttgttttttaactttttcttgcagtcatatatatataaatatatatttataattatggaatctaaaaaaaatgtatgcaaattattttaaagaagaacatgaaatatcttatcctctctaaaaatttagtggaccagtgctagtcatttgatcaacctcttctctaaaagtagttaccacttacctgtcttgctcgattttcaccacaacacacaaaaataaatggggttttacaaaaatataagattttgggtaaatatttacattgtaaaattttacatttttactctcctgaattttttttttttttntttt

SEQ ID NO: 194030 - DNA, 1667 bp, Cannabis indica
attgtattatatgtattagacttttaaattactattttctttacataaaatgttatttgtatacataattttttaattttgttataaatatgtgtggattggattggatcggttacttttacatgtcaatcaacattcaatccgcacaagtgcggattttgaattttccaatctaatccaatccgcacaagtgcggatatccgcactttgcggattggattggattagatcgtgcggattggattggatcggctattttatgaacacccctacttcagagggcagaaaatccatttccctttatgcttaagggggaagttttcccagggataagctttctaagaatgctcagcaaaatcaatgtttaattttctggtattgatatgtcaaagagtattttttaatagtttataatgttttactaattcatgaataaattttgatactgtatttatctttgtactcttctattggacttggttttgagaaggaaaggaagacttgatcaaaaaactgcagtttcttactttcttatactttccaggattcctagtattaaaattaaaatatgcacttactgcactatgattattagtatagtaaatcatgccgtatacgtatatactgaaaaaagttcaacggtcagaattttttggaagtttaaagaaaattattaatagaataattcggttacaatggtacatcatcttcatttttctaccactttaaatatttgacaaactgaggaatattattagtacattcgaatgataatgtataaataaatgtatatgtgtatgtatgagtgaacataaattaataattaatgaaacctttctgaccaaaataaataaataataataataatgaaaccttggatgttcaatattgtttctttcatacatgacgaaacatttatttatattgacttaccttaatgtaatgttcacgaaatacataaaaatagctgtatgtataatatatcttatattcccaataatacaaacaatagaaaaaggccactgtagaatataataaacaatatctataatctagtgtagacaattataattatatgcaaataagatatattcttataggttgtttaactctatatgtataagaatgtacatactaaataaaataaaatacaccaccatatagatcatcatctgaaaagtttatttctcaaccttttatggttcgattcatgaaaagatcaagatgtagacactagacattggacaatcaggaggaacatataaatatatatttatttatatatatatatatatatttttaataagcctaataattattccaaaaagaaaaaaatagacctataaattagaactatatatgtcactatagtttgaagacgaatttgatttccagtttattattatgtagcgcgcatgtaatataatatcactaagaaaatgcgaaacatcaaatagtttttattttttttattttattatttgtttaattttttttagaaaagtaaaaacattcaaacagattttaaaagtttataaaaaggataaataagtgttttgttgggaactaatttttgtagagttttgcttcaaatattgtgtaaaaaattcccagaattataacaaccttcatgttgcaaatgatatatcttattggttgaattctgt

SEQ ID NO: 194031 - DNA, 1319 bp, Cannabis indica
ccgatggtggggtacgagtggggggtccgattatgtaaatgggggtgatgtaaatggagggtattttaaggatatcataaaagttgtcatatcctacaaatattagttattatttatttaggaaattttttttaaccaaatgtaaccataaaaaaatcaaatttccccatccaaaatcactactgcattgcattagtattcttttaattaactaatcacttcatttttagttttcaagtttcaattgtaccctgagatttagtgggccttggaaaaaattattgagaaatttacacaacacttaaatataatttatttatttatttatttttatatttctatggacttttaatttttatttatctaaatttttacgaatttattttacaggatttcacttggtttttttttttttttacagaaaactattgtttttacgttatttaattgcaacagcaactaaaataatatttttttcccccaaaaaaactaagaacaatctttatagttttgtaaaaaaaagaaaaaaactgtaaaaaacgtaaaaaaaaaagaaagaaaaagcagatccataaaattataaaacatagtaatttttttatatttatgaaataatcacaaaattatttgaccttatttaaaacaaatgctatatttaaaaaattactacaaaaatgtatatgtttgaaagagaaaagaaatgttgggacatctggggtagttgggccgtaggcacagaccgaacccatcttagccttgggctttgggatggcccaatccatctttgcatgaaggagtttctaaaggagaagcctaaagacatcaagcaagtatgtactatattataaaataaatgtcttttattgtttatttatttatttgagataattctcttttttttttttttttgaaaatgaatgccatatacaagtggtgtgggctatattttccaccttagtgtatattaacaccaaaatattattagtttccaaatattgtagggctatatatattgtgtctctcttgttactttcatacaaagctgtaagagaaaatgaaaacacactaacaaacatttcaaaaggcttccaaattatctttggccaaactcttttaaagaatcgctccgttggctgaaagtaaaaagaccgagaagaatttcggttgatgtttttaaatccaaacttgtgcatatttgagaaaaaaaaaatgtatagctctaatttgtaatgtatagatagaatcattaaaaagaaggagtttttataaaaatattggatttgggataaaagtttatataattttactgtcacacggaa

SEQ ID NO: 194032 - DNA, 1177 bp, Cannabis indica
attaaaaaatttcagacatcactacatgtcttattcgctccgatgcattaagaggtaataagaggtagaggagagaaaaaaacaaatagtcttaatgatcataaatctgagcgaattagatccagtgggttaataagtgcaaacaaatgaagcctaactccaagctatagattacattttgaaaataaaagcgttcataataccgaatatataaattacattttgagtatgaaggtaaaatttatgaacagtttatgatttaatatactttttaaatttgttggctctgataccatattaaactaataaaagtatatgataaaaattttggttgtgatagagaaagatcaagattaaaaatgattaatttttacgtaaaaactaattattgacaataaatattgttttaaatagtataatatttctacgtacactattcagtatgagatatctaatattaattagaaataaattaattactacacgtatgtgaatttttcatatattaatagtaaaattaaaaatcattattcatcacgcgcttatataggacataaattaagtataatattagttcggtgcccaattattatggttacaattaatttggatataacttcactaataaatacgattaacggtacgttcgtaagcgacaaattacatatgtttattttcgaaaaatatattaattcatggctactttccaattattatagttgcatttaatttagatataatttcatgactaataaatacgattaaggtacgtacgttcgtatgcgacaaattacatatatttattttgaaaaatatattagttcgttgctacttttcaattattatagttatagttgcatatgatttggatataacttcattaataaacacgattaaatgtatctatatccgataaattacatatgtttattttcgaaaaaaattacaattattttagttgtatgatcattattttgttagctacgtgggtacaagaaaaccctcataaaattaattacttaatatataaaggaattatcataactcatatgaacaaattaacagtgtctttttaaacaatatatatatatatatatttattgtatactatattactttgtaacctaagcacatcaacaatatatagctacagtttggggtggataactaaaagtat

SEQ ID NO: 194033 - DNA, 3146 bp, Cannabis indica
agtaaactcttaaaattttcctaggtaatttttactttatttttattattttagtatataaaagaaaaaagctctaattatttaaggaaggtgtttattacgtaatataagttataacagagagagagagaggaagcataattattcccataaaatattatgcattaattctgatgtattcggagtagttaattaaatgtgggtgctagataaagacattgctaattaaatagtactattattgtgtgtagtgacgtttgctaggcattggcttgtaattccacgacactttcatgttactttatgttggattatttctacaggtttttatatagcaattcgaatcattaatagctcacgttatcaatattgcctacaaaataacatatccaaactctctaatcattaattaacttcaaccttatctgaagcctcttttttttaatggatgtgaagccgtttcattttcatgtatagtgtccaagtaaagataccatgaatatactattgaatgtgaaactaaacatttaatgttataataattaataaaagagagaaatgttatgtacctgttaaacactgttatcattgcaacattttgataaaataagaaatatgaaaaattgctaagtacttgtagggggccacatgtgctcttaaaatgcctaaaaacaatctattaaaaaagtgcttttacataggaacttccaaaaagaataaaaaaggtcaatatattgagtactcattgctccaaatcttccagcaataggggagcttccaatggctcaaaacgtggtgaattatttgtaattttgtcccttcaactaacaaacacagaaaaatactttttgcaataatttgaaagaaacatgttagagtgtcttctattgagaataagtggaaaaataatagcatatataacaaccatgactactcttcttattcctaatttgtttttcacatgaaacccaagatgttagagtgtctcgtataattatgtgtgaaaagataataatatatagtagatccatcgatcattcttctcataattaattttgagaattttgagatagatagaaagtatcttaaacttctaacaaatttaactcattttaactacttatatttgtacaacagtatcagtttatacatatttatatatttaatataaaaagaaagtcaatgctaagccgtagctgcaccaccatggatatatttacattcattttcaaatggtttatccaaagaccaactggtgttttatatcagtagttgacctggtgttaggccatatatgatatatttctctatctaataatgatttttaagctaaaattaatctataaaagcactgactctgcgccttactattcttcaaagaaaatatattttttcactaggttgtattataagttcttcgctagctagcaagctccagtcacgctctttccctggtacgtataataaaaacatatcttcatgaatatcatcttgttttgagttttcatatactctttgtttgtacgtaccagattattattttgtatggttataatattgatcagtactaattgtgtacgtgggtgtgaaggtgcatagtgcattaatcatgagcggaagagttggtgatgaattccagatgaaggaaattggaggtgacatatcgagtgcgccatcttcacggcgccaccattcggggaggtttccatacattcacaagctgggaaaacctccaaagcaaaacctgttgaaggaaatctccactgctgtcaaggagaccttcttttcagatgatcctttccgctcattcaaagatcaacccaagtccaaaaagtttatgctcggtgtccaagctgttttccctatctttgattgggctagggactatagccttgccaaatttaaaggagatctcattgctggcctcaccatagccagcctgtgtattcctcaggcatgtctactttagaactactacttcttcaagagctattttagtattttgaatactacatttggtttcaatttgagatctatgcatgtggtgcgttctcttcttctaactctcttttgtatatgaaaatcttgtgtaataggatattggctatgcaaagcttgcttatctgcctcctcaaaatggattatgtgagttttattattttctcatgactagaaagaagagctttgctcattggttttccatataattaactatatatatgtgcatatgaatatgcagatagtagctttgttccacctcttgtctatgcttttatggggagctctagagacatagccatagggccagtggctgtggtgtctctgttgcttggtgatcttctgcaggctgagattgatccgagtgatctcattccctatcgacgtctcgctttcacagcaacattcttcgccggactcactcaattggcactaggttttttcaggtcaacatatagtttctaacatattcatcattaattaataaacaaagtattctttttttttcttttgtctatctaattgactgaaattactggatcctactgtttcagattggggttcttgattgagtttctatcccatgctgccattgttgggttcatgggaggagctgccattacaattgcccttcagcagctcaaaggattgcttggcataaaaaagaatttcacaaagaaaacagatattgtctctgttttgcgctcagtgtttaactccgcccatcatggggtaaacataaaaatattaattttatccttcattttttattataaaagctcttagacatgaataaaaaattcaactaattggtcatttttttacagtggaattggcagactatagtaataggggtcactttcttggcttttcttctagtcgctaaacatatagtaagaacaatccaatacttctcttcaactttagtttaacacatatgttggacattcagttttatatgaattaattattctctactttgtttggtttggatgaacagggtaaaagaaacaagaagtacttttgggtgccggcagttgctcctatggtgtctgttgtggtgtccactttttgtgtttacataactcgtgcggataaagatggtgttcaaatagtaagtatgacagtaggatatatatatatatata

SEQ ID NO: 194034 - DNA, 4501 bp, Cannabis indica
ggtatatacttatatagtgcatatacgaaattatacaacaaaatctctggggctcaactccctttcaaaaaattaaaaatctccaagcttagttgatttttcctttttaatgtgtatgtgtgatagttatatgattttaaactatttccaaatggttacattaattaggtatgtaatctacaccaatttagtacaaaatcttttatttttagtgcaacaattccaataatttatactaaatatcaaaccaaatatttcatgaaataaatatttaaaaattttcacattttatattaatgacaaaaaataattaatttataatataattatatcatgcctaataacacgagaaataaaaaaccaccttttttttaatgatcaatatcagatatgccaaatttcggccttcttgaataaagaaagattttttatgtaacaaatggtaggaattacttgtagagttataaggaggggagttgaattttagaaataattaatttggtgaatctcagctcaattgatgttaagtgatgcatttttccatttataggcaaaaggtactaaggccattacatacaagaggttaaaaaaggtttaaaaaaaaaggaatattcaatacacaatgataaaatcatcatttcattctaactacttaatttatctcaaatttagcattattgacacaataatgaggagatgacacctattgagtgcttggaccactgaaatcatagaatttttacaagttgatttagattcattttttcacatcccctctcaaacgcagaagtgaactactccaaatttgtcaatcaagaaattgatcttgaagtagacaatttttttgtcaaacaatctgctacttgatctgaagagagaatgtatctaatgtcaagttgtttgttgaacactttatcatggatgaaatgaacatcaacttcaatatgttttgtcagtgcatggaaaaatggatttgaagttaaggcactactcctatattgtcacaccatgtgattgttgcaggtgttggaaagttaatctctttcagaagtgattcgatccaagagatttcagctgctacatgtgataaaactcggtactctgactcagtacttgatctagcaaccacaacttacttctttgaagaccaaaacaccaatatattaccaaagtacaaataataacccgccacaaacttttatcatcaggaaatatgcccaacccacacacgaatatcctctaagatttaatggctaatcacaacttatgtgtaaacccttgttcatagtttccttgagatatcttggcaccctccttgcaccactccaatgagttattgttggagctttcaagaactgactaagcttgttgacaatataagaaatgtctagtcttgtatggcataagtattgcaggcctccaattatacttttgtaagctgttagatttggcaataattccccattagttatggacatatgcttctctgtagtagctggtgtggggcaaggtttcagattggtgaagttagttcttctttgcaaatcttcaatgtactttatttgagttcgatagagacctgttgcatctctgataacctctatgcctaaaaaataatgaaattgactgagatccttcaggatattactaccatgtttgtaaaagaacagagaagtatcaaactttgaattcttaaaattccaactgatcaatgtgtttttcagtttatcaaactaagcccttgaaacttgtttcagtccatataaggagttgtttagtttgcatacaaagttttcttaccgtttctcttaaaagtctcatagttgtgacatgtaaacattctcctccaaggtttcatttaagaaggtattattaatgtcccactgtccaatttcccagccatgagtgacaacaattgttaaaataattctaactgttgaagcttttataatagggctaaatgtctcaccaaatcaatgtcaggcctttggtgaaaacctttggcaaccaagcaagttttgtatttttgaaaggatccatctgagttaaatttgtgtttgaaaacccacttattgccaattagattcgggtctggtgttggtggaactagatcccagattttttttttaagggcagtgtttcatcttacatagccttattccaactaggatgagcaagagccctttaacactgcaaggctcatctaaaatacggttccaaagcaggtcccatgaaaactcaaggcttgaaaatgtctactttagctcgagtagtcatggggtgaccagtggcagtaggaggtgcttgaggagattggaaaccaaaaccaagattagcatgaggaatcatggcttccatgatgtcaacaatatcatattctgatagttgggacaatgggttagttgagccaactgagtcatttcccctttcactacctaaatttgagagaccagatagagcaataggtgagtgacaaaaaaatgttagggtagaagaattagtttgagagtgtgatggtgtggagggtgcttttctaggcatgcttaaggatgaggaagaaagagtagtagaaagagtccctgtggggagattaaaagatggtaaacagattaggtcgaactttgaacggcaactaatttttttgattgaaaattgttaagaaaacaaagtttacaagtaactcaagttcattaaaaacaatatttctagagatgtaattttttctagtaggtattagacatttataaccttatgagactctctatagcccaaattaatacatttaagtgagtgaattggaacttgtgtgcatggtatgatctaatgcaagtgaagcaggcaacacaaaaagtttttaggaaggcataatctggtttcttgctatataaggcttcaaaaggtgacttatgatcaagaacaagtgtaggaagcttgttgatcatgtacacagtggtttggaatgcttcccactagtatttgagtggcatatgtggttgggctaaaagtgtatctctataatgtgtctgtacgtattttctctcaactatgccattttaagcttggtgtgagggcatgaataatgaaagttaactccattggcaatgaccacgtcttgtaaagctagatattcccctcctcaatctgtcttcaggcctttgattttttttcttaaattgtgtctcagcaaacactttatattgcaaaaccttcgcttctgccttggtttttaatggataaacacaagtgaataaagtacaataatcaacaaaatgtatgtgaaatttaaatctattaatagacataattggtgacgatctccacagatcactatgcataagatctagaatatttttagttttgttgttggaatttttaaaggaaagtgcatgtaatttaccaaactaacaatcatcacaaaaatggttcattttatttttgaaaattttaacttaagaagaaataaaaacttgaactcaagactttgggtaatggatgaccaagtctctactgccactaatttacattagacttggacttgactacaatactagaaaaaacttgactcttgattctattagactcgattgaacttgggaaatgaaaaatagactttgatggtcgtgtttggagctgacagagaccatcgttaagcataccttgaagaaaaacttttattgttagctagtccttcccaacacaacaatgagaatgaaattctataagcacattgttatcatgagtgagttttcacacactttgtaaattcttgacaatttctggtactaacaacatttattttaacagtaatggttggccattattagttaataaaactccattaccaagatgagagatagtgggttgtgtaccattaccaataataactttctccttaccactatagtctagtcttgcttctgagtcattgtgacaaagtctgaggatatatggttgttggctccactgtcagcaaaccatgcttcactctccaagatttttgatgtagcaacaaaggttaaaggattgttgctctttgtctgtgcaatgttgttgggatcagatctcatacagtgctcatcaaatcgattgtaacatactataattgagtggccatatttgccacacacacttggaaggtgggtttaattaggaccaccaaatctaccattaaacctgcccttgcctggagatcttcctcctctattagaactcctaccaccatggttctgagaatagtgattggaacctctgccttggcctccaaattgaggtttttgagcaaagttggcttgaggctcaaagagagtgttggggagtttgttgtttggtgacaaggcttgtagtctttctatcttactatcaaagatgagtagcaactcttaaagttcttgccaggtattttttggtcgagcatcaatctataacacaatagttagatggttaacatcaagaccaaagagaacatttgtgaccaactgagattcagggtatggttctccag

SEQ ID NO: 194035 - DNA, 2750 bp, Cannabis indica
aatttaatgatctgaaccaattagagattgtcgcgtggcaattttacttaacatgcaatgaccaagtatcagcagaaattttaaattatattattaccgttaaaaattaaacttaagtatttatactacaaattattcattaaaaaagaatttttttagtgacacttgaaagtttttagtcaggcaataagagcatctccaaataagtaatatacagttaaaatatagttcactttaacaaaaaaaaaatatgttccaatggccttttttattttgatactaaactaaattatttttatatgttagaatttaagtaagaaaattaagtgtatacttgacatcataattaaataactgtttttttgtttaaaaaacagaaaattattttgtgaaaacaattaggcttatttagctatttttttttttaaatagttttcagaaaataaagtttattttctgttttaaaccaaacgtgatttgtattttaaaaacttcaaaaattatttttttgttctcatttataaaagtaattttttgaaaacaaaaaaacaaaatacaatatcaaacatgctttacatttttatttggttgctaaaaaaaaaccaaaatagacaattcaagattgttactttcgcatgaaatgcaaagcattactattgaaacgtacttagattttacattggtaagaaaagcttggacttcaattattttattgaagagttacaaaactttggcaaataaaaaaataaccacaagctttcaagcttcataggcactgcaatggcagccattgccattacaaatctcatctacacttcaagagagaaaaaaacatcaaaggggcttcttctctttcatatcctcagaaagatagttaaaaaaaaatgaaacatcaataaagttgaagaaaacttttcatcctgagatacagatatatggatgtagccgttaggggcctcagagaaccaaaaaaatgagtgtgcatggtcatcttgttcttaaaggttttttcagaagctgtttgcatgtacttctttctcagctgggtttgacttttcaatggtgctgacatggaaactaagaccaatttagctgagaagtgaggttgatgaagatcttttctgggcaaggaatggtgagaccacccattgggtggttgtatccaaactcctcttctgccatagccaacaattcttgaaatgcaggctcttttagaaatgatacaggtaccaaaaacctcttcttttgctcttctccaacatacactgccatatacccttttgggatattagttgatttgttgttgtttttcttggtttgcataatggaacctaatttaatagccatttgagtatatgtagagtgaggaagtggttgaaagttcactagtgatttaagagagaagagaaaagttgaggtttttttttggtttggatgattgtatgtttgtgtatttatagaaggagaaagtaaaggggggtgagaagtgaaatacaccaaaatatggaacaagtagggtaatacagaggaaatttggtggcttaaaatgaatagaagaagcataaacttgtatgcatcacatggtattgtcttacaagttttggtaataacttggtattaattgaggctttgtatgtgttgtccatgtcttcaaaatctacatggatccaaacgcattataaaagtaagtttataatagaagtctctggttcattttaagtggctgaaataattagatatttaatgatatattgttcatttgaatttactactactactactactactgatacaattattgagtaactaacataatcacactctttgatgaatttggacaagtattgaacacaactctatataaaagaagaacatgaaaactcaaaaacataaaagccagcaaagcattgaaaatgtcatcacaaagaaagttaaggcaaatgaaaaatagagttaaatgacatgttctgtgcatattgttacaccatatgtttgtagtagtgcactagactatttctaggacagacccttctgatgagcacgtgaagtgtgtcctactaatattatgagtggtcccaaatgaattcagtccatttggagctatttctttatttactttatatgtctgaaaactgtaatagataactcagattgtcaagcttggtaaggcagtttcatgttaaaatgagagaaacataggagtcaatacatttatccattttgaaaagcttttgcttctctctagttgagtcttaaggaaaaattacttgtataatactaaaagaattttcttctagaaatgttacaagactagactcagcaatttgtcaaagttattcttccaagtgtatcaaagaagtaaaatttgtatctgttagtgaaattagtggctgactccctcaaaaagctggcttttaggagattagaataatgtaatgtggtatcaaagcacacaagctcctagctcatagtcatagtaattactttaatacatgatcaccatagaataatgatacttaaatattttctttttctttcagaaaaatgaaacaagtatacatggggtttgccaagctagaaaaaaaatgtcatttagtctttaaagtggaaaaaaataaagtaaatctattcacaaaagttatttaactactaatacatgtgtgtatgtgtgtgtgtgacaacataaaacaatatgttttctcatcaatgcctccctcccagtcctaatggagtgacaaaaatttcttacc

SEQ ID NO: 194036 - DNA, 2449 bp, Cannabis indica
tctctctctctctctcttttctaatgatgattctgtattttaacaaattttaaagtcgctcctggtaaaaaaatactgtagcatttggggctattcattttaccaaaaagaaaaataggggttgattaatatttgaaacacacattgtaggtcattggcttgcatggaggggcattacttggtgttgcataccgaacatctcgaagaatcagccctgttgctgctacagctatttcaacaattcaatctatgcctttgtctggatttggaagcagtggtctttcttcttttgccactctcgatgatggatttaattctaatagttccccaaatgaggctgcagcacctaactttcagctatacaggtattttatgaatgtctttatacgtacctagttttcggtaatttgtttagggtgtgagttacttcattcatctttatatttatgtttatagctcattttacattgcgcttcagaaatcaggtagcaataagctaaatgtactgcatgagatcaaactattgagatgccattgtttatgcaagttggtaataagatgtaaattgacactctcaaaaattaattttgggtttattatgcagttgggaaacttctgaacctgttggaggacttcttcctcgaccagagtggacagcatgggatcaaactgtggagtattgtgcttttgcctatccacaatacattgtcatatcttcattgcggccacaatatagatacctgggtgatgttgcgattccctttgccactggtggagtttggcatcgcagacagctttttgttgctacacctacaaccattgagtaagcagtgctttatctatgtagcatctggagcactcatacgctcacaatataacctaaaacgattaaattctgtagttttattgatttttatgtacaaataaataatcacaaagaaagttgactaggctggaaaataattacaattttacaagctatattgtgaacatattaaattttcgaacttattattttaactaattttatttagacaagtagatttgactcacctagcttactgattttaaacctcaattcattcataagtggtacgatactagatagatgaattaaagttctagcaataattgcctcttgctaattttgcagatgtgtttttgtggatgcgggagttgccgctattgatattgaaacaaaaaagatgaaagaggagatgaaacaacgagaggcacaagcaagagctgttgctgagcatggtgaattagctcttatcacagtggatggtccccaaaatgctactcaagaaagaatagcattaagacccccaatgctacaggtatatattatttctttctcatgggttccatgttaacctttcatttggatgggaaactgaaattctttctcgttagcctgcatagacttgtaatcttcttttagttcataactcaatcagtaaatagtcaatagacttgctttatttctcgaaacatattttttaggtctgcatgcacgtttcttctcatttcaaagtgtacatttatttccactttagtttgtgtatatgacatgtttctttcttttcaagagaaacctaggtatagaagtctagaactgagttatagcaatattaataaatgttgccagcttttcattttctattagtatttattgtcttaataagtctttcttttggttatttgaatcttcctttccaggtggtccgcttggcttcatttcagcatgctccttccgtgccaccttttctgtcgttgccaaaacactctagagttgatggggatgattcagcatttcaaaaagagatggaagagagaaaggtcaacgagatagctgttggtggtggaggagtgtctgtggcagttactcgtttccccacagagcagaaacgacctgtgggtcctttggttgtggtgggtgttagagatggtgttctttggctaatagacaggtaagttgattccctacatttatttttagactcttcttttgcctggaaaacatgaaaggaattaagtcttttttttctttctttttttttttttattttttttttttgtcatgacaggtacatgtgtgcacatgcattatctctaagtcaccctggtattcgctgccgatgtctagctgcttatggagatgctgttagtgccgtaaagtggtataatatttgtcttgagattctttgacggatattctgcgaatcctctacacagatttaatgttggctgttttatatattatttcttttgtacagggcaagtagacttgggagagaacatcacgatgacttagctcaatttatgttgggcatgggttatgctactgaagcacttcatttgcctgggatatctaagaggtacatgtgcattactgtagctcttgttcttttgatgttcaatcttcattgcattctagatggatttg

SEQ ID NO: 194037 - DNA, 1509 bp, Cannabis indica
tacaagtggtgatgcttaccctgtacctgacaaatcagctccagtttacataacagtcggtgatggaggaaatcaagaaggtcttgctgataggtaaaagccatttttcttatgaatatgtatattatttattgtgttttggcaattcatggggtggaattaaattcaatgagtgttgaaagtatctccaactgctgcagtccacataagaaattaagatccttaattaaccatgttttgtgattctgaggaaaatgtagattccttgatccacaaccagagtattctgcattccgtgaagcgagttatgggcattcaacattggaaattatgaaccggacacatgcactttaccattggaaccgcaatgacgatgggaagaagttggccaccgatgcctttgtactgcgcaaccagtactggtgagtagatctctaaaccaaaaataacattcagaaaacttgtcaaacatacaactttaactaaaagatgatcacttttatcacactcttagtagttgaagttcagaaactaagttggtccatctatgaggtttcttaaacatgatgttattgtggagccagttacctactttgttggtcaattttcttctttttgacaattctgtggcagttggaaaatgtaggcgataattttgttcttaatggatgctgaactaactctgattttggtcacgatttagggctaacaatcaaaggaggagaaagttgaagaagcattacctgaggagtgtagttggagggactgccatttagtggagaagaaacaaacaaacaaaattatgcgattcatgtaaaatgaatggttattttgattgaacataatttgcatggttcaataaaaaaagaaaggaatggaaacgccattgggttgaccagttctacttgttaagctctacagtcatctttggttaataagctatgtttctattgtattagaagtatatgccattgcaagcctctctatttgtaaatgccttgaaggaaaaccacttttttttttaagtaggcataataagggatctgtaaaagatgtgttgtcttttatgaaccattattacttgcagaagtactctttggaaactgagaacatgtatttatatatatatatatatatgtatatatatatgtgtatgtgtgtgtgtgtttaaaagaagaccgaaaagttgtctttcctctagtgaaactaagaaggccagtcaacagaaggttgatgggtcctaaatcaagatgcactagccaaaagaaaactttgttcattttgagcaatgttagatattaggattgagtaaaatgaagttactcaaactgagatgataagaaatgaatgaatatatgcatgccacatatgaagagaggagatattatataataatagaataacttaaagtgaaagattactctttaaatttaaattatttatttattttcttttatggaaaaattttaggataaaacaaatccgatagatacaaaaaaaaaaaacggt

SEQ ID NO: 194038 - DNA, 774 bp, Cannabis indica
atatatatatatatatgatatagttattttacaaaacaatcataacaaaacaaaatcaataattcaactttgatgttttttttaattagtatttgaacttataattttacattgacaaatgagataaagtaattgatatgtataatttatttgatcaattgttccccataaaactcaatttaattattaaaatactagtacaatatgatccattcacccccaaaatatcacattgtatttcgacattcctctgtttttcctcttttttgggcagaaaagaacttatatcataatattagacaagatgtaacatgtcacagagaaaaagtaaataataaaaataaaagtaaaataaaatgtaacatgatcacacaacactttaaaaagctgctcaaaaaaatatctatgttcattgttaattattaagttgctacttttatgaagcacaccttataacattgaaaaattccatgatagcaaaagaagattagaaatttaaactttggaaaaagctattacgtgtcctgtcaaactattataatggcactaagtaaccagcccgataatttatggtgaaggtaaaatatagaaacactgttctatattccaatttcaattccatatttccaccaactttaaagttcaaactttacagagaataatttcttttgtgatttgtctcaaaaactaaagataatataccaactttaattaaggcaaatgtttaaatttgttaaatgattaactaacgagaaatactattttttttttgaa

SEQ ID NO: 194039 - DNA, 2393 bp, Cannabis indica
attccggaatgaggctagcattcctgaagattggacccagagtggatatgatggtcatctggggaacactcttccagactcgactatcattctacaagactctttctgggactggcttctatgagtaaacaactttccaaaaatgatatttgcgaagagcttttcatttagaggaactataccatagtttatttgtttgtttttctttttctttttttttttttttataaggtacaggtagagaagctgcattagctattaacaacagtgacagtttaaccggtaattgcacttgaatgcattgtgtttggcttgtctattactattactgcagtaatgacctgtaaaacgtcacagtaaaaaaaactacttcataatagtaattatgtttttacttttcagacgagtgctaattccaatgtgtgtgaggaataaatattaataaattacagcagtttgtcacatcaaggcttagaatattgtcaactgcatacttaatacgacatgtacaatttaatttaattttggatgttatatatttaaattaagagaagtgttaaaaggcattagtggtgcttattagtagccttttatgtgtcaatattgttattggtccaattaagtattgggtcccatatagtttaatataataatttttaagaagtatcgctagctaatcacaaagcgacatatctagaacttctaagcaacattggtgcctattagcaatgctcttaaattaaaattgtaaaatttgacattccctattaaaatggttcgatatgtcatgttatataagtattggtagaatactcgaaagtttaggagtttttagctctattatctctaaattaggcatggctacgcaaactagtgtttgatttttttacttctttttagtagttaggtgcttaaatttactaaataatagcatgatttgtttagaattagtcgtggtgttggatttttcttttccagtaattaggtcgttaaatttactaaattatagcatggtttgtttaggtggtattttaggaagagcatcttggtaaaaaaaccaagttagcttaaatgttaaggacatccatggaactgggttgtctctccacctaaggtccttggagctcccttcctccgtatttctaatcagtactaaaaaatataatatgtggaaagccagctgtttattgaaatacctatattatactaaagctcttacatgaattgttgtaaaaagaatctaaggagcatcattagttcatttggctgtaaggtctttctccaccgttccttctcaatcacaagtcattgctttccaacaattgctgttttgattgaaacctttctagccagaagattacagaaaatccaatcatggccggttatctaataacattattaaataatggccatatattagtcaatgtcataaatagttaatagttatatttagttgttccaactagaagagatcatgagtgagacaaaagttgaacaatgcatgtttgtcttcaaaagactttattaaattcccgcattgttaaggtacagacatatattaccatatataaaatgcagaactactacttttattgttaattaattttgagataaaaactcatacatcttaacttacaccttaccaaattctaaaagacctactatggattgcttactataattttgctctcttaagagtgtttacaactattgtttttctttttgaaatcgtgtacaactatttaaggagtattaaatgtcaataatgcattcatatctggatgtcacataatgaagattggaaatattggttttgcgcacaaaaaatattatataattttttttcttttttggtggggcagagaatgttgaagtgtcttgtaatttgcaaatgttgtggccgcataatgtggatatatattatatagacagaagcaactcttgtggacctaatgggccttgggtcaattatacacgctggacaataataagaccaactcagatacaacaggcaaaaagaaaataaagtaggaagaaggggatgataaaatacaagataatgaaaagcaactccatgtaccaaacccaaagttgaaataataaaatatattaaatcttctaaaatgtatataaagttgatgccactactgctccagttattttcacctattgctcagtgttacagagagtataaacaaaacatatttaacctccaagacactctatatactcactaaaagactgactacataatttatcagtctctgttctaaagattcagaaattcttgcctttctttctgtggttaagattagaaactgtaaaaccattcttaaatatctatatataccaagtatcatatttcttctttactagatccatcgctccaaccg

SEQ ID NO: 194040 - DNA, 970 bp, Cannabis indica
aatacttacacgaattcgtaattacataacgaagacgccgggtcgggtatttgaatatatgggaaggctgcgaataaaatccggttacccgaggaaaaaaaagagagagacaacaaaacccggtaacgaaagagggtccggctgttgagagtactgtatatgtaaactcccctcagttaaggcccctcatatcatcgaccatggcaaatacagaagaagaagaagccaaactcgactgtttccgtcagtggttacaggtagtattttctttactttcgccttcttaacaagtgcattgttcactccttttgatgtacttgtacttgtctaaatgtaatgtttattcaggttaatggagttgaacttcgtggctgcaagatcaagggttgtgattccaacaaaggcttcggtattttcttggccaatgatgtttctgacggtgagcacactttcttggtttgtgtttcaattagtgggtgtttgttgattttgctaaattctatatgtattcaccctataaatatatataattatatctattacttatatgtatagattatagctaatatgaattaaggaaatgccagaatttttcttttatattttgtcattggatagtttcttttttccctgttctgtttagagtctcataattcactcttcactgataaaacattcaaaattgttatttgttaaaaacaaaacaggggttctgttagttgttcctctggctttagctattactcctatgagagtattgcaagatcctcttattggatcagaatgtagagagatgtttgcagaaggggaagtggatgataggttcttgatgattttgtttctaacagtagagcgcctacgtaaaaattcttcatggaaaccgtatgtttagcattaaatttgttaaatttctgtgacttatttactctagttggtcaaatttgatgttttagtgaaatatcaggtactt

SEQ ID NO: 194041 - DNA, 1328 bp, Cannabis indica
agagagagagagatagaggatgtagttgggtttggtagtattatatatatatatatatatattattcagaagcaacctcatcctctacctgccctctcttcatcatattacacaattcacttacaataataataataataataataatggatatcctcaatgaaattatacaaccaacaaattaaacacaactctatcacaaaataatataatatataaggattacataataatgatacttcgaaacataaattacacaaaaaaatagagtatataaaaatgaaaagaagaagaaattatatatacaaacacaaaattacaaatagatcaaataaaatgtatataaacacaaggataataaaagtgagaacaatttcaacaccacaacaaaggaatcatcaaattcaaataatgttttacacatttggttaaaaaaatatttgtccttatcagaaacacttaaagaaagaagatagaaataactttagtgatttatcaattgcctaatgagtgtttctaaccaagtgtgctatttatagcatttaggttataaccacaatttcataacttaaacttataacgtggcatggttgttaccaaatacttatgaaaattgaatagcaaattacgttaccttacatgcaatcactagacctgattatttgtcatactctggaaacaaacacaattaatatatatttagacactcctcaaactcaacatttgagggctaacatttatgaaatagtgtggttacccctaacccaaaatagttgttttgtatattgtattgtgacactaagacaacccaacaaatttacttgttaatttcatttttcatgagagaatcaagtacattgaaatttattgtcacttagttaggaaaaaacttcaagctgggctaatccgacatgtacatgtttctactcaacaccagccagcttgttgatatttccactaagccgcttcttcctactcattctcatcaacttaaggatatgagggcttattaaattaatttatgctttataaggggaagtattaaataatgttgattagttaattaaatatagaaagagttagctagttagtgttagttgtggttagtcggctgagagtataaatgctttattttgtactctttctttaattgatgattgatgtacagtgttcattcatcacatttttaagctctcaaacctaaaatatatgttgttatatgaatgtatcatatcagccatttcatttgttcttttaaaaaatgatttaaagtggtgaaaattcaaattttaataattgttgattgcacaattattattattattatt

SEQ ID NO: 194042 - DNA, 971 bp, Cannabis indica
agtttctttactagtaaattattttttattttattaatttgaaattattttaaatttgattatttacttttagactttaataatcttattttttgttttttttttttttgctaaaacataaaaaaaattacattattttctattttacaaaggctaattaaaaataaaagatttgttttcttctttgtctcgtaattaaaaagaaaagtataaattaaattgataactttttgactttttttaggcagaaaattagttatatttttgaatttgcagaaatactattgacttgactcaagttaatacaaaattagataggtgatttgaaacattcttaattatctttattaattgttacaaaatttaatgacattcatttattttatttttgggaaatattttatttattttaaaatctattgaataatttttatattcaaagcttttcttaaaaaaagtaataattattttttgaattattaatattagtcaaactcttttttgttttcttaaaacaataatttattactattattattattattttgcacattttttaaaagaaaaaagagcggaaacaaattaatgaagagttaagaattatatatatcataattcgccccatcttttagtcaaaatgagttagggtatcatacatgtatataatgctttttttgataaagaatatataatgctttttatcaaagtagattaattagagcaaaagctggcactatatttatttataataagagtatttcttctataaattttaattacatatatactatacaccaaactaaaagaataaaatgagaattttcttatatatatatatatattatatataacacaaaagtaccatttattagttaaaggaattaattaatagggtgaagttattactgagctttttcttgttaatcatatttttttttcaactggtcacgatatattatatatatatatat

SEQ ID NO: 194043 - DNA, 2933 bp, Cannabis indica
ttttttgaaaaatccatgtgcttggtaagtattacattcttgattaatttcaattttgtactttaaaagaacatataatcataaaatgtaaatttttagcaattgaattggtatatgtatgttaaatttgaaatgtggaaagttgttaagaaaattttagaacttgcttgcttgttatttgaggtgaaataataaatgatgcatgattaggaaagtaatttatgcattctttagatctattgtgccttttaagccatccttgtgatttttatcttcgttacccttttcgagctttatcttgattctttgtttctacacattttgagcctaaacaagataaacccattattatttaaatttgaccataattataccataagtggatctttagtttgtgaaaattttaatggaaagttttatatatgtgtgtgtggaaataagagtgaaattgagagaatgtgaaaaaaattgattggcaacaacttgaaaaagaaaaatttgaaaataagtgtcaaattcgaagaaaaaaatttgaaaaaaaaaaagaaataaaaataaagttgttgcaatattgttgaaaataatttctctcatgtaattagaaagaaaaagagataccaggaacatttgtgaaagttatgggtgaattgattggagaagcttatggtataggcaaacctaaatgaccgttccatctacctgtacctaagtttatccttacaagactagaaagatcttttgattctgaattatgcatctatttacattagtggagaatagtgagtattgcaagcttatagaatatatttggttagtggattgaaggtggtatctggcatgcataaattatatcaaatgttagttaagtgttgattatggttttatgaactgaatgcaagattgaagtaagtcaagagtgtgattgaactgaaattttggattaatatataggtaaaaaatttcgtacaaaaccatgtatttggcttacttgaaaattactcatattttggttgattggcttatttcatttaggttgtgttgtttttagttgttagtcttactcgagggcgagtaaggatttagtttgggggaatttgttaggctatttttagcttattatttatgtcatttttagagttaattttcttcttcattgtcactttttgaaatagaattacgcttgttttatttaattttaggtttagacacttagaatgtataaatttgtcaaatttcaaaaaaatatgatctataaaatagaaaaaaaattacaagaaaaaaagctgaaacttcaaacctaaatcagactatgctttgtttagattttggagaaaatcaaaacataaaagttctagatctctctttcagctttccaaaacatcttgaatcgttcaattctgagcaatattgaaagaattatggccaaaacattatcaataagcttgctgcccaaatttaggggtgttatgcctaggcactgaaatcttatgcctaggctcgtgtctttaaaatatcaaagaaatagtcatctctgagctacctaccaccatctgagcccctggcatgtccttcaccggagcacccttgacaaccacccctgatcttagccatttcgaatcaatcgagtgacttttgcttctcggagccgctttcataccaagaccataaggttttacagtaagatgttttggtacttcaaaattcttttcacaaaaatgctcaaaatgacctagaataccacaaataaagaagaaggtaggttagtcttcatatttgatcaactgagcaatgcaacaaagtccaccttttttctagcttcatcttccttttcaagggcaaatacacctgtaatgacatacgaattctgagataatcacgccagactcctgtaaaatttttgggatcagattcaacaaatccaccaatttaatttcctatgtctcgaaccacccttgccgacataaaacccatagtcataccatgcaattgaacccagaaatgcagcttctataacaccaccatacgcgggttctctccttctttaagtcgttcaaagattagagggactcgatcgaatgtccatgggctgccttccactacctgtttgatgtcaagttcgtgataaaactaaaaaagatatctatttggatcaagttccttaacatacaagcctctttccagtctccacagtgatgccatcttatgtcacattgcatcaaaatcaagtgagcgatctgtgaggaaacgcccaaccaagcaccaattatgatcaatctccgataggttatcgaacccttgaccatatcttatgactccatcatcatcgtcttctataaccttatgctcatatactggtcttctaaactagattcattagtccatgttgtagccatagtatagagtgagaacagatcgaaaagcacaaaaagaaaccaaacgaaacgcatatcactgataaaatcatagagatgacaccaccaccatgttaaaagacaagacttccatatatgaaggttcttaatagctattttataggtggtgtttagtttaggagaatgtaattgtaatagtaataggaatagtaatggaatgtaatggtaatagtaataggaatactattactatgtttggtttattttataatgaacattgtaatcaaaattgaattgacaaaaatacccttgctttatttattatttataaagaaagagaaaaggtaaaattgtctttttattatttaatagtgattgtaatgctcattcatgtcgtgtaggagtgtaatgagtattcacggaattggtgtaatacccattacaatggaattctattataaaggttaaaaacacaaaccaaacattgtaatggtaacttttattccattacaatcttcattccaataaaccaaacatactaggtcaactctaataataaaa

SEQ ID NO: 194044 - DNA, 966 bp, Cannabis indica
agagagagagagagccaatgcaagcttttgtaggaaaagattactccattttttcaccagaaggtgggggaagaatcaaaagccagagaatatgtttgtataagaaccataaaccttgacaataaaacaaaatgagctaaaagctttataaaactatgagagacttcattccactgaaatgcaagagttgttttgaaaaataatcattataaaaaatttattagcaaaataccacgctaagcgaccaaaaaaatcactatgcgatcataaaagaaccaatatggtcattttgcaacgatagattaatggttgctagtttaacattttcatgtttccaaattgcaatatattatcattatcactcacaattgcaatatagaaaatgggaaaacacccaaattccatttgaaacaaacattcaccataaaagtacaacaaagctaaaaaaatgtcttcaagatgccattcccataacatttctacaaagttatcctgttagagttcgcttggtatgccatattaacccgtcttgtattgaattgaatagtatgttaaattttgatttgtatcaaaatattgtatatttatacacacataagtcaataccaaatgatggagaagaagtgttcattcaagcataaactacaaaagataactacaatgaagaattcacttacattcttgaaaacaatctccatcagcatcacacccttttttgcagaacactcgccctatcataagccattcagtcttacaatatcaaaattacaaaaacaaaaacaaaaataagtaaatatgcttaaaatgaacaattattatgtattcaaattgccaaaatctgatcaaaatctaaacatgtatcattatagtaattgttataactttcagggaaattcccctatttcaatttcaacagttgaataaccaattattcataatcgatcagatcgttgatgcaaaaaatat

SEQ ID NO: 194045 - DNA, 1372 bp, Cannabis indica
acacaattttctcataataaaatattgttattgatctagaaaaaataaaataaatattattatggaaaaataacacgtgtttcaattgacaacatgcatgatagataatgatctttggaattaaagatcacgaggggctaatatttcaggaaatcagatagggaaaagtaagtttatttgtcaccaatattgactacttctccttctcttcttctatatgataattatggatattaattttatcttgtcatggtgaggagaaaaatatataaaaaataatgttccttttataattgctgcaaatatatatatatatatataaatatttaattttgtctttttttatgtttttatatttttaaaaatcatattgcatttactgcaaaataaataattgtataatatagataaaaataaaatgaaattcagagagagagagaaagacatagagttaatttctttttactaaaagaaagaactaaccctaacaacttgtttgcatgtatttgtttctttctatccaattgtacgtgagtaaacttctttatgatgtgtatatatagctttcttattaattgtcttatacgtggacattcctctctatctctagataaaagtaacatataagaaataattttgtttgttttatatgtactaccccaggtgatctgattgtttatcccaatctaatttatgaaataataaattattatcgtatatcaaatttgagctagtagtgtccaaatcgttacaagtgaaaaataataataatataataacatcattagcgcacacacaatttttttatacacatatattttatatacgcatatgcaaaatcaataattaactaagattatgttatattgtcaccttcaatggcctgtatcataagaaaaaaatagctttttaatgaattacactttgttgccacaatcaatggactcaagtggggcaaagaccccgtcaatagatacaatgtgctaccccacccaattacattaattataatttaaaattaacagttcacacacgatcaaacaagactcattcattaataaatttatatatatatatatatatattatttttgctcgctctttcacattgttctttagtctttacctaaatacattatacatacatacatataatatacatatatatatgcatataatatcatcccctcccatgattacaagatgttatactaatggaacgggatcaatttactagagagaataaataaggtctatatataaattataaatatattcaaatttaatgttccctgaataataataataataataataataataataataaataataataataataataataataataataataataataataa

SEQ ID NO: 194046 - DNA, 1551 bp, Cannabis indica
tatacatatatttaattacgattaatgctaaaaggcatcgatcagaagtagcaccctattaatttgtgctatataccgctagactgttaatatataaatataaataacatttatatatacatatatttaattacgattctgtattttacataatattatgtgtaatttagaatgattaatgcctcaaaaataacattcaattggtagtatcacaggtcatataaaaaaaataaaattgctctccttaaattgctgcctcttcccatcaattaattctggacatgtcatctataactattttacatattaatttagtttagagtttgttaaagaatttattatatgttaaataggtatacatgaagtgtactaaaattattagtgggatagggagggcacaccaatttatcagtaaatcaaattgtgtgggactcaatattaatttgcaccaatataataatataccccttaacatttctcataaaacaattaaataacttttaattagtactgctaactaattagaagatatcatgtctcaatgccaaataatagtgctctgtgctcgtacttttacacatggagagaacatagagagacttgctgcagctaataagcaagccacgttgatgctatgacttatttatttattttattagaaaagtttggatacaaaaacaaaataaaagtgataagaaaatattccataaccggtataaaattataattatatatgcactattgagcatatatatatttatgaaaaagaaggtaaatgcaatattatactaaaaaggatatttaagagtagtaacacacatgcatgtaattggatagctagacagagcaccataatatatataattaattccttatagaacggaaatatatataaatacatgtaaatatttatagaaaattgtccaatttgttgtaaacaatgcacatgccacttctccctctgaaggttttcattttagaccgattggagcaagaagattgcatgggtgacgtgaaaatattaaaaacttgcatgtgattcccgattctgccacgtaagtaaaattgtatattgccgacagttagtatatttagaggttacaattctatggggtccagaaccaatcatgtctccactttctcagaattcaagtgtgattattatgattgatcgagtaatcgaacaaaaaaataaaaaaacctgtaatatcatcaattggtgcatagtagtgtctgtgactaatgttacttttaatttgcaccaaaggttacaggattggttctatctaattcgtcaaagccgagcttctatcccttatctctatcgatatatcactctctgctcgtttaagcaccatatatataatgagaagttaagaaaaatatccgtcagtgttagcgaaattctaaagttcaaattgggggcccaattattatataaccttttctttgttcttttttctccttttctttttcccttgtatattttttaattctgatagcgagatgtgaagcgtgttctactcttaagcgcataggcactcattcctc

SEQ ID NO: 194047 - DNA, 1125 bp, Cannabis indica
agcagactagcgaggagaaatttctgtgattgatgcttcattcacagattctctctgaggcagctgattgtggttcacacctcccgtgttactatgcatatagaaagctggctgtgagggtactgggagagaaacagagttgctatttaacatgagaacaatattattcatggttggtctgtcaactaaatttgtttggacacacaatagtcctatgtgaatacatctcattatttcacttcctcgtctacctctcatcactggatctattatttttgtagcatttccttccctccaatgtctccatgtctgtaagttgtaacaacaatattgatattaatttataaatatatataggtagtgtagtactcttgattcttggtaaatggtacttacataagttaaaaggttttctgtacgctcatgctgtccttcaaggacacaatttttctgtccgcttattatttctaaaatcaatactccgaaactaaatatatcagatttgactgaatattgtccatgcatcacatattcaggggccatatatccactgaaacacaaaactatagtaattagtatgagtataattttttaataaataaaaaaaaatctatagttttgctaattacttaattgcatcaaaactttaagatttaagaaattaatagctttgcaatacacaatatgctattagaaggaaactaatataataagatgcattattagtaaaaaaaaaaaaaaacaataaataacattattagctagttttacttactatgttccgactattcgactggtactgtcttgagtttgatcaacaacaaaatgccttgcagttccaaaatcagatatcttaggatgcatttcttcatctaaaaggatgttactagctagatctcgatggataatttttaaacgggaatcttcatgaaggtaaagaagtcctcgagccacaccttctattattttgtaacgcctatcccaatcaaaattctcacgcttcgctgcatctgcatattatatgaatttgtcaagcataaaacttcaaatgaattgtataattatgtaatgtacatatttttactatcttgatttaattatgttttggagcacactaattatcat

SEQ ID NO: 194048 - DNA, 1765 bp, Cannabis indica
ttgtctcttggcatcttgtctctaagatggactgaatgtctgactgcttacattttaagctttcaggaatagacaagtaaaaattaatcacattatcagcattggtgagagtatttaatctttcaaaattttacttagtgtttcttgctctgcttttttgctttgctttttttgggggggagtttgtagaaagggaggaatatttgaatggattggaggagtaggggttagttataggaaaaggcagtaactcttagtttgtttacgcatgcagaaagaatgtgtttgtcgtctgcatcttttcctttatatatcctttactaaataatgagactttgtcttgagtattatatcgtccttgacaacttagactttgctaatgtgcctccaactcattcattggaatcctttcacaaagtgattgctgagaatgggggcactttctctatgaatctgaacagttctgtcactcattgtgttgcagctgaaagcaaaggtctctctctctctctctctctctctctctcatggacatataacacagcatacacagtgcaattatatagattttgatggatgctatttaaattaattttttggcaggaattaaatatcaggcagcaaagcgtcaaggggatattgttcattactcatgggtattggattgctgctctcaaaggaagcttattcctctacagccaaagttagtgatgtatcagtgttgcttaatccaacccttttgttgcatacatatctcttatactctagttaaatgtgtcagtagcatttttttttaaatattcttatatgtttttttttctctggttatattgagtacttgaaattatttctatttaaggtattacctcttcctatctgacttttcaaagaagaaattacaagaagacattgatgaattttctgacacttactactgggatctagaccttgcggacatcaaacaggtgtatatttatatggtttatgatttgtgtaatttttcgagcatttttgtatgattgatattttgaatgccataccatctatggctgtctgcttacatgcatttaggtttatattatatggcttgtggaatttttttgagagtattctgtaattgataatttgatattgaatgaaggaagaagccatttaaattatcactatggattctagctaaaatggatgcatttggaattacataaggaggtatgtgacagaagtttatgtttatgttacctttttcagctcttaagcaatgtgaatggagcacaacacactagaactactgatcattacaagaaaaagcattggccgcccaagtggtcttacttccacgattgcttcatctacttttatgctccactacaaaatttgtaagttttttttttttctaaataatcatgtaggtatagttttcagttttatttgattattttgtacgtgtactatctttctttctgactcttctttggaaaaaatgtgaagaaaaccagattgggaagttgtgttaggtcttgcactgcggcggttaaaggttgaagttcaaatgaatggagggagagttagcaatagtcttgctcaagcgacccatttggttatcttctttgtcccaggctgttccctagacgttgaagatttattgaaaaggtaatttgtcatttgatttcatactttattgtgattcagtaaattcaaggtcacgtataatttattcagtagatgcatgaaagaacaatatgtatatgttggtgagtaaaaatct

SEQ ID NO: 194049 - DNA, 1486 bp, Cannabis indica
gagaataattactaaaattaatttataaaagttaatttacatataatttcataaagcttttacaaccactacaaaaataactactgttagtgataactctttagtcacaatataaatgttttgcgactaaatatgacttttaatcacaataaaatgttatttgtgactaaaacataacatttaattacaagttgtcactaatttaattttattagccacaataagtattgtgactaaaaacatatttagtcacaacagattgtaatttttgtgactaatacttttaaccacgaaccttttagtcacaacataagaataatgttttataattagtcacatttttttacttttagtcacaaattttattgtgactaaaagtaaatttttttgtggtactagaaaaagttaatatgtgtgtagtacttaattaatagataattcagttatttttacaataattattgtagggtacaattttacaaaatatatatatataaaaaaataatttagtttagtttaatattatttttacaaaaatttaagtcttttttcctagcacgtgttttctccactaatataatttaaactattggatgaatatttttggtttacgtcagagtgtgactaacgaagtgaagaagtgtgcaaacttttcttatggggttctaataaaaacatgtctaaacttcactttccaagttggggttctaataaaaacatgtcttacagtggcattgggatcaagaaaaggtcagattagaatagagccatattggccaagtacatatgggctttaactaaaaagactgatgttcctttggttaagtggatcagttctgtctatttaaagtagggggacttttaggagttccggttaaagcaagattcaagctggtattggaagaagttgtgtaatttgaggaaggtttttagcaagagctctgttatggccactgaagtttgaggcaaatttaggtcttcaaagttatataatagtacccttgttcaaactcaggtcgcgtaacatatgaatgtctagaacagactaagcctttccaaacacagatttgtgctttggcaagtagtgaatggccagcttctcacaagagatcttctagctcagattaatatgagcttgccttctctgttatgtcctgtttgtgaattaatgcatgaggctcgtgatcatttgttctttacttttcctctgaccaagcttgtctctaatcaattgttcacttagctttgtttcaaggcttggccagaagactatgctagctgaaaaacttgattgaatcctaagagaagaggcatgctagggagcattgtcatagcagtggctgctacttttgtccataatatttttctcaatcgaaacaggtgttttttttttttttcctgttttaattataaatgtgaatactgtttttttatttgattatgtttttttcaaatttaatttaatatttaaaattaattataatac

SEQ ID NO: 194050 - DNA, 2521 bp, Cannabis indica
agaaaatgcttttttgattgtaaattgaaataactatttcgtatataccatattttgtattaatatctttgcttctgctttattggtgactatactgggtctcttgtgggtaaaaattatgttttacaaatttacagattgttttttttttctttctctcattagaggttttatgcatagtaacaaatattgacttataggatttttggaacttgatttatgtggtgtggaatgaaaatgataaactacatttttggagtcttggttggacatgtgagttcagctgcatccaattcatacaaataaattgcttaaaataatacatttgtattaagcaatagtttttttcttgtggtagagccacatttccctaataagatctattatgtcatcagaaaattacaccatgtaggcatgtacagttgtacttgtactagtgttctggttcatctatgctctaatttctgtggaaccgctttattatatttatgttatatatcaatttaaaagtaatattttgtatgagtttgttcaaactgtgtactgtttttcttttatatgtgatatttactatgtggaaaataatacttctcaaaggttaatttgctgtatgaggacattctttaataatgacattgtgaagttgacatagattttgtacatcagggaattcctgaacaggctgatgttccaccagttacccaagttcctgcccaggcagcaggagcaaactccccagcaatcattcctccggtgcaagcatcacaacctgctgctgcacccgctgtgggtcctaatgcaaatcctctggatctcttcccacaggtagatattgtttaaaccttttctttgaattcttccccagatcatcctttacttttaactttgaattgtattttatggtcagctaattaataaaatataaatctcttcctgcatcagggcctaccaaatgtgggtgcaaatactggtgctggcaacttagattttctccgaaacagccaacaggtacatttttttttctttactttctgtcttatctagatggagctttctttttattttttattcctgtagttatggttattccttttttgaacttccaatgtagttccaagctttgcgagctatggttcaagcgaatcctcaaattcttcaggttaggctcctatcatgtttgatagcttggtcatttttgtggcttacagcactaaataatactcatgctacccttattgttttgcagcctatgcttcaagagctagggaaacaaaatccacatcttgtgcgcctcatacaagagcatcaggctgactttttgcgcctgataaatgagcctgttgagggaggagaagggtgagatgattccgtctatcttttttattttttagtttttgttatctacctgagccaggctaacttttcatttttattatacaatcaggaacgttctgggccagatggcttctgccatgccacaggctgtgactgtaactcccgaggagcgggcagccattgaacgtgtatgtttctaatcttgttttgtttaatctctgtgtagtccatcttttgttcgtgcttttctttagacttgaattagagttattcggaacgcaattgattccctttgataaggaattatatggagtgtcaagtaaatactgtatgaattaatataatctttatggtctcatatattattttgttgttgtagctggaagcaatgggatttgatagagccatagtcttggaagtttactttgcatgcaacaaaaatgaggaattggctgccaactatcttttggatcacatgcacgagttcgaagatgaacaatagccgattgattttttttttctttttttaatttatgtttttcggcttattttgttttattttctacaacaactactactactacgacaagactattggtcagataaatcttttagggtgtttaaattctgattttatctctttcaaatatagcttcttcagaattccatctcaagtattgttcctattttaatataattttgctttttaacccaaaagaaagtcttgttcttgttctttcttctttttttcatttcttttaaaatttaacatttttgcaactttaaatttataagaacgatgttgctgttgcctattaatttcggcataagggtagcgtgtaatggaatggaaatagaaatggttatatggtaagagcgttgccattaggtataagggtgttggtcaaactgttcagttaaattatgtggtacgatttgcgatgttgaaattattaattgcagttaaaattatactgcaccacactaattataaaactaatcataaagtaggattgttggtgaataagtttcgattatatttaaatgtgttattacattaagtttatgcacatataattggcaagattgtttatggtatgtgttttctgtgtttttacctacaaaacacgtggcattatcagagatcaagtggatatatatatatattttttaaatttaacttatt

SEQ ID NO: 194051 - DNA, 2064 bp, Cannabis indica
taaaaatatattatttattaatttaatgtagtaatttaaaaatttattttttatatatataaacaaattataaatatataaatgcaatatgtgagttttctttatgataataacaaaatatgtcaaaatgaagtcaacaggaacacaataggatttgtatcggttagaaaaaattaagtatgaaattaaaaaataaatcgatacacctaccacaaaatataaaaacctgtgacataaaatataacatgaacacgttttttcttaccgttttaattgagaatgtgttgttgaccaataaaggtatacatacgcccatcgtgataaaatataaattctctgatattttttacaattcttagaaagttttggtaaatatttaatacagtcttttaataaggataagttcgtttgttgtttttgttaagaacttgctggcttgaaagtcatgaatgaaattatttcgatatattttgttttttttgaaaagtgatatattcattaatgaaatataaataaaccgttttctttttttcttagttaattctttttaaatgtttagtcaagtcaatcattcctctatttgaacatataaagagagaattaatactatgggaccagaattaatatcatgggacccttcatgttccacatttctttttactccgggacccattaatgtaccttgaaacttaaaatcaaagctacaataacaccctttttatttgctataattgcttcatttgaaaacatattacacttcactttttttaatcccctattcctattcctattccatgtattaattctttttgtattatacaaatcactattttttttttctagttaaaggagttattttttatcaacctaattagaaagagttgattatgagaatttgaactctaaatcaacacattcacaacttttcatgcagtcaactcatttagctgatcaaaaacatataatgtataatatgaaaaagggttttgtcatgcaactatttgttctagtaattaactcactaatatttagtaatacataccattaaaataatattggctaattaaccctaagcacattagtttccttttgcttggtttcatgcaatgcttgtgcatgtagttatgagaaacctatatatatcatgaacaagctgagtaaattaaagttgactaggtataattaaattacttacatgtgttaccacaatcatgactaaatatctggtaatggggaagattaaaaggagagttttaagattaattaagatatatattaagcttcttttttaaaacaaataatacaaattaatcatgcatgcggatataggagggtgcggatcagagaagccaggaaagccatcaccgacggtacggaataaagcacagaccaagacacaaaaggaccctatacgacactttgtttaagcccttttttggtgatatatgttgcattgttaagtacatgatcaaatttgggttaataaaagcattgagagcccagaagccaaaatccattccatgccccagtggtccagctaaaaaagaacatgtcagaacaagaccaaactagtacgtggtccttaacctatatatacacatatagggcctatgtatgtatgagatttttttcttttttattaaatattgtttttgctgagcttatcctagatgagaaacagactgtctaattaatagaaaggcttgcctcatatggtattacttcgtattggaatattaattggaattgtcatttttttttctatccttttttaaaaaattaattcatggtcatgaggactgacagaagcttagtgtatatatacaacgactatatattatatttttttaatcgacaaaggatacataattattgaaaatgttgtgacaaaaaaggaccacaaaaaatcatatttttggaccactactacttttgtgtggtttgggtttcttttcctgactaacgtggtccttaagcttgcttttgttacatttgcttaaaaacattccattgtcttaatacatggcaatcattcaattatgacaaaagtttacaccctcaaac

SEQ ID NO: 194052 - DNA, 853 bp, Cannabis indica
aaaaaaaaaaaacacaaaaaaagggacaaatgataaaaaaaaatagtgaaaaaagttacctgtcaaaaaaaaatagcggtggaatggcaattgatggtggtgcaatgacggttaacaatggtagaatggtggtttttttggaagaaaaatgagcggaggaggaggataaaaagagaaaggggcggagcaaaatgaaaacaacaaaaattgttttctgagttaggagatgggaatttacaggaaaacattaccggcgagacccaccggtatttattaggtctccgtcggtaatgctgcaacggtcagaattcatcattaataccggtggatcctacttctaataatccgccggtattaatattttgaaattttaggcaatcaaattcccgctcttgttattagaggtgggatttctgctggtaataatatttttttatctgacaaatatttaaaaatttaaattaaataactattgctggtggatggcctattccgccggtactaaaaaaatttgttgaagtgtttttatacaaaaaatacgaaatgttgttttacattattttcgaaaaaaaattgttttgatattactgttacgacaaaacaacgtaaaagcaacattttctttgaaaaaaacaaagtgaaaatctgtaaaaaaaaaaaccgtaaaaataatatataaaaaataaattcacgtaaaaaagtaaaagtagaaagtttactttaggtgtgttgaccgaggttttcggcaaccaatttaaaaataatataagaaagctgcagaaagattaatgcacgagatttttacgtggttggggcgattaatgagccttagtccacgagtttttagtattta

SEQ ID NO: 194053 - DNA, 640 bp, Cannabis indica
gtgtaacacttttactatagtaactaatttactgatgaattattatatattgtgttatttatttatttgtttatttttgcagtttgctctgatcaagtttgggtgatcgtggtgatttccagcatatatatatttttagtaataaataatattcgagaataattaataatgtatacgtggatatgtttatatccacacgatcatgagattaactatatcctatctaatcttatttgttataatttatgtaatgcagtatacctatctacctacctaccttcatgttataacattttattattatatatatgagtacttaataaatggagttgttataaaccatcttttctttcttcttcttcttaataatttggagctatcattaattaattaattgtatctaattaattaatctaattttacatttaatataaatgcttaggatcgtctttagggttaggccgttacttaaggttacttggccctagagtagtgaccgagttaacatacattggaggcaaactaataataatcatatgtatggttataggcatagtctagtaatttcacacttctcttcacaaatagaaagtcctaaattcaaggtcctaaattcgaatccataaaataataataataa

SEQ ID NO: 194054 - DNA, 1653 bp, Cannabis indica
aatttgagccatttcttgggtcggtcacaaatgggtctcggtccttctgttcccattcttttggatcatactggcaacatgacctcgagttggttccttccttcagatagttatctaggggatgacaacactagctctttaatttatgaattttctagggcagaattaaggcgtcagggtgggattagccttccttgttgtattatacttgtatctgtgattcgtatgtgctttctttttatcctttattttatttattttaagcagcgaaacccatggataatttgttggccatgttagttgctactcatagtctagaactagaggtgtctgatcctccctaagtaatggtgactcccggaggtccttctaaagaggcgcctgggaaccaggagctggtgttgattgaggaagaaaaggaaagagtacccccacttgaccagaaatgggaaggtgcggtttccattacagagccttcccaaaagccaaaacgctctgccacccccagtcctagtgctgactctgagatccaagctgaagtttaagattttcctgccccaccagccattctcctaactccaccccaccctgacaaagagtgaatccagctctgccttgccaaacagaactatgccgtggatgagcattcgaaaagtgatgccgaggtcaaggctctgaaaaagtggctaaggaaggttcacgatggaccctttcagggcgagtacaatggggaggtcaaggatctaaatcttgatcctatgattgactcgttcaaatgctacttaagccctttccttgtaccctttgcttttgagatggtgagtcatttcgctattgacctgactcaacttccaaccaagaggtatgcggcctgcacctcctccaaccccgtcttccagatctaagacatgagtgtggcccttacttttgtaagtatatattttgagtttctctttttttcttttagttttcctaaagatctgacccgttcttgtctattgttgtcaaatttttgcaaaggtcggttgcctttccaagacgttaatcgtccaagggtttgtcgtcttagagttgcgtggcatggatggagttttgaagaagcttggggaggctgagagccaaatggaaactcttcaggtagacactttgccataaaggcacttagggagcgagatcaagagactaagaaggccaaggagaagaccattgcctctactcaaaaggaccttctaaatgctcgagaggagattcagggactcatgaccagactgaaggctcttaaggacttacataaagtcgacaaagaaactacagcgggaatgtcggttgagctcaaggagttgcatgagttccgagactggactcagaatgaggttgtgaaggctgcgagggatgcattattaactctagtgacttgtaagcattgtgtgaagcgctttgaggatggagtttttatgtgctggagattgaacaaatttgaacctcacttgatttcatgcctgatcctaaggctatagtggcttgcttctgggagaataacaagaagcttaagtagtccctggctaagcggatgggtcctcgcctttctcttagaatttgattaattaaacccttttttcacttcgtcttactattacccccactaagacaata

SEQ ID NO: 194055 - DNA, 792 bp, Cannabis indica
cactgaatagtagttggaaatcaattccttggaaaaagacttcgatcattattacaattccattactcatagtaccaatgacatatgatatgaaccaaattacacaaacatgtgtgacatttttaacaatatttcattggcacttgtacagttgtacatgtctgactaagctacacccactttcagaatttgtaatagtaaaatattagtatatgaaattagtgtgatcagaccccagattacggtttatgtgtgtgattttgggtcatatatatcaagtattgttgcatataacgtggctgtatatatggaggttgttaatatttataataatatacatgatataattataaaatataacgtggctgttttgttttaataaggttggtgagaaaacctgaaagtaagctacaaaattatgacaaaaaaaaaaaaaaaatggagtctgcaatttttttattttttattttcttgctagctagaattcatatacaaatttcaatgttttgttatgctaactaattaatgatatatattgctgatttatgaaggaataggttatcaataaagttaatataattaatttaacaaaatcaccacctttgccaaatcaaatattaaagaagtgagattgtctacatattcgcatatctccatggttggaaacttcttcacacgatcagaattttaattagtattattgaaaataaagatttcagcatcatcatcagcaatataattaattgttaattcctaataccaaatcagatctatatttttttatttaaaaat

SEQ ID NO: 194056 - DNA, 1728 bp, Cannabis indica
atcaggacgagagaaatttgaaaacttgaggcgaatcttgggaagatatataatggagcttcgtttatgtcagacctccaaattaaatacagataacaaaaatggcaaccagatggagaaacatagttcatcatgtattgtaatgtatatttataaatatatatatacacataggtacaaacatatgcaaagatagagagaataagctcatggggttaatataaatcgtgtatatgatgaaggtttaatttatgtgtattaaatgtaatagctacaacaatatatattaattattagtttacaagaacaattatatatttagataaatagaacctgcacttataatggtaactctggtttttttgtgctagctgttcaatagttatgaaaatatacaattagttttcaagagatggggaggtagggtgattccaacttcaaatctccttggtgtgaaatcatagaaatacccatcataattagaacaaacattatatgcatgtgccagcaaattaaagaaaaaaaacaaaagtagaaagaaaagcaatccatggatcccatgattttgcttactctaatctttatttggcacttcaaggtatccgagccatacagatatatataatttattaaatcaaaatgtgtgagatcccatattaaagtacatcaatatgtgcttacaacatgtctctaaacatttatcttttactaactatagcttgtactcaataatctgaccaattattacagctcattctaaatcataaacccataatagtgttcaagcattgtcttattaagttgttcgggaccgacttttaattttatatatcatataataattttctaaatcatcatagataaaccataatgtatgtttataatgaatcgaagaggtatatatatgatgagaaaaaacaaagtatatatgaaaaatatacaaatgaacatattctatgaatgtaagataagaaaaacatttatattattatacataaatgtaggttgaaaagaatcttgtaaaagggaacaagtttcagaactccattgccgtggctgtgtaaatctacttattgtcagagtataaaagtactgatcagtacttcattatatattataccatatatcactagtatcaggtcgttttgaaaactttcaaggagacatccattcgtgaatatgatattcaagcaggttaatcactgatagtacttcttctgttgaatttatatctacaaatatatatatgtacacatgtttgactaattaaaagtacattctaaggaaagcttataaggtacacaatggtctgatccccatgtctatagctagagacatatgcttgatctttcataaatttatatatatgatacatcattggaaataattagtctgatttctcatttcactagcctcacatgaatgaaaccctagtaaattagtcagctatggagggaaagaagataaacccaggcctatactaatctgttttatttatacattatatattagcaagggactttatttttttacagtaattatttacttatatataagagcagagggagagaggaaagaaattctaacatatatatttataacaggtgatacttatttctgaaataatgctctaaagcctgaaaagaactttttccgatcgaaagagaggaaaaaacattataacataacaagtattcttcctgtgttttttatgtgtgtgtatatata

SEQ ID NO: 194057 - DNA, 1348 bp, Cannabis indica
atttcaagcaaaactaacttaaaagttggctccaaatgcaaaataaatctgattaacatcaaaaagtagcaattaaagattgagatacacaccaaaactgttgataaatctgtgtcaattctatcaacagttgataaatttggaatataagacaaaggcatagtgaagcgttaacagtttttccattataccaagcattttggttttttcatgttgtcaatcattaagaaaaatgaaaatgcttaacacgaaagtagaaaaagaaactaccataataaagaaatttgccaaactaacaacatgaaaagcaaaaaatttgtaaaataattgcattgaatttaatcaattacactctgcaaccgtaaaaagacctaagctagttctgctatcctaaattcacactgcaaaaccataatccacaaagtataaattcaatgtaatttttgttatatttcaaaacactccaaatacaattaacagcaatgtagatggttctgaactcgaatctctgctaatgatttcaaaaatattataaaaatcatatttcttttactttcaatcatatcatgaaccatcagagcaagaggcagagcctgaatcccgaatcgtccttctatctaataaatgcattctttccaaaaatccgagtttgttacacatattagctctagaattactatcatataccattaaacaaactaatttaaagagtcattcgcagttacacagtctaaattagttcatacttacacattctcctaatcttgcaaccataaatttacatacaataataaattcaatgtagttaatttatcattttcatgttcttaatttggcaaatatcccaatgcagatagttccaagttcaaatctaagcttataatttcaaaaaaagaataaaaattcaatttttattattaccttcaatctatgattaacagcaggatgaatatcaatatgagcatcatcgctaatctcaccatcaacagtagattccttctcgtgttctctcttcacatacttctcatgatcagacaaagccacattgaaatcaaaagcttcgtttcgctcagaaaatcccaacccaataaaaagcgtgttttccattaccatcttcgatcttaagaacaaaatatctcgacgaatcgagcacggtttcaactgaggtctcacgctgaccagggtttacaaaacaagcagcgaacaactcacccgagttcggatcctcgagtcggatctcacatcgatccttacacgatacaactcggagtcgacccgtccagatcttgtcagactgaagccactcgccgcacttgtacccaccggaggtactccggggagggatttt

SEQ ID NO: 194058 - DNA, 1395 bp, Cannabis indica
aaaagtgtcttacatgtgtgctcttattaactttcagtttcagagaacccaacaaaaaataaaaaataaaactctgcaatcaagttttccatttttacagtgtaaaagaagctcaagaaactaaaaacaaaagaaagaaagaaagagtacccaagacaagtcaatagcccagctttcagtatgggtaagactatgaacaatggcctgtctactctgtaagctcccagctttcccaagcttcggcataaggcttggagacaccaacttaacctatacccacagaacaaattcccattaactacgcgtaaaataaataaaaaagaaagagagaattagagtaaattaagaaaagcctacgtcggagagcctggcgggtcgatccggtacgatggggtctagagttggatggtagggacgagtaatctctccttgaagccatcgagaggcaaccgaatcgccaagccgagccttttcaaatgggtcagccgtgttgagaacttggagcgcagcttccaccaacgtctcctcctcctccttcgcactcatttctcttcttccttcttcggcttctcacgtcgtcaaccatagctattaccagtcataacttgaaattacaacgggctcgtcaggttaatttgggccgggccgggtttaccatagggcccaacagtttttgtcactctttaacgaagccattgttgtttcttttggaatttctttcttttcagactgacttaagcaactcagatgaatcaaccggtgagtctccgaaacgagtcgactcaccatcgtctgtacgatttcgccaagtctgctctgataaagatttttgttcatccctacgccaaggtttgcgatttgtattgcggagaaggagtagacactgagaagtgggacgaagctcaaattggtcactacattggaattggtacttatacaattttcttcatttctatcgtaattatgtttggtatcaatttttgttattgtttttctttttttctagtgggttattggaataaggtaatgatataaagatgtgcttctttctttttctttgtttgttgaggtgaatagatatttcctcgtctggaattagccaaagaaaagaagaatgggagagccatagaaaagtttacactgctgagttcattgagcttgatccttgcactgtgagtatctcactaattaaacttgcatggttgaaaataatgcctatcaacaccaattgtagaatccgtaaatgttatattatatatatatatataatatatatatatatatttaatcttatgtatggcaggaatatgtagaaccacacttgcaggagcagagcaattctgctgattacgtttgctgcttgcaacagttgcaggtttctttctttttttatat

SEQ ID NO: 194059 - DNA, 3165 bp, Cannabis indica
tataaaaaaggtgctccaaatcaggttaccaagcaggtccttctgcaggggagatacaagaatggcctttatacttttgaaggccttaacatagtcacatcctcaacacccagtaccactaaagattggcataataacctccctgctggtgtctcctttccaactgtaaactttgcttctttagcttccagtactcactgcaataatagacagttttctgaatttgatgtatggcataacaagcttggacacccgtccaaaagtgttgttaattctgtgctaaaaacctgtaatcttagtgttgataataaaaattcccaacttatttgtcctgcttgctgtttgggtaaaatacacaaactaccatttcctaaagtgtctaacactgtgtatacagctcctttacagttgattgtttctgatctatggggtccatcccacactgtttctcacagtggttacaagtactacatccattttatggatgtttactcgaggttcatttggatttacatgcttaaagacaagtctgaaaccttaaaagtcttccaaatgttcaaagcagaggctgagttgcagttgggaactcagatcaaaatggttcaaacagactggggtggtgagtatagaacattccctaagtttctccaacagtttggaattacacatagacacacgtgtccaaccacccatgaacaaaatggattggctgaaaggaagcataggcatatagtagaaaatggcttaaccttactagctcagtcctcaatgcctctcaaattttgggatgaagcatttaggacagctgtctttatacacaattacacctgtccttaatcacaaaacacccttagaagtcttgtttcacaaacaaccagattacaactggttcaaaacgtttgggtgtcaatgtttcccaaacatcagaccatacaataagcacaaaatgcaattcaggtctgaaccttgtactttcctagggtatagccttaaccataaaggctacaaatgtcttgcttccaatggtagaatgtacatttctcgtgatgtcatctttgatgaacatcagttttcctattcaaagatcaatcccaaaccagatgctataattccccaagactggtatgtgtctgcccaaattccttgtgtcaaactcaacaccccacaacacaatgcaacatcaagtgtgagtgagtctactatccctcctgatccagcagttcccaccatctgtactccaccttctgtgcaaagtcagcagtcctcaacacccctggttccacctggttttgaacatgttgtccctaatcgtgtcaccacattacatactgataactctacccctgttcatcatgagacaccttccttttcatgcaattcatctcccctacacactagttctactgtccctgtacctaaagtccaaaataatcaccaaatgacaacccgagccaagtctggtgtccataaaccaaaagtttacagtgtgtccactatcccaacctctgttgctcaggccctacagatgccacaatggaaaggagctatggatgatgagattctggctctcatcaagaacaagacctacacacttgttcccttgccacctgggaggcaagccatagggtgtaaatgggtgtacaaagagaaagaagacactgaagggaatgtcacaaggcacaaggctcgacttgttgccaaggggtttcaccaacaacctggtttcgatttcactgaaactttagcccagttgtaaagccagtgactattcgagttgttctaactcttgcattatcagagggatggcaaattagacagcttgatgtaaataatgcattcctaaatggtgtgcttcaagaggaggtctatatgactcaaccaccagggtttgaagttacatctgaacctaatctggtttgcaagcttcacaaagccttgtatggacttaaacaagcacctagagcttggtttgagagacttcatcagtctctttgcaagtttggttttgtgtcttccaaatcagatcactctctgtttatacaacattctcctcaaggcacaatatttgttttggtgtatgttgacgatatcatggtaacaggtagtgatcccacaatggtaaatcagcttatatccaatctgaacactgaattttctcttaaagatcttggtggtctgagttattttctggggatagaggtcaaatataccactgatggtctgcatctgtcccaaagcaagtatattagagatttacttgtcaagacacaaatgcaagaggccaaatcatcatctgctccaatgaccagtggacttcgactgtctgcctatggtagtgatcctgtcgaggatgttcaattgtacaggtcaactgtaggagctcttcaatacctaactataaccagacctgagatctctttcagcattagcaaagtatgccaatttatgcacaatcctttgcatgctcactgggtagccgtgaagagaatactaaggtatctcagtggaacaatgaaccatggtttgcatctgaagaaacccccacaccttgatgtcactgccttctgtgatgctgactgggcagcagatgttgatgacagacaatcaacttcagggtatgtcatttattttgggacaaatttggttgcttggtcttcaaagaagcaacacactgtttcacggtccagtattgaagcagagtttcgagcccttgccaatgttgttgcagaaattacatggctcaagtcactactgtctgaacttcgtatcacttcaacaaggactcctgtggtttggtgtgataatctcagtactgtgcttttgacagcaaatcctgtgctacatgcccgaacaaagcacattgaactcgacttatactttgtgagagagaagatcttgcagcatgttgttgatgtcagacatgtcccagctattgatcaaattgcagatggcctaaccaagtcaatttccagtagcagattcagttctttcagagccaaactcagaattgaagatgcttcaattcagtttgagggggagtgttaagggtgtaaaggttgttaaaaccgttagtgatgttggttaggactgtctgttagttagttagtctctctaactaatttctgttgtattgttagtgagctgtcatagctcttcttctcatca

SEQ ID NO: 194060 - DNA, 587 bp, Cannabis indica
ccgtataaccttataatatttatagctcggaaaaactattgcaatcatgagtttggaaccctgagcagactgccactgataagccgggggaaggtgagaatgactctcgaaaagcatatagtgtccatttcggacaactctccattattcttcgccttttccaaggaaatatggaataacagaaacatttaaataagtttgattctttaccaaatcataaaaaccccactttccgtagagcccttccttctctttgtgattttatgtagaggcaaaccacatgtctaactattcgagctagtatattatatatgtatataagggttttctttataatagaaaaatactctctttatattagattgctggaacaatcaaagcttcttctcatagaaaagactacataaaagataggtggcactggcttgtttttgttagtgtagagaacatgaatgttgaaggtggtggaacttttgatggtaagggaaaaatatggtgggaaaactcttgcaaagtcaacaaatcccttgtatgtcaatacttctcaccctcttgcttttaatctctatattttattaagaaaaaaa

SEQ ID NO: 194061 - DNA, 1551 bp, Cannabis indica
tcgtaatacaataacaataaatgatactagtaatgacatttagcgttgttagaatccaatttaatttgtcaataaagacatttgacgatgctagaacctaatttatttagtcaataaacgcatttgacgttgctaaaactttaatattttattacaaaagttctagtgatgtcatttgatgtggctacaacttaatttttcatcaccaaaagttctagtgatgatatttgatgtcacttgaccaatttttcatcgccaaaagttcaagggacgacattactagaacccaatttttcgttgccaaaagttcaagggacaatgtctaacattggtagaacccttttttttgtcgccaaaagttcaagggaacatttaacattgctagaacccaatttttcatcgttaaaagttccagtgacaacaatggtgattagaacatattttctaaataatacacatacacaatattaataacaacattataagtagttgctagaaatcctccaaaatttgaatatctataaacttttattgacgacttgaatcactttcagtaatgcgtaattattttttttttctttccattatatatttattattataaataggggctgctctcttataataaaaggaaaaatatacacaatacacttacaaattattattttttatttttttttgtatttttacgattttttttacaaacattttcttttgtttatatttttacgaattttctttttttacaagttttaacttgttttttgttaacgaaaaatgttattttgtgtagcaacaaacaatattgttttaaaacaatgaaaaaacaacactctgaattgttgtaaaaaaaattatgttactttctcgtagcaacaacgtcaaaataatattttttcaaaaacaacaaaaaaaacacaccttatttttgtaaaaaaaaaaacagtgaatcggtaataatgtaaaagttgtcatttttgtatatttatgaaataatccccaataaagattaatacaattaatttataaaaaaatttatagcaattaatttatagcttaaaatttcatttttattacatttcacatttttttcatttactaacccgaaataaaaatataagtcaatttgtaaaactattttttaatatgaattccatgtaacaaattaattaaatataatgagtaataataaatgtgcataaataaatacacaaaaatattatgcctagtaatataatagtaattttttaaatagtaggtgccagagtactcccaataatttttttactttattctttaaaatatatcactaaaatctaattttctctattttacattaaaattttacaacacaatatagaataattactctgttttttctctaaatcatttaatataatatcttttaatatatttattcatttcatatattttatttaactttcaattatagcgcaataccttttagcgccagtttggcatagtttttagagaagctaaaagctgcttactccaaaaaaaaaaaaaaaaaaacctgtagacaaaaaagta

SEQ ID NO: 194062 - DNA, 1340 bp, Cannabis indica
atattttcgaaatttaacatttattaaattatgtaaaatttatgctaataaaattggacaaaaatcattgaatttaattatttttgtagttttaaaaaaaaaattaacaaaaaattgaagtgacaaaatttaataaatttcaaatttcggtggttaaaattataataattagtcttttaattttaattataatgtaaccaaaaatagaataaagcacgtgtaaatttgtgctgcttgttcatttgggtgatgaatgatagaatataattcagttttgtgaaaacgcatcactacaaattcaagaatctaccatttcctacccacgatttaggttttagggttcctttcctctctgtaatttcttcaatggaagatcacaattcgggacttgttgaatctgaagagatctctgattcgttcatatgctgcgtttgtttgtaagttgatcattcattacgtgtctacgcattccaatttcgttatttgattaggctttttattgctgagaaaggggaatttgaaatttctatctacaatttattacgattaagatatagtgcagttcgttcgttatgattaatttttagttttcggctgttttcatcagagagctttgatagttttatttgaatttgagttataattactacgttgtttttggtgcagggatcttttatacaagcctatagtgctttgtaagtcactctttttttcaaagatgtcattttatatttcaatatgaatctttgatggcttaagagattttattgggttttttttttcagcttgtggtcatgtatcatgtttctggtgcgtgcatcaatccatggatatttttagagaatcacattgcccaatatgtagaaatccgtacgcccattttccaaacatttgccatttgcttcaccgcttgcttcaaaagatgtatcctcttgcctataagaaaagggaatggcaaactttaggtgagaataagcagtgtatatgcttggtagataattacatttaaaaagatgtctctgaacttttcaagtgtttcaatgatttgtggagaattcagcagttgatattcagaatcttttatggttgttgataatgtaacatttttatattgcagaagaggagaagaaaatgggttatttctcgcctcagtttgatgacaatgcttgttacaattcagctaatcaaggtctttattgtatcgaaaactctgcttgtgaggaatcctgtcctaatataaagcagttagattccggatatcaggttcagcatggtggggatttcaaacaagttaccgggactgttcaagacacatcctgtggggatataaagcagttaga

SEQ ID NO: 194063 - DNA, 1921 bp, Cannabis indica
agattcattcaagagtaaacataacaacatagttaggcaattcatgatgaatatgtacataagagaaactgaattttcaaccaaagtcagtaaacttaaaagctaataaaactttgttctctaaatgaaaacctcttaagggttttcaaactcaatcaactccattccaaaaagttagtaactttacctaaattgaaactaaacatgacatgatatagaatttgaagaaaatcaaaatccaaaattgattaccaatattcctgaattttccaaaggcaagaaacctctgtccttgagaaatgcataagcattagcaacaagtctcaaatcatcagcattaagacaagtgtccaaaacctcccaatctctctcagacacaaaaagatccaactttgaagaagacccattcaagggttgaaggggaatcaccaaattgggtgacttttcttctctggttttcaagaacttgagagcaccggcaaggtccttgcgcttgactgcgtcctcgtaatctttccattctcggagaactgatgttggggttgaaatgattcgccattgacgaggcttgtgaggagaatatgagtgtttggataagaagaaagtgggagagaaagctcccacatcgagggaaggggaagcgaaagccatggagaatctgttggaaaatattcacttaaattaataaataaataataaatgtgcttataaaattggttaaattagaattaaaggtgagaaaatttttaagaattcaggtcctatttgtactattttagaaaatacagggtccattttatcatttaccaaaacacagggtctaattggtaacttttgtaaaacagagagtccaaaatggtatttaccctattttatttataaaaatacgattttagagttttaaaagtataaaaatatacttttctcaacaaagagtaaaaaaaacgtgaagaataatgagaaatcaacttcatagcaactgtttaaagaaataaattaaagaagaaaaaacctaaatttttggggcgttaatgagtctttatatacgagtcaatattattgagctagaaaaacttcaaggtatctttacacaagcatttttgtcctagctgatgaatcctaattcttagctcttagtagcaaaaaaaataatttttccaccgatccctttgcgtgaagatataatgttttatttataggctagatttgggtataagcgaacccggacccggtagggtttagaggtgtcaactaggcccatcgatggggaaaatacaatatataatgactttgagccagttagatgaggtccaattcatgagaacactgataatggtcatccgtacaagcgtggaccgattatgatgccacgtgtcgtgagttactatgttggtactgagaatgttagagaatatagcgttggaaaaaaagcgatttccttttgatagtacgtgcactccttgggcctgacgtaagggcaaaacccctaacatggtggggcccctgtttggaggtcgccgacataggatgatattcggaggcttctgatatttcttcaatttcatgtatccagattaccccatgagggcgtgaggccaaacaatattttagtcgatggacccttcgccttctaggccaaacaatattttccaaaccgaagtggctcaaccttgtcgcgtctgtaagatagacgtacattcggtattcggatttagaatcgtaatttgactttataattaagttgacttattaacttgactggacctaagaatgagtctattttgattgatcaaaattttgtaaaaaaatacatacgtcgctagtctagaaacgtagataacaacaactataaagtcaaatgttaaaaacaacaaaaaagaatactcataacaactatgaaataataattaaattataaaat

SEQ ID NO: 194064 - DNA, 2487 bp, Cannabis indica
agacctttttgttgatttatctttattcatcccccctaactattctaactaaggatattatatctctccttaattagggtgttttgagttagtaaccatgtctcccatcgtaggttcttacaaagcctcatacacattactagttgaaacttttgtggacttctccacattcttcttattgtcaattctcttaggaactatccactcacccttgctccacaacatcatagacaggaatatgaatcctatcagatttaacaacacctgcttctgcaatattaccttgcacaaaattattcaaacatagtttttcaaatatcactttcttctttttaacccagaccataccatgttcctttgaataagaactcatagaatgccccaatagaccacatgttgcacatttggcaggcaaccactcataccctattgactgctcaacatgttggttcctcttattaataaaagatatggacaaaggaggtttatcagcaatctccacctcaattagcacacacgcaaacttgatcatggaacaatctctagtgactttatcaatcattatcgacttgccgattttactcactaaagcactgtgacaatttcttccccaatacccaaaccattcaacctgatccaaatagggattgaattcaccattttaacggaatctaagtcagaagtccatgggtgaagaacaactggcttcttgtcaaaatggaccacttccgtttccaaaatcagatcacgagtagtttcaacatgaaagctcaccaaagtgaaaccaaagtgcattcacacagtgcaatcaacccctaaattcccccagatcctcttaacaacaccttcgaagacacgaaaggagggattcacacccaacactacacaaataatatagttttgcaaaaagaagtttcaatctcaacctcttcaatatcaatcttagctataagtttatccccatgcttaatcggttttgtaaaatcaaaatgagtggaagggattcttacttgattggatctaaatttattccactcatctttcaagaaagtttagaagtccactttctcagccttatttgccaacgaacgcgaactaggcggaggaagggttttaatcggcaccataacctctgtcagcaactcttcaagcgagtccaaaaattcttcacaaaggttgtcatcttcaaaagtttcttagatcagaagctcttcaacactggcaatcacctcagctatttcttcgtctctcactatgggggatccgattcaatcaagcgcacaagctttcaaatcactttttttttcttcaccttggaggaaagagagagaggcctcacacgctgctaatttcaaaggagggttgcatagggaaaaagttcataattttgtaatttgtctatgatttaaataatataatttatttattaaaatataaactatatatttttacatttttatatattttatgaatgtaaaatatattttatgtatgaaagttatctcaaatttgaaacatctcaataaatgggttgtgttaggtcatattgagttagaatgcgcccaatccataattatgatctattgcttttcagcccaatgagtcatggatagtcttaacataaatctttactacaaaaaatgggttgggttggtcaggttgattggtttggcccatattttgtgcacttagacctcttaaagggtcgttctggtggtccttaactgtttcgacattcatattttttttaatctattgtagctatttatgaccacttataaatttttaaaaaaatttgaatagcttacagtgcaaaaatttaaatttaaataagtacttacgtgtataagaaaaaaattgttgtgcgtgcaccaaaatatataaattttatttttaacattgtaaattactcgaaattttctaaaaatatcaagtgattctatataattataacacgatcatgaataattaactaaaaaattattttctttactaaaatagataaatagtctacataaacactcttttaaaatgtactataaatttacccgttatatatattttaaaaacttcatgagtataaaacacgtaaatccaaatttaatcaacaatgatgttttagagtttaaaactaaaaaataatgcagagactatttagatgggaactcgttttattagtaaaattaataaatgaatattttacattagaatatgttgaaatggtggaaatagtgggtaacgataaccttttcagtccgggattgagttgggttctagtgggatgggggctatttatttattttgaaaaatatattttcttaatttaggaagagttgaaagattattttttaagaatttaggtaatattttcttaatataattaaaatttcaaaaaaaaaaaaaaaaaaaaattgaatgaggacctaggtcctcttcaagagtagttgattattttattaggtgttgagatgcaaaatgatcttaaat

SEQ ID NO: 194065 - DNA, 2208 bp, Cannabis indica
atatatatatatttataaagtatttcttcttatgatgtataccaggaaagatagcttcattacacatagagcgttttgtgatgccctagcagaagagagtgctaggcttacttcggttgtatccagcaatctcagcttcggtaatcgtaataataatgttgatgatcatactaatgctattactactagtagtcctagttcaagtactaccactatggttaatatggaccatatattacatggactcggtattatgagtggtactacaagtactagtcatggttttcagcttcaacaagatcacttcaatcatcatctcagcaagtcaagattatcacattggcttaaccaagcaaataattcatcgcataacagtaataacattaataataatgacaataatcctatggattatgtctacaatagaagtagtagtgtgcaagagctggtcataggatcaactactagtagtactactctctttggctcttgttcttcttcaatgtcaagtttggtaggattaaaagaagaagcaaatcaagtgcttaacaactcttcatcattatcatcatcgaagcatgttattgctccaatgtcagccacagctcttctccaaaaagcagctcaaatgggctcaactagatcatcaagcaacccttcatttagtactactaatattactactaccactagctcatcatcaccaggtgtaatgatgatcatgaacccctcttcttcttcagctactaatagtcatgtcaatgtggccacaaccatggctcatcattatgatcatcatggatatttagacggttcaaacttgatgagatcattaggaagtagcatttcattgtcatcatcaaatattaaaggcgtcgaaaatggtggtctgactagggattttctaggatcgggatcaggggtagtaatggcccaaaggaaactcttgtcacataattcctgtggttcatcagctatgggattgagccaattcagtggcaaccactgatcgatggtatactgtttatatgtgatgatgatggtttttgtggatatgtacatgtgaactcagtggggtgcgaagatcaatatatcatgaagaaatgaaatggaaaatgtgaccatctcaggctgcagaagcaggaggccggggccacccaaagaaaaaacatttgaatatgtcagaagtgacggaacgaagagtgaactacgagtcaattatatacatttatgtctatcattaatatttattcattatttgtcttcctttgttgttatccttcgtgttgtttagtcttttgtctttgaatcacttatccttttcctctatagaatttttcttttcgcgctttcttcattaagcacagaaaactacatcacgataacgataacgtgacacgtaatgcctatatatagttgaccgtatgcaaaagttatttttgagctactaaataagtaaattattaataaaaataaaaccatatatatttttttattggtgttataatttaatatatttgagatccaatagtcttactctaaacttataagaaatgcatatatgcatgtgtccctacttaaaagcctgctgcaataatattctaataaaaaagtattaatgtaactcatatagtttagttagattattataatgaccggcctagcgatcaatatatatgaaaaatatgatcagtcaaaaaaaaaaaaaaaaaaaaaaaattaggccaaaacatcaagatgattaatacgtatacattgtgcggatcctattcctacttattattttgatatataagattgtaattaaataattccaattgttttaaactttatatcttatatagaataataaaaggattatttgaaatattatttaagctaatgttgtatttcttacttgatggaattccaattggttcagtcgatctgaaaagctcgcggggtgaggtaaaagaagtattgagaaaaattaggctattgtagatatcatactaacaatctcatttttttactatttatttttcctctgtatgtaggtcttttatcctgaatgagttttcacagtgtcagtgagtgttctttattttcttatctactacttaattaatatatttagattttattaaagagaaaaaaaatctatcatttcaccttatattctgcatacgtatatggttaattttcacatattctaactgaaattaaaat

SEQ ID NO: 194066 - DNA, 1029 bp, Cannabis indica
gtagaaaacatgaagaccctctttggtttaatctgaagttttaactgatgtcaactatctaagacaataattttaagggcattttttttcctttcaagggcaatataattttggactcctgccttgaattagatcaatatgttactatggccataaacagtatggagaattcctatgttgaatgctaattagttaactatgatcatatatgatgctttactcaaattccaagataattaggaatgtggaaatcactactcataaagagacaaccatatactttaaaagatcaccccaaaactaactgtattttgtaaaaatgtcaatcttaaccatacaacctttgataaaaatttgctgaccttaagcttcttaagcagctcagagagcttgtccactaatttctcaacctcttgtatctacaatcacagaaacaaatttaaggatctgcttgtgtaacaaaaaggaaaggaaatttattagaaagctcaatgttacacagacataaatatgaacaaaacgatatgaataggagcaagaaagacctgtttattgaaagtctccattccaatatcagcattattccgttgaacttgcctccccatttctatatcattttctccagaaggctggccttttggcatcagaaacgaatgaatcctaaagcgaagcaaaattacaaaaaatgaaaaacataacacattagctgaaaaaatacaatcaaaattttgatccaataagaaggccactagagagtaaaaaccaacattatgcagcttatcaaaactaaattaatttcaggtgaactaattagaatacattccctttctaaaaaaagaaagaagaaagagaattcattgattttaacattgttacatacaaaagatgagcataaacttgcaaagcagaatcagtttagctgccaaatttctttttacagaactatatatgcttcagtttaaaatgttttgtgggaccaaagaatatccatgatacgattcttctcagtgtgtcagttatattaaattt

SEQ ID NO: 194067 - DNA, 2729 bp, Cannabis indica
aacattagagagtgaagactgaaaaacaagggagatatacctgatagggtatccttcaaatttccgtttggtacatactcatagaccaacatgtgttcatctttagctaaacaaaatcccaggagtcgtacaagatttttgtgatgaaccgtcgaaagaagttctatctcagttttaaactcgattccaccctgcagggaccctttcttagctcttttgatagctaccagttctccggttggaagagttccacgataaacctgcaaaaagattcaaacattttgttgctgtgccaaattattttgtaccataacaatatgagtaaagctaacctttccataacccccagatccaatttcattttctgctgagaatttgttggtgcatttcttaagctcgttaaaattaaaccacctcgcccctttcaactgaggaatacttccactgctagatgctgcttcccaaaaccctgcattcagatcacataatgtgttcaacatttcatataatacaaatacataattgaaaaagatctaaaattctttccatatgttttacttgtggcattcttagtaagagtgcctgttcctgttcctgctcgcctcttacggaagaaacggtacgctcccacaaatagtaatagcacaaggacagaaacaccagctgctactccaatgtcaatagcaatcctcgaccattttgattctttaatcacttctgtaccaaagtccacattagagtaagatgatgaaagttgtaaacagagttaagaaaatatgtgaagctgcagttttgagttggcctttctgttaaaagatcacctgcactgcttccatatctttcactaataaaatagaatggtctgtaaggtccagggagcatgtaattgatagcatcgctgatactgaaaatgtcgatttgactgaaatgatcctggctttttgggaagaaagataggtttacttgaaagtaaccacaattgttgatagtggggttacttagagaaacactatctacaggaggtggtttggacataaaatatttcatcaaagatttctcaatgtccatatagcgtgatgtgtttcccaagtctaagaaggtaatagctgtgaaaatgagagttcctttgaatggaatagcacatcgacaattggggctggaaatctgattagaatcacaaggactgggggaacaattgttaatctctgtgacatatgagctatcaggttcagaagctgagctggtgctgcagtaacttgcagttgtaccggtgtcccgacaaattggattgtccttaagtctgcgggggaagttaaatattaaaagctaaaaaacattagtagacttcatgaagcagcgaaagaagaacggagaagtgcagtagtttacaagatctgaacatcatgttcttcatcaccctcattatcattaatgtcagtgatgttattccaacgtagatcgatgagcttaaggtccctgttgtaggagctgctaatatctaatgttccaccgagcttgttgttctttagtttcctgttatttatggacaaacataggcctaatgatcatctgtactatttggaagaagaatatatgtatacatgtacagatgagctcatcatgataagttgtattatagatttatcactagatgttcttataatgatactcacactgtcactaacttgcgaaggctgaatagctctggcggaattactcctgtaagttgtgtgttgtccattgatctgccacaaagattacaagttgggaaagtattaaggtcaaaattatttagttgataaaatatgaaagtatgatgagaagatgagagggaataatgttattgaattgtgactcacaagatagataaattagtaacatttgctagtgtggaaggatagtgccaccaagtttgttaccgtccaaaagcctggaaaatgatatgaattagtacatttacgaaaaaactactcactgtagcttttttgttaatgaaatgacaacattatagatttataaaagaacaaattcgaacacaatgtttgttaatcttacaagtgttgcaaactcatatttgagctgaaaagttcctcaggaattgggccagtgagattattctctccaagatggctgatgaggaggatagcatacattacatatataatttcaaatattcaatcatactatatagttagaaaatgaaatggaaaaatgttatatccagaaatgtattttgggtatatattaagaagagcatacaagtgctgacaaaggtagagcatgtcaagaccaagaccatcttgagtagagactgggataggtccctcaatgttattggctgtgatatctagccacgtcagtttggaaagattaccaatggaagccggaattgaacccttgaagtaattagagtttagagatctgcatttcccaaaaaaattgtaaggaaattgaatattacaaatactataaaggacaaaacaaacagttcattacatttgacagttaaatttaatggaaaattctgatagtaggttgtagtaccacttttgtctttattggtaggagtatgtttatttttggtatttttttatggatattattttttttgaaaaatttacatttggtattttaagttgcatctaatttataattttaacgttaatctttttactaccgtgtattttaacgaggaaattacgtaaaatattggattttttttttttttt

SEQ ID NO: 194068 - DNA, 2761 bp, Cannabis indica
ggagctcctctagggatccaaggatcctcattgatcctaactttggaaccattcccaattatccagcggtatcctttaagtaacaaatcccttccccataataatccccgccatatattagatccgaagtgtcccatcttggcctctaagaaatttttgttgggaaagtagagtgctttcaagactctagccataagacaatcgggattggtcactattttccatccttgttttgctaaaagcgcttgattaaaatcctctaaggctctaaaacccatacccccattctctttgagtttacacattttttcccaacatccccaatgtattttatgcttctttgagttcgctccccaccaaaaccgagcaatcatgctttctatgtcatgaaggatgccttttgaaatacgaaagcaactcataacatagcaaggtaacgcttgaatcacggctttgattaatatctcctttcccgcttgagagaaaagtcccattttccaaccttggagcttagcttccaccttatctcgaatcttcccaaagacctctttttatttttccccacaaaagtcggcatgcctaaatattttgtatgatgcttcacaaggtgaaccccgagataggtggctaaagaattggccatgtcctctttaatcttccctcccacacataaattagacttctctaagttaatggtctgacccgatatggcagaatagcagtccaacacttctttaagagctttgctttcctcaatgttggcattcaagaagacgaggctatcgtccgcaaagaggaggtgggatagattatgttccatgttaccaaaccgcagcccgtgtattttttcggctctctccgtctcatgcaaaagacaagttaatccttcagaacacaataagaataagaaaggagaaagggggtcaccttgccttaaccccctttcgggtataaaatgaccatgaattgaaccatttattaaaactgaaaatgacacagaacggacacaattcattaccttagagatccagagctcatcatagccgaggcaagccatcatggtttccaagaaattccattccaccctatcgtaggcttttgacatgtcaagcttgagggccatttttttcccattgccaaatctcccttttctcatgcagtggagactttcgaaaccaatgatagcattgtcatggatgattcggtcaccaatgaaagcgctttgattcggagatattgcattattgagagtaggcttcattcggttggcaaggcatttcgacaccactttgtacaccacgttgcataagctaatgggccggaattcagacattgttgtaggtcgtttggtcttaggtataaggcaaataagagtctcattaatacttccacaatcggcttggttgttgagaatatcaaggcatgccttagtgacttaattgcccactaactcccaatgtttttggaaaaacaaacccggtaggccatctttttcgggggctttcaatggatgaatttgaaacatggctaacttcacatcttgttcattaaatggtttgaggagtgaactattttcttcgctactaattcggttaggaacacaattgacaaggatatcccttagctcaacaccatggttcgactttgtgaatagctctttgaaataactaattgcaatttcagcaattttctccaaactagtctgccaatgcaaccggttatcatataggccttcaatggtattttttcgtcttctttgggaagctttgtagtggaaaaatttggtgtttctatctccgtgttttagccaaagtgcccgactcctttgtttccaatacatttcttgtttgtcttccatacacttgagatcattctccaatttcttcatggtgagccaatcggattgacaggaagatttagacagcccctcaattttatcttttatctctttacttctcttgttgaggtcttgtttttgcttcctattccacccatggagcttctccccacagctttgcaagagtgcagtaagttttgacaatggttcggctgggatggcattattccaaaccttgtggataatttcttgacactctttgttatcctcccaagcttgctcatagtgaaatcgaggacctcttgaacacctacccccacggtttggatggttgagatgagccgttataaccaaaggccgatgatctgaatttctccaatccaaaagtctaaccaagtttatcttaaatttgtccatccaatctgaattacaaagaactcgatctagtttttcaaacacaagattcgctactcgaccattgcaccatgtaaaacttcctccctcagcaggaatttccttcaggaaacaatccgaaatagctcttctaaaattagacataaggtaggccggtttaacatttccccctttcttttcggacttctttgtaatctcgttgaagtcacctccacaaacccaagcgcccttatacatcggttgtaacctctttagtaatttccaactttcttttcgaacccccgaatccggacttccataaaaacccgtgaaacgccacatgaaacccaagtcattctccactaaggcatcaatatgagaaaccgtaaaagacttaatctgaactttaaacaaatttgtccaaagcagagccaatccgccgcttttccctttagcattaacagaaaagcaaccttcgtaaccaagctgaacacgaataaattccatagcagcacttgaaagacgagtttc

SEQ ID NO: 194069 - DNA, 3514 bp, Cannabis indica
aaaggatggattattcaaactcgaaaaggaagatatcgataccatatgcaaattaactgaaggtatggataatcttctccacactccactactttgtggtttctgtccacaatttcttacttggtactttgaatttcaggttattcaggatcagacatgaagaacttggttaaggatgcttcaatggggccactgagagaggctttgaaacaaggcatagaaattacaaagctgaaaaaggaggatatgagaccagtaacactgaaggtaaaacagtaactaactcattagtttcaccactttagtaatttatttgaaaaagtttgggaacttatttttgttggtattacaggactttgaacaagcattgcaagaggttcggccatccgtttccttgaatgaacttggtacctatgagaaatggaacaaccaatttggaagcttgtccctctaatgcaatcacactcagactcaatataataagaccaaaaaaaaaacaaaaaaagaaaataatattgtaataatatcattttatagatttacatgttctttctttcttctttaaaaaaaccatattgtaaagtggcaggcctactattaggtctttaggtgtccaattcaatagtaatggcagttgcaaaaaattgattgatccatcaactgcctctggaattagattcgtggtcctctctttaattaattatatatgaggtgaattctcatacttctttccttcccatcccaacaaatattattattaaacaaactaattaaaataaaaaagaaagaaagaacatgtgaaactacatcgttccaaacaagcatgtgcaatattagtattctgaccaggatttattagaacaagctttatggtttattatgtttttcattttgatgataaagatccgagaaagttgctggaataaaaagctataatatgttatgtatacaatttttagctgtatgatttgttggtcgtacacaatggtttcttttcttttctttttcaactattgatttttgatgattatacaacaaccaaaaaaaaaagagaggcatgtggcatgttatgccatccaacaaggtttaatttaaacaaaaaagaaagaaagaaagaaccattgaccttactattttaatgctttttttgtttttagattttttttcccttctttctttccaatcttagtcagtctctcttcctaaccaaaacctttaatcctccggccatgtgagccgtcagtaacggaacaaaaccggtctggtcgaaccggttaccggtctgatcttgaatcttctgagaattgaagccaccacatatttcatctgaatgaatgccatttctttaccaagacaaactcttggaccagcatgaaagactggaaacttaaaagggcataccttcttgagattccctcctgtttctttctttggttcaagaaaccacctgtctggtttaaactccaacctgtcttttccccataaagcttccattcttcccatcccataagggaaataagtcactctatcacctgccttcacatgagttttgtcaggcaacaaatcatcttttatggcatgttttgagtcccaaggtaccggtggataaagcctcatggactcacaaatacaagcctctaacatctttaatttcttcaaacattcataacccaacttattactttcttcattaccaatagtttcaatctctttcaccacttgtttctcagcttcagggtgacaagaaagtgaccaaaatagccatgtcattgcagccgaagttgtgtccctcccagccatgatgaaacttatcaccatatctctaatcacctcctcatcatgtccagccattataagcctagtcaaaagatcttgatcatcatcatcaccaccaccatcttcaccgttgattttgctcttcctttgatgaattatatccataacaaaatgatgaacttcctcaacagcagccttcaacttcttctccgaaccaacaccaaaccatctcttaattttccatactataaacaaaggcgcagcaccacggcgtgcgcatatctcagaagcagcatcaaacgcgcgcgcaagtggtgacactggcacaacacaagggtccaaactacacctatcaataccaagtgaaactttgcatataacattaaaagcaaaacgtctcaacaaatcttgtaagtccacaactcctctgttttcctctgccaaagattcaaacaaaggcaataaacaattctcaacctcatcctccaaagtgttcataacatattcttgtaaagactttgtactaaactcatgacttgcaagctttctttgagtcttccatagctccccatctacattaaatatcccatagccaagaaaatctccaagaatttcagtaaagggtcttccttttgggaaattattgaagttggctcttaacatatactcaacattttcagggttggctgtcactatggtccgccgagcaccaagcctttgaaccactatggtatttgttggtgacccttctaaaagctcagtataccaatcaagcaaccgagtcttatttttgtagaatgaaaccaaacaccccaataccggataacacggcgggctgccgccaccaccgccactgctgccgcctccttttccggtgagtactcgccggagatgacatagtatttggtgtattaagtagaacaacactactaaaaccaaaagaaacggtagtaatggttgatcaagtaagagagacatggataataacattacactgctcattataattatgacatgaaaaaaatgaaattttgaaatggtctttttattataaaaattaaaaccaaacaaacaatcaacttggattgatgttggcgttttatgcttttggttttggacacttgacacaatagtatttttatcaagttctttctaagaggggtttgtaataataatttaatgaagagaccatatttataataattaacaacaacaacaataataataataataataatagtctcatttatgatagattgcttagatttgtacctatttatatatatagataaatattaattgttaattaacaaaggtttgttaatttattataatttaaacaaagtctctctgcagttgttgttgtacacaagtcggtgcattatattccaaatttccaatcatggaagaacatgctatgctactactatacatacattatacatacatgtacatatatatatgtgtgtgaattgaatatatatgcacccatcaatattttttttagagtttattttttcttcaaaaggaaaaaaataaagtaaaagaatacttcagagaaacaaaaagattggttaacagatcctggattttatttcatttttgactaattataagatcttattaatttaatttttttctacttattttagggttgcaaatttgatctgattaaaggaatgatacgtttgacttattaccaagctgtacctagtttttttatttttttattttttta

SEQ ID NO: 194070 - DNA, 2350 bp, Cannabis indica
gaaactttatgtagacaaaactattgtgaatagagttaaaagcaagttgggctttgaagcttgctattctgtggatggtataggcagatcgggtgggcttgccatcttttggaagaatgctaatgaagcccatcttctcaactatacccaaaaccacataagccttgaagtccatgtgcctaatctttctccttggcgcctcactggtttctatggtgagcctaaccgtagtcttcacgctcgtacctggaacctcatccgaaccattaactctgagtcccaactcccatggagtgtaataggtgactttaacaatattgccagcagcgacgaaaaaaagggtgggcggccgtatccaacttctctcattcagggattccaagatgtcttccatgattgccaactccacgacctggaactcagaggctatccgtatacatgggaaagaggaagacaatctggccacttagtcgaaattcgtctggatggatccttggtttctcagaggtagctcgatttcttccctgaggtaattctctcaaatcttgcaatctcctcttcaaatcattctccaatttatttgaatcccatccctgctagcttccgtggccctgtatactcactttcgttttgagaatgtctggacccgtgagcccatgtgtgcagagatagttcgtgattgctggaacataatacaatcttagcttatctgaaaaaatcaatctttgcagcataaacttgtcaaaatgggacaaaactcttaccagcaatttcaaggcaagactgaatgacagtaaaaaaaagatggcaactctgaaaatgtctactgatgcaaactcagtcacctattttgaggtcgagaaagttaattattttgaaattttggctcaaaaggaagtctattagaagcaacgatccaaacaacactgcttaattcaagggatacaaacaacaagtattttcatagtattgccagttctcggaagagaaacaatcagatttgacaattcaaagacacaaatggtaattggcaaaactgggattcgggtcttgaaagggttgtagctgattattttactgatctgtacggagctcaatgtcttgctcaaaactccattactaatggtatatcctgatcaataaacagtgatcaaaatgaggatcttctaaagcctgttacaaccgatgaagtccgtactgcgttatttcaaatgcacctcgataaagccccagacctgacggaatgaacccaaggtttttccaaaaacattggcacattgtaggggctgacattgcatccttggtaactgagttctttatgacagggatccttccccctgacttaaatctcacctaccttgtattgatacccaaaaagaagaattttatggctatgagcgacctctgccccattgctctttgcaacgtcatttacaaagtggtctctaaagttcttgccaaccggatgtgcaacattattgatcagataatttccactactcaaagtgcttttatccctggtagacttatatctgacaatgtaatggtggcgtttgaagtcatgcactatcttaagaggaagacaaaaggaaaaaaaaggctatatggccatcaaactcgacatgagcaaagcctaagatcgcgtggaatgggattatcttcgggaagttatgatccgtatggggtttcactctcattggattgatttggttatgcactgtgtgtccacggttcgatacaatgttattcatgatggtcatgttatcggtcctatcaatcccattagagatatttgtcaaggcgaccccctttcaacttacttatttatcatctgtgcagaagagctttcatctcttatccaacaatatgaaactaattggatcattcatggctgtcgtgtatctcgtggggatcccccaatcactcacatgttatttgccgatgacagctaccttttttgccaagctactaatggtgcagctgaaaatgtcatgtctcttcttcattcttttgagcaagcttctggtcaacaagtaaatgttgctaagtcctctatctttttcaaccccaacattgataaccaaagtcatctcttatttgcttgactctccaaatgtctgaagctgatgaaggtagcctttatttaggtttgcctaacatcattggaaggaacaaatctgttatttttggtttcctaaagaacaaggtcatggctcgtatgaatagttgggaaggcaaatttctttcaagagctggcaaagagattcttctcaaaacagtaattcagtcgctacctacttatgctatgagtgtattcctcattcctattggtaattgcgaggagctcgag

SEQ ID NO: 194071 - DNA, 962 bp, Cannabis indica
aagaaataggaacaacactgcaaagccatgttttttaattataatgtatccaccatgttttaggttcccatatacttcatttcttctgtagcaaaagaattactagctttcacaaatgtcatacctgagtggctgtgcactgagagacaagaaaaggtaaatattcttctgtctaactagtcacaatttgtatggaggctttatataattgagaggatgtgaactaagaaactaaacactgaacttattctgaatttgattattcagctgttttctggtgagccatcgtttgcccatgcagagctcataaagcagaaaaagcttcacgtgtttccagccatttattcacctgaattattgtaagctaagttattctcattttcgttctcttcttatttagttgttcgtctggatattcttctattatgtgtataatatatatatattatatattatttaagcgaacttgaaaagattcaatcggcaccatagacatgtgttatatatatgatttaccaactttttcaaaagactacttagttgggaaagataaggaagtacacacatcattttgtggtttcaaggttcactttggtttataaattattttaactattacttattttcattccattgaaattttcgtcttgtgtatagaatgaattggcaggaaccatgcgcagtattttgtcctaattggagtttacgactcggtccggttgttcacttgcttcagcgatggtgcattgatcgaaattctctacttgttcttgaggttctaatcttaatgatttttcttttaatttccctttgtacttttttggggttgatcaatcatgcacaatgcaaaattgtcttattgcagaatggaattgatgctcagctggctctttcaccttataagcccatggaaatgaaggttcttcagtgcttcatttttctctggaataaggtagtgtact

SEQ ID NO: 194072 - DNA, 941 bp, Cannabis indica
tcacagagtatgtagcctttgctgtattgactaagggtttttctttttcttatttgtaagtcctgtgcacaagcttgggttgaattaaagttctaaggcttattatttgcaggttaacctagagtacctcggtagagttgtgttcaacagaggtggcttgctttatcctgacagtgtcgttggaacagattcacacacgacaatgattgatggattgggtgttgctggctggggagttggagggatagaagcagaagccacaatgcttggacaggtaaggactgttaactttaacaatcgtgttacttgcatgtcattgatatagggttgcatcatgagatccccgcagcaaatgtgtataaatatttgttgtgttatatgtttcatggtatttgctgttctgcatttactttcacaagcattatttcaacatatattaactcatcttatcatttgaacagccaatgagcatggtgttgcctggtgtggtagggtttaaattaaaaggaaagctgagggatggtgtgacagccacagacttggttttgacagtaacccaaacgctgaggaagcacggggttgtgggaaagtttgtggaattttatggtaaacatatttgtctattttctctatgcttagttttctgcagctgcaatttcattagatgattcattttagtttctttattgctatttcaggggaaggcatgagtgagttgtctttagcagatcgtgcaactattgctaacatgtctcctgagtatggtgcaaccatgggcttctttcctgtggatcatataactttgcaatatctgagactgaccggaagaagtgacgataccgtatgctctttttttaaaaggaaatataagagttcattttatgaaatgttttgtttcttcactccctgatgtgttgtcttttgtgcagattgctatgata

SEQ ID NO: 194073 - DNA, 2853 bp, Cannabis indica
cagcagccactatattatctagcgaaacaatcttattattctaaaccagctcattacgagctccccacattgcccaacacaccataaccaccatgcaccttttatcctcattcattcctaacaatgaaaatctttgcctagatactttttttccctgtttttaattcaatatctttaaatatatatatataatttcccaaaaattaaacaagttagtgtgtatattttgtttgattagttttcatttaatttttttaatttttttaaaaattaatttaatctaatttatttggttcaataattaaaaacatgactattttaattttggtcatatttaaaattgatgataattaaatttcgagtgcttctttaatttattttgtaaaataaaaggttctaattataacttatagaaacagttttataagaaaatacattcgagtaaaaaataatagagtcaaaaatgttattataaaattttacatagggacatttcatcgaacagttggtcttcacagcgctagaaaaataatctgtgggctttcgttgttctgctaaacgcgattgagagtacttgtggcagccatggctgcttgcaagacccggacaagcagcttctctcgcaatttttcagccgcttcatcttctcaaactcctggtcttaaacatggtccaaatggcacaaccttcatctcgtccggaataccagaccttgatagtaatattctattgattgcataatgtccaatttaagcattaaagtttcttcttgtctattaaatcttatgatttatttgttttgtaactttttttttctttttttttttctaaaatgtacagagattttaggtggtgggtttcctttaggaagcctagttatggtgatggaagatgcagaagcaccacatcatatgcttttgttgagaaatttcatgtctcaaggccttgtccacaaccaacctcttctctatgctagtccttctaaagaccctagaggatttctgggtactttacctagccctggttcttccaaagacagcaagtctagtaagcgtgagtctgaacaggttaaggttctttccttttcttattcaatttcatttggttggtatttggtgtgaaaactaatagctcgctagttctcttggaaaaacttcaggagaaaggactgaggatagcttggcagtacaaaaagtattttgatgaaaatcagcataacttagatagtaataggggtaagtatgattttagttaaattatcttgtttcattggttttcaaaatctatttgtctaatgagaactgtgacttgagctgaatagatagttcaacaacgaggcatcatttttgtgcaatatgatgatgttttggattgtttttagatagtaaacaagagttttgcaatgaatttgacttacggaaacccatggagagacaatttttgaatggaaagcagatagattgtgtcagcacccaagatgctccgaatctagttgcgcttcaagatcgctgtgctgcattcttatctcaactttcaaggttggtcatttatgtttttctggcagaaaatcaaagttatctggtagtacccaagtcttgttttcgaagttatttttatttgagctgcattgtgagattggtgaactagcgttttatttgtattatagggaaaatgtgttgtgtactcttgctgaagatgcaggcttagtgaaacttaaggccacttttgtgtgtttgtaacaatcctttgatggtgtactatgtagcttcctataggttacccaggagactgcctacttctaaactttcttttaatatttaatgttacttaagaaataatgattgctggtgtgtatgctcttttaatattattctctgtttcttattagcttttagtattgtgcccagaaagagtgtgtgagcaatattattttgagctgaatgaaaaacaattcatataggcaaaacgtgagtgttactgtggtatccttattttagtttggaacattaacattttccttttgcttttggtttgctccattctagaaacgatggcaatgtttctgttgctggtcgcattgcagttcagtcattttgtgctccacagtgtgtatcttccaccatggttagtggcaattacagtactctctttggttgtcgattcagtagttctttgcttagccttaaattttattgagtttttgtaagttaatggatgttctttctgaattcaaaatatattcttcttttattgttattcaaagacaattcttgtttagggtaccttattattcgtactgttggcattcaggaatgggacatgctttcctttattagatctttaaaagggatggtgcggtcttcaaatgcagtggctgttgtgacgttcccatcgactcttctttcaccatctacatccaaacggttgcagcacatgtcagacaccttgctatctgtcaaagcaattccaggtctataatcagcttttacatctgctttgccctcttaatagctctaaaatagtaactcttagatgaataactgattcagatgaagacaaggaattggcaaaacttctcaccggttaccaagacatggttggcctgcttaatgtgcacaaagttgctcgttttaatacacaggtacagtaaaatgtgcttcatcataaattgatgtctttttagtcacactttgagcctttcttttatattcagtgcttctagtgcacatgatgatgtgttcatgcatacatgtagtaaagcaccaatccgttcacttggttttctgtaatttttggtgctcaaccttcttgatttagttcacttttcggattgacaagaagaaccctgttacc

SEQ ID NO: 194074 - DNA, 2133 bp, Cannabis indica
gtttcaaactcttctaaaatttgtacagttaatgggtcatcgggttcaatattcaaaacactctttaccataacactcagtgtcatctgcatccaaaataattaattaatatatatatatgttatatataaaagcagatttagttttgtcacgtaataaatcttttagcttaatatgaaaggtgagtgttcattaattaatactatatatgtacatacccttttagcttctttaaagaaggaaacttgtgtacggtcattccaggatttgagcatggaaatgaccaaattgtcaacacatgcaaggaatttgggttgagacttagatgagttgatgaatcttacaataatgttcctcaacttcttgtgaacatctcctgacacaacaagtaaagaatatttgccaagaataccatgcattgactttggataatgtgcttcgaatagtttctcttcattttgaagaataaacatgtttagctcaacatcacatgaaactatagcccctgaaccaaataaatgtgatttgaacacctttccatacctgcatacatatcatataattataagtacagacaaattaattaattaattaattaagaaattatgatgatatatatatatatatatatatacgtaccttaggcaacgatcttggagaaagaacccaaagagttagaattgtgaggctttagaaaagcaagagtctcaacaaaaaaaggaaagccatcccattgtaccagctggtaagttttgaggttttgtaggtaaaaatattcatgagaataagaagaagaagaagagaacccattacgccaaaatcatggttataaataatattgtactgctgtaactactactcatcatcatcatatcattaataaaattggcttcaacaatatcggtttacttgtactcaaaatgtacatatatgcacaagcttttttccaatgactacttggatatatgtatttatatatatatcgactggtagtacttatatatatacatagttcagtacagcttataattaattaattaatttataattatgtatatagtttaatacttttgaatttttaaatatatttgactcttgtgacaaaatgacaaattaataagatatgtgtgccactttcttgctcccttgtccattgtcatgactgcaccccggtgaatatatatatatataaataatacataacaatcaatgaaataatgagattaaattaattaaaacgtttttaaattttcttgtacaatatatatatgtgtaaatttaaattaatgccaaatccatgcatcatacgaagttatcattactaaaattgtgtaataagtgttaataaaatagtttgcaacatggaacgaaagttaataaatatatcaaatttatattttcccatacctaattactactttattaattcatatattattattacatatttttgcgtcaaatattctcaccaaagctaaattctgagaaggtagctacaaatactaaaataaataaataattaataatgtggacatatgcatgagtctcaaatcatattcccttagtctagtcatggtcgtatacaattaataacaataggtttcctaaagcaataacaataaagagggaacacaaacacactagacactacttttgaaaataatattatataagagttttcattatagagcgcctagtattctattgctctgtaatattattattggtttaatttaatattgagtctcaaatatattttacaatttttattaaagaaaatcgctaaccaaattatagagagacacttcataatagtgttaagcaccttggtacctcgtaataatatttttgctattaaagcaactctaatagaagtatatattttggtgcttattggactcgatatatataaataattttttttatttaagttatatacataaaaaaaattaagtttgtatacttatgccaatggatggcaaatttttcctgtctttctctataaaataatattattttataaaaacatacaatataactatattttttaattggaattttaggtcttttgatatttaaatgtatcaaatactaatcaactacaaaaaacctgtctaactttttagtgattaa

SEQ ID NO: 194075 - DNA, 2795 bp, Cannabis indica
atccatcctgacattgtttcttatccttttctttaaaagttcggtatcatatggatgaggatccaaaaacactcaaggtgtttccaattccacttcatgattcaaatggtgttactttgcactatgaccgccttagtgtatctcctgatggaaatatattggcagctacccatggctcgacattgcagtggttatgtgttgaaactggaaaagttttagacactgctgagaaggctcatgatggtatgcttcatttttacgcaaactatatcgctagcatagcatatcataagcacttaattcacttttattggatattgtctcttcagttatgtccaccaccatcaagatgttatctaagctttggaagattaaccacttctgaatccttactgcatttttcttctcatgcaggtgacataacttgcatttcatgggcacccaagaacatttcaacgggtaacctaccttctactgaaatgtttacttattttctttacattgtgtatgtttgagcagaggaaatagagcaagggattaaaaattgaaatcaaccgaaatcatctgttaagatgttcttttgacattaagaaactacatgagaatctacctggagaaaccgtccatgtgcgacccttacctgtgtataacacttgaagaaataagaaaaagggactgaaatttactattgtccttgcccaaaaaatataaatttgtcaatgttcttaccaaaataagctaactttagtaatgcttaaaatatggaaaccattttgaacggtcccagtattaccagtaattcttgttctttagaatataagggataccgtgttaaatgttaattgcttggtaagttgccagttagttgtcatagtagctgaactcaacgtacatgaacatatttgatattcgtgatatacttcttcattttgtctaaccattttttcttacaggtgatggggaagcatcgcttttagccacagcgagtgttgataagaaggtgaagctgtgggcagctccaccgctctcttcataaggcaatctgctggttagtggaaatagaagctttgacatgacgagctgctgatcttgacattgtggtcatctttaaggatacgttctcacctttgttccttgtaggttaaagagctttaacaaaatcatgagaagttccagacatatgccattgccatcggagcctcggagctagaaactctttcgttttactctaggattggagtgagagtactatgtttcacttggctagcccctttttaactgggattttggtgacttatttaatagagttgagagtaatggatttgctgtttcagcgtgggacctagatgatctgttgatgcaaaaatctgtatcagtttttgagggaacatggggtgatgacttccattccatgattaattatagtacttatatatttaaagattttggttatttattcatcatggaagattagtttgttaacctttgcattcataatgagcgtcacagtgaaactaattgtgtaagcaactcatgtctaaaatttgcttcggttgggggcttgttgagtagcgaaaaggggaaacaaatatcaattaaattggtcggataatatgaaccaagtaatagtatgatggttgattctttttttcgatttggtatagatagttgatttgagcggaaataaaaatactaactaatgataacgtaaatttgatgcaacacagttagacaaagtatggaaaaaagaagaaagtttccaaataaaagtacgaaaaaatgtatactatgctagctaatcttgatgtccacaatacatggtcacacaaaggaattccaaaaatgtggagatgcggggtatcgatccccgtacctctcgcatgctaagcgagcgctctaccatctgagctacatccccatttgatgataatcttttataaataaaataatattctcatccaaaaagagaaatgagccccacatctacacgaatcatcctgtaacaaaaatgataatacaattatttgttacttttatttttttaaaggaaaataaaaatttatatgataggtaaattagatattgtccattacatgcacatattacttattaaggaaactcaataataataggctaaccaagccatttacaataattatgaaaaaaaaaaactaacatcttcaactaaatgattcagaagttgcaagttgtgaatcattaaaaaaagtgtgaagaatgctaaatttgtcatcctaaatggacatgtgacaaatcacacctaataataactatcagtcaaagatctttcaataaaattttggtaaagacaccccaagtattcaaacaagaataaaggagaataacaaaactaaccatactaagaacaaacataataaaagatcgatctaaagaacaagatattaatagcaatccaagaatccctatatctgaccaccaagaagataaaccttactcaaaataacaattactactcccattgaaataatgggatggtgacaaacaaccattattaaaatcaataaagtagataatcactaaaaaataaaatagggaaatagaaacgcaaaagaagattaatggaataaccaaccaccaacacattagactttggggtcacaaccaatctcgaaggccaccagaactagccaaagtcaatccccgtgatacctaccccacactaaattcgaccaaagtcaatcccaacgaccaccgaacggaaaccccaaaatttattgacaaaaagcgtcgatactccattagaaaacttcttcgaa

SEQ ID NO: 194076 - DNA, 1669 bp, Cannabis indica
atattaatattattacatagttataataaatttaaacgtacacatgccataatatattcatatatattacaggaatatatacaagctgtatatataataatgtgatatatgtaaagctggaacattaattattgctgtcatgatatattttcaagtgatgatgagaatcttatacgtcattattagcacaagtagttttgatgtctttctttgtactcttcttcatccattgtatcacaaagtacacctccttttgtctccggaagacaaaccacaaacaatccaaaacaaattatcaccacaccaaacactccatacgacacaaacccatctcctctaccggccgccgccaacaccggactgaacactccgcccagcactagtgcctgtctaaccatcgaaaccgccgagttacggacacaagtagggaacaactctagtgtaaaaattagcaaaatattgaatgccgagcatgcactgaaaaacgacaccaattctaacccaatttgtattgtcgtatagctctttactccttttactactgacattatactacaaatcccactaaggattgtgtagaacaaaattgaagttcggcggttaagctttgatacgaatagaaaagctataagtgaagctggaagctcagacaaggcgttgaaagttacacttaagtagagattgaaagctaagtttccaagagctaaaggcatgccgtaataaaccaacccgatcccgaatccgatcgccataacggctgagagtcgccgaagggcccattttttctctatcaaaattttgattgctgagtaaagatcaacattccatgtttcttcttcaataagcaagtatgaaaagctcatggtgaagctttcatggtttgctttagccattgtttttagggttccgacggcttcttcttttcggcctttgatgaacaaccatcttggagattcaagaacaaagtagtgaacaagtaaagagtagaagattgtaggaatagatgtccataagtacagatttctccatgttgaaccaatgtttaaataagcaagagtgggtaaagatagaaaccctaacgtgaagcacaagaaacctatgataccaacttgagctcgccatttcttgccaaccaactcggttgacagaacaagcgcggacgtgcctatagtagcacggccgaagccactgattagtcgcaacgcggagtatgtccagacgttggtggctaaagcagtaaggagtgtggacatagccatagcaacacaagtaagggaaagcatcttcttcctaccaagggaagaatccgcaagagtggcaagcacaaggccgccgataaggcaccccacgaagaaggccgaggcgggcatgccggtaattatggatcctgcacactgtaagccccattcggatatggtggaggtgtgctcaggcaaatcccaagcccatgaattcgtgggaaggtggcaaagatcagagattggattattgcatgatgatgaaatgttggtattacaatgccacattggctgagcgtctgcgaagactgagatgaatgtttgttgagcatcaaagaaccatgcaaaagagacaacgatggcttggagaaattgagcccagcaaaattttccgatgcagttttcaatggttgaatccaatgatggaagat

SEQ ID NO: 194077 - DNA, 676 bp, Cannabis indica
agagatatccttttttggaaagcttcaaagttgggagttttctatgaatagcgcttactgagtgagccaagcaagaagatttcatacccctaacttggtcttgaagaagctctagaagcatcaaaatcatattagacagttgttccatattttgaaattccttgcggatttccttcctactcgtaacagagtgggttttcttccttcgaatgagagttattgtgtgttctgtaagatcgaagtagagactatttttcatttgtttggtaaatgtaatctcatccgtggcatttgatataaaagtgaatgggggttgagaattgatgagcttggttcgaatggtcttttggttttggaaggtggtggatcgatatcaaagattcgaatcttaagttgtttggggcttatgtttatgagattgcttggaagtggagaaatgatattattcactcccgaaagtcatgggatcttataactatttttttggactactttaagaaattgaatgaatttgttggcacttttggaggtgtgacagatgttgttaatctaaatgtttgtcctattggtagctacctggactctactactgaagcattctggtttggatgatggagaggattgttggtgtctccaactagaggcctcagttgacaagttagaagctggtatagcc

SEQ ID NO: 194078 - DNA, 1423 bp, Cannabis indica
gaaaccaagtttagttttttttttttcactaatcttctccaatcaatccttgaatttgaaggcttggcttcttgttcctccctgaaggagttgtacctagctggaaacagaatcagtgaagtggagggtcttcaccgtctcctaaaattaactgtgctggatttacgtttcaataaaatctctacagccaaatgtcttggtcaacttgctgccaactatagttccctgcaagccatcagcttggaagggaacccagcacagaagaatgttggagatgaccagctgaagaaacatcttcaaggccttcttccccatttggcttacttcaacaggcaaacaatcaaagccaacactttaaaggattctgcagagagatcagttcggctaggaactagctcccaccagtttgaccgtggtctcagaccagatcataaaacaaggaaaggcagtgttctaaccgctcagaggcctccctcttcttcagcacttgtccgtggaagtcaagcagcagcagtgtctccaaaacgttcaaagggtagacacagccggctgcctccaatggggactaaagtaacaactaatcggcataattatattgatattggcagcaaactaatgaatgtcaaatccgatctttcaatgcgcaggagtcgaagtgaaggaactttgggaaatctatgagtgatttttcaaacattacagtttaatttgtcatttcaaatcaaacttcagagaatgattagttatttggattgttgtgagattcttaatttgaattcctttgttctcgtttttattcatgagctctgttggcaggccctaatttgaatagcagaattgtcgttatttttatttttaatttacaatggtttgtataaattaataagcaaaactgaaatgaagaagtgctgttaaataaacagaaatatatcttttatccaattattgattagtatcacaactctctgcttttgctagttagtttgctatgttgtcataaggaaaatatgtaaaaaaaaatgtgtagcagcaaaacataagtcgaaaactgtaaatgaacaacacaaacaatcaaacaagattgttacatctctcgtcctgctccttttttggctgaaccctaatgttatgactgtcctttagcctagcttcgtttaaaggaggatcgacttgctgggggtttcgttcttttgtttagttcttttagctgcgttgtaataatggtcccttgccctatgtgatgttggctttcggttgttttgtcgggtttatctctagtgttttccgttatgggtcttgagcttatgctcatcttctttctcggggtggttttgctgtttttgtggtcatctctttacgagatctatgtgactttgtctctgcatttcttaaccagaaatgaatttcttttacaaaaaaaaaa

SEQ ID NO: 194079 - DNA, 942 bp, Cannabis indica
tgtaatccacaactttgtgaggcgtctcaacttttggaacaagggctataacagcttcattgaactcctgaagcaaaattctagtatcaaagaacgctaggatagcctcagtaatctcatctccaatctccttccacatgactttgtaaaactcagaattaaagccatcttactcagggctttttgtactagctatgctaaacaaagctttcttgacatcttctttcttaaactttttaattaagttcagctgtaagtcaatgctaaggcatgaacctatctccatatacctagcatcaatctgttgagaagctgaactgcaactgcccatataacttttaaaatgagagacaaagtgttgaaccaccttattgtagtcatctacagtttctccttgttcattttgaaaagaaacaattctgttctcatgcctccttttattaataaacgcatgaaagtaggcagtattgtcatctccttttgaaagccaagtgactttgcttctctggattaaaaaactctgatacatggctgcatgagtttggaactttgctgcagctattttctccatcttctataagctaaatcatctgtattagttaaagcaagctgataatcacctttagcttgatgatacctttgttccaactagccaaactagccataggtttgttccaactagccaaagcaacatcctgaaaggtttattagttcccatagtaccctgatcctgagttttaattaaacagtagcagtgatctgatgaggtatcacattaaaaaacagccacagagttagggagcttattaatccaatattcatttaaaaagacatgaacaatctttgagtagactctatcttattcccatcctacttatttgtccagctatatatcgaacctaaaaacttaaccgcatctaccttagtctgagcaagccaagc

SEQ ID NO: 194080 - DNA, 1357 bp, Cannabis indica
ctatagttggagctttgagaaactggcttagctgtttacacaaggaatatcaagtctagtgtggctcaaatattgcaaggctccacttatgctcctatagttggttggagtgttcaacacttatccatctgcaattggcagaggtctacacgacaccattggagtgggactaggtttcaaattcatcatgtctgccttttgcactaactctactatatattttagatatggttttctgcattattctactcattcgtttaatttttgatgtttttttgatggtttcaggaattgtaatgtcacaaggttcgggaattttaatacaatcgtttcactatagttatacgattttcttgtttatttgacattttttgataggttttcaatattttttggtttaattttctaaaatttattaaaacttgcatttttcatcttatttttataattttttgatagaaattagacaaatttttgttttatttatttgacgttttttttttatttttttttatttttagttagttcttaatatttggtcaattaattttgttcagattgtttaaaacttgcttttctaatattcttttcacaattttttgatagaatttcaatagaatttcagtagagaattattaaaaatgcaagttttaagcaacctgataaaattaattgaaaaaatatcaaaaactattaaaaaaatatcaaataaataagataataattttttagatttctattgatgctacaaaaaaagttatacaaagttatcagaaatacaatttttaagcaatatgacaaaattaataaaataacatatcaaaacctatcaaaaaaatattaaataaataagacaatcatataaccatcgtaaaatgatcatatttgatcgtacctaaccttaggacactacatttcctgaaaccatcgaaaaaacatcaaaaattcaataaaaacagtaaaaaaaatgcgaaaccacatatctaaggagttcaaagttaaaaacactgaaaatcaatgacagccacttaaatctaatgtaaacaaactatatacttctagaatataatacaaatagttttttaaaacatagaacccattaatttgggtgaaatttgggtcaccttctcggaggcaggctcctactcggtgaaattggggctttcggtcttcgaaaaattttcgaacgaagaagatagagaaaggtggaatggggtgtaggtggttagtggtggtgaaacaaggtggatattgtcactggggcttcaacagcgaactgagtttggtctcgcagtttgagtttatattttttggtggtttttgggtttgggttctcttcagatgttgagagagagag

SEQ ID NO: 194081 - DNA, 1788 bp, Cannabis indica
actcattaattatctttcaaaatttgaataatatctcatcaattatttggttgattaggctaatcacatgttttttaacaagtgagaaacatataatgtgaataaataataatgttcacgtgttttcttctgtttgaattattgacctttttttttttatcttggattatgtgatggaaatcatttaatactttctttatttcaatgtgattagtcaaaaaaagaattaattctgttcaactagaaaatttagaccatgaaaaaaagaatttaaagcctggagattagagagagaagaaaaaggacaagaaataagatgggatttaaacatttaaatacgagtttaataggtcacaaattccaaatgttggtgaaatagactgactaatggaatgtggcaactgaataagttaagtacattttagacaagttggttaaataaacccaatgataataattaacataattctcctaaaaaaataattaacataattttttttttgaaagggaataattaaatggcctaattaagaatttttacctctcgaattacgacttatgtattattgtgtccttgaacttgatcggctgttacaaatagtccctaaactattcacagtacgtattttaaactttcatccatgttaaactttttttttattattaaaattagaaaaaaattcttaaattcaacaatttcaatagttcaagggtaatttttaattaaaattcaagaaacatgatttgatacatgtcaaagtttagaaggcataatcttaattagcttattttatttttaaaatcgatcatattgcaaatttaatgaagggtctattaatattaatatattatttttaattaaaattatcatatcttttattattatatataaaattatttatttaattaaatttatatcttaaaaatacaatatatttttaaataaaactaaaaaaagtataatatgtttcttttacatagtaaaaagcatagggtgcttaagaagtgcattgatttatcctctttatattttttaaatttagataatttttaacattaatattttttataatcttatacaatatatttatttaagagatccctataatgtataatgagaaattctgaatactttacaatatagaaacatagtttaaacaatctatttcactaattgatcattgtttgtggcatgttcaatttttatgaatttctcaaaaatatacaaaatgacttaaatagcctcattgtatgttgtcatatatggcatatccaaccagtaatgcttatgaggaaactctcttggaacaaccagaataaatattgatcaaaagtatatgaaaaggtaagatcaaaactatatatttggatattgaaattacaaaggaaatgtactgtaaaattttcccaaaatttatacttctgaaaatatgacaaaatatcttataatattaggaagctatatctcttaaacaatagtcatactaattttttttaatcaaataaatatagtttaattaactcattaattatttaatgggttttgggcaactaggaagccaatgccttctatgtttataaatcgaagatgggatgaagagatgagtctcatctcatggcagattattataattatcacaaaattatggggtagtttttattattataagatattatatatgattattattaggtgggttcatgctcttgaattacaagccaagttaagactccttccatatataaagtcttttcatgagttaaaaaatgttgggaattccactgtct

SEQ ID NO: 194082 - DNA, 2687 bp, Cannabis indica
aattactagctatttcgttagctaaaatggccgaaaaattaatatacgacgagaaagaacattaaactcgtacatttcaaattagaattttacaaaaatttagaagactttaaaattgcagttaagatccccctaatgaactcaatgaagaacaatggcggctactatgtaagttcttcacatctcctaagtttattactcgttctaaacaaaatgctcttaatcgacagataatgaaatttccttcaacacaagggtcgataactctggctgagacccttcataaaaatataagttaatatatatactatttattttatgaagtttaatttaattgcaattttcttacaatttatatatatcagcaaaacataggtcgcattgagaattggaaggtttgtcacacaaagaagggcacatatgagtttgtcaacgagtatgccaaaaatcaatatgtaagattatgtaaactaattaattttttatatattcaaataattgtaagtttgtttggtttctaacttattcataaaataggtacagatgaagacaaaatacgacagtcaatctagtcctaattgtacacaagattttgagattgagatacttcgtgagactcttggagagaggtctggccacgagcgaggagtgggttgcaaattgaaagggcaatcatcaaaacggagctcacaacttgctgcagctactaaacaacctgacttaaggcaaaccgtaactcagatgcaaagacaacttcaagtgatgacacaaataatgacacctgaacaacgtgcacaaatggaagcaatgatgactgaggctgctccaacgcaaccaacgcaaccaatgcgtccacaaccgtaacacttttacatgcttggagatggatctggtccatcttttcagccaatgggttttcggcatcaatagtcgcaataggctccactttcatttcagcaattgttttagtagccttagcaactccctgaacaaatggttcatcaattttaacaattttagatgtttcagacattcatgcagatgatgtaacagtcgccgtcgccaaatagcccacaagtaatgataacgatgatgatgtagtcgcctcaaacgtctcaagtctcataatcccggataccgcaaaggatgctgacacaacaaatatcacaggtgtcgtagacttttcagatgatgccgtcaccacaagggcaacaatatgggaagcaaacattacatatgctgacaccacatggtcaacagacttctcagatgctgatgagttcgcagatgtctccatacgacccacagatgtcggatgttcctcaataacaaattttgagagatgctaatggtgatgacgctactacgaatttcttttcgtatttttattgtagttatatgaacaattagttttatgtttatttatgttttatgaacatttacttttagtaaatattatttttgtttaacgatattgttatatttgatttttgatatttgatataaaaatatttagtatgttattacattttacttttaatttaattcttttgtatattgtttaatttaaaaaatatttaatataaattgattagtaaaaaaattaatatttaatataaataattttttatttatcatttttttttaaaaaataaatatataaatggcaattttttcgtcattgataacattatcaatgaaaaaaaagtcatcattaatatattttcggaataaaaaaaataaaaaagatgcatattattgccaatgacaaagtcattggcaattttttttttttgtaatatcgtcagtgatagtacctatcaccgacgaggtatcaccaacgactttttaccaataacatgtcgccattgataatcattgctgaagaaataaccatcttttactgacaaaattcattctcattcttttatgttttatttataattttaaggcttaaaagttttaattacaaaattacgttagtaaaattttaaaattacaaaaatacacattgttcagtaaaattaaaaaaaataactaaaaaacaaccagaaattaatcttaagacaattataaatcaatcataaataaactataaaataaccaaaaacaactagaaaaataatcttatatgacaactataatacaaactataaataagctataaaacaatgaagaaaacagtttattatttttacggtagaggaatttttgtaaataaaaaaatttaaagagtaaacattcaaatttttccgtgctagcgtattttattatttttttttcaaatttttgatttattatatataaatttttcaaaaaaaaaaaaaaaaaccaacccaccataaaatggtagaattcgaactagtatggaattccaaccttgaaccttatttatttattgtttatatggtttataatgtgtactaaaaatgtgttaattttgttaaaaaaatttaatgtagacaaccttaaacacatgtcttatatctattgcttgagttatattttttcaagtctttttttttttttttgaaaagtcataattctatatattcacaacaaatctgttacaactttaaacattttttttgctcatcaataatttaccaagaagactaaatactaggtacattttcttggcctaaaagattattattaatcaatgcgttatatgaaacacttcacac

SEQ ID NO: 194083 - DNA, 1609 bp, Cannabis indica
ttttgttttgttttcctgagttttgtctgcatcataccagccactgcttatttcataaatttcatgtaatttattcctttgaatttgaagcatcaatcgatcggttgaaaataacacccttagtaatagctaccatattagtttcatcttccagcatattatgagagagagatgatctacaatacccaaaatattcagggcaaaagctcacttagccacattatggattgtaaaattacataattttgagacaaataaaaaattacaacttaacaaatgattagagagatttttacactgagttacatagttaccaattctccaactggaacaagttccttttagcgtcctgataactgtgtcagagtcactttcaatcatcacaaaagggtaattcaacaaaagtgttgtctccataactaacagacaggttgcaacttctccaataagaggattagagatattgagcctgctggtagctacccacaaaattgcctccgtatgatccatagctaaagccaccacacatcgaactgcaactaactttcacataacagttgattttggcccactctacaggaggagggagccaaacagaagacacatcatccctcgacgaatcaaactaacaagaaccataatctgcgtagcaaaaggagattgaatcaatacaatgtttgaggttactcagagaattattctgtaccttatcatttcgggctttccatattgtgtccactataatcgatgcatataggaacaactcttgaacatccacccctttagattttagactccaaagaaactgcacccagtcccatactcgagctccaaattcaaaaattggtataactccctagggggacaacctccacaggtgacatgcaaagttgcaatacaagaacagatgctccatcgtttcctctccctccccacaaagaggacaagagacatcctcaatgttcaatcttctagcgaggagaaagcggataggcaaagcatttgagaggatactccatcagaggactttgtgaaattccaaaattttagaattctaaagtttattccacatagaaagagcaacactacacgagggggcacgctgcaaagcttgaataaggtaagcagatttcgtcaaaaaatgaccatttgattctttagtccatatccacttatttcttccttgcccacaaggtctaccacccttgaggatattgttggttgtttctggatcaaaaagagcctatagtttggagatatcccaattcctgttgtctaacattaaatccaccactgtctccaaaccctcatgcagattgttattaggttaaggatagaatgttaagccatgtaaaatctacggatctttccagtatatttgtttctttcccatctgaaataagtttgcaggccctttgcctaagaatttctttagattttacgacattcttccagaaccacgaatcagagttcttagaggaccacttcaagaaaggcctaccctggaggtacttggcacttaagactttacaacagagagattgatcctcattaatgagagcccaaccccatttagccaataaggcctaattcatttccacattctttt

SEQ ID NO: 194084 - DNA, 2173 bp, Cannabis indica
gtaatagacacaatatatgtgtaccagcagcagcagcagcaccaatgggtatttctaagggctttggctttgaccggttctgcaaattaaacaattaattaacataatacatattatatacagataattttgtaataaacacaatatatgtgtaccagcagcagcagcgtcttgattgtccatttgattatgtaataatctttctattgttatactgcagagatgagcagtgagttaatggtcatatgatcgatattgacattttgttgttataattagtattaatttaaatacagatggaataatcaaccaaacccaagccaaataatcagtatttttcacagtaaacaaaatccaacccatattaattaaatatcaatatacttttgatagtattgttttgattgtccattggatgatatgttctaacaatataatcaaataattgtaaacacgtgtgaaatgtagatgtaagatagagatctcagccctagatcaaatcaatgcaaagctaaagagagaaatcagagacaaagaaaggcatacttgattcacctaatagataaacactaataaaactattttaattttcaaaatcaaaatcaaaatttaaaaaaatttgaaaatagcaagaataaataaggaattactttcaattttatttaaattagtttttctctcaattataatctatttttattttctttcaattaatattttggatccgagaccagcgaactgaagccggcatagacctgggcctggacccgactcagaacaaagccaagagcctaatcctaaaccccgacgcaagagcaggaccgcgactccagctcactttctctaatcccagtttctcattacacacttacatttttgtttttaaaaacaaaaaaaaaaggttaggaaacacatttgtgtttgtgaaaaaacaattcacaaacaaaaattttactatcatttttataatttaaaaaattaaagaacaagaatgtcaccaatgctcaagaaatatgaaaccaaaacctaaattacattataaaaaatacatattatatctataccaaacaaaaacatttactgagcacaaagtccttcaacagattattactcattgatacgaatgaagtcagaataataatgcaaaactataatctgtaaattaaaagacaaattgaaagggcaccagacaacataaattaaatgaagattaagaaataagaaagaaaaagagagaaataaaaatggttctctaagcttgacctgagtgagagagagagagagagagcgttcgaggtggttccggtggagttgtgcagggaaaatgtaagggtcggcaccggcggtgttatggcctgagaagaagactgggtgtggtggtggtgagtgacagagacccgattgagaggaagagagaatatggaaggggcggctgggattagttagagtaaaaacgagagatgagacggagagaggtaaaatgtagtgttttagggtttttttacctttttgaggctgtacatttacttttttagggttatatctttttgggcctgtagtgttgggctttattttgtaatttattagtaaactattttctttaaaaaaaattcataatctttattaattgcaattcatagtaattacatgattaaaatttagagtaacatcactactcctgataacacgatcaacaactaaataggatgctcgagctaagaaatgagcaacactatttacagaacgtctaataaaattgacataaacatctcgcaagtcatttaacaacatcttacaatcagtataatactcccaaaatatgaaaccatagacatagagttacgtaacgcttgcaccacggtaagacatttattagtaaactattaaacaatctgcccgtgcgattcgttttcaagctttcatacatatgatattttaaatctgatttaatctgcagattttatattcttatagtaactcaaattcaattcaatttaatttgtaaaagtatagattggtttcaatttaatatttgttaaaaaaatcacataattaacaataaaataaaataaattattgttactttatctccaacaataaattaaattaaataaatagcaaatacaaagcaaaaaaaaaacttgtatgtataaaaaaaaacgtttaacagatg

SEQ ID NO: 194085 - DNA, 2753 bp, Cannabis indica
gtatggcgtagcatctggagtgcttaaagtctagttaaaactggggctagacgtactataattttaggctcctcaacaagcattttgaaccatccatggcttccagatagagccaatcgttttgtgactacggtgcaccctagtttgcttaatcaaaatgtttattctcttcttagcaccgagagtcgaagttgggatagggatttggtttttgacatgttcaatgcccgcgatgctaatttaatccttcgaatccctttaagtttgaatgttgttgacgagtgttgatcttgggctgaggaaagaagcagtgatttctcggtcaaaagtgcctacaagatgctgcaacagcaaccaccattttggtcaggagcgagtaattcaggtctttggcataacttgtggcagctaaaaatccctccaaagtgtaaaaaaatttctctggcgtgctgcattggattgcctccccacctgccttaacttgaccactaaacatgtaaatatttctcttaactgccccatttgtcaagtacatgctaaaaccacctctcatgtgcttctaacgtgtctttttgctctgtcttgctggaatgcttttggcaaaataggaacatttccagttgttactttttgtactggttggagcagttattctcttgttttgttgaggaaactatcagctgctcaacaatgatttgttgggcactgtggaaagctagaaataccaagctttggaatcaaaaaaccatctctagtctctactattgagactagagaaaagctcgagattaacaagttttatcattattgctccttcaaaacattgttaataaaaatgagttttgaactaaactcgtgtctggtacaatcaagataaatgttgatactgtcttatttgagaaatacgagtcttatgggtttgggattgtggctcgaaacagttttggtcatatgctgcatttcaaggctgagtatcttggtggtctttacccagcagaagtcattaatgcaatgtgtgagtcaaggaagccctcagttggacaatagagagggaatggattaatgttagaggtggaatctgatagcattgctcaccattcaagtcaatcgagtgtactcattatgttactaggcactcttgatttctttctggtcgtagcattcttgatcataatttttctagtgatctaaaagatcttttgtactaaaatgctagatttcaatgaatttttatattttatttttttttaaaaaaattatattaataataatatgacacatttaaaagatattcaaaggcatcattaataatatactttgtagctatatatataatttgtaatatattaaattacactaataataatatgacacattagaaaaattatttaaaagatgttaggcatcattaattaatatagcttatatagcttgtagctatatatatatcatttatatatatatatatatatatattttaagaatttgccctagggttttgaagttccattattatagtttgtacaagtcaaatattggaaggtggatgtagggaataggtaatgtgagcataacattaaagcaacaaaatgcttgacaaagtttgaggaattgaaaggaatatttgggaagatgaaaaaaaacaaaacttatatataaatatatatatatatgtaactttataaatgtgaaaatagggttttttccattgacaactatgttgtgaaagcaaacaaacaaccctttaagaactgtacaaattcaggtcaatgtttacagaaacaaaaataattcaggtcaatatgggtccacacccaattaatccatatatgataaatcttttttcactgattttttactattacaacaacccaatattcttgattcgatgatacattaatttagacatatttgatgatgatcttcaagtggtgtagatatgatacacgtacgagtaatccctcaatgaggtgaagataaaattatactacaaaaaatctcgacaaaattagtgactaaaataaaaaagttgtggtttattatgaataataatttttatgttgtgattaaaaagttcataactaaaaatattagtcacaaaaatcactatttattatgacgaaatatatttttagtcacaatacttattgtgataatattgtaactaaataacttgtatctaaatatatactataattttagttataagtatttttttattgtgactaaaaattatatttagtcataaataatttatgttataaataagaggttatctctaaagacaatttcttttagtgttacaccatgtttgattaaaaaaaaatatatgcataattataacaacttcaaattatctaattcattaattttaaaaatgtaacttcactatataataactttgaaattaattgtataatgttatgataaaattactacttgtatagttcaagtcttcactaactaattgtaacgtccccgcttcaagcctccattaggtccttacacccacggaaataatggctcttatacacgagtacgtcactctggctgtttcatggactgatgtctggccctacagaccaacacgagtgtttccaacgtgctttgtcctcactcgcacgcttcctaggaaaacttcccaagaggtcacccatcctaaaattgctccaggccaagcacgcttaactgtggagttctttcgagatgggctactgaaaaacaagatgcaccttgttgatataggtagtact

SEQ ID NO: 194086 - DNA, 956 bp, Cannabis indica
cacgaaagaattacatcaatgcacatcttttggagagtgcaccataaatttatagatatgttaagagttagggttagggttagggttagggtggggtcactctcaatattgaatttgaagatcatcattatgtaaataaaaatacattttaaattttgaagaggtctgcctatagttccttgtttgtttttaaattgtcaaaaagaaaccgactacttaaatgttttagatactctttttaattctttttcttgtggtgtatgtttattgtatgaatatgatatatagatatataatatcaaagtttatttggaaggcaaatgcatcatgtgatcaagactgggaaaatgaacatgggagtaagagtcctatatttaattttaatttattttgagttgtacgtatagagagtatatagtatagtacaattatatatataggtcatataggtgttgttgtggggggtatggtctgtgccttgcaagttgcatggtttcatcaaattgttacatttatatttgtgtgtgggtgtggggacctacactgaggtttaactgtacttaagctgtgagagttgagcaagtgggaagagatgcccattcttttttatttgtatctttatgttttgtgggtgccatttaaaactatttgtcatttttatacctactacggacaagggcatctttgtttctagcttatgggaaaattatcaatgaaattgttctataaaacaatgtaaataatagttagaacataccatctattagttttaggagaattttaagtactatagtgctaacaacaaggttaattaattaagtaattcagttaagtgaatgcattttcatgttttgttgtttatacgaatgtaactcgctatttgaatgttattttttgacaatatatttttgttacgtccatatcttaagcagtaattataaatatggcatgtggat

SEQ ID NO: 194087 - DNA, 4204 bp, Cannabis indica
acttctacaataaatttccagctcattttatcgtacgctttctccatgtctaatttaatcatcataaatccatttttccctcgtttcttccccattgaatggactatctcatttgcaacaacggtattttctgctattaatcgtcccttaacaaaggctgtttgggctggggagatgatgcagggtaagatgtttcttagcctaagttctaagacttttgagatgcatttataggcgacgttacacagtgcaatcagcctataatcgttgactccactcgggcattccttctttggtattagcacgatgttggtgttgttaatgcactggggaagttcagtgctgctgaagaagtggttggccatatctagaacatctctttttaccgttgcccaatgctgtatatagaaccccgtggacattctgtcgggtccaggggctctttcttgtcccatagatcggatgcacctctcaatttccaagctggttgggaagctttcagaagctcattaacttgagtcgaaagaccacaatcctctaggcaatttagtagatggaaggtcaactgattttttgtcaatgtacgtgttgctgaatctttcaacaaacaaatttgcgatgttgtttaggtttctctcccaccctccatcttccaaccgaacctgttggatgtaatttcgcctccgtaggatgacagtggtagccataaagaattttgtgcagctatctccctgttacagccacttgactctagatttttgtctccaaaaaatctcttccttggcgagggcttcgttcaaactatctctagctttttgttaggtcctccccatttacgttgtccagaccttcgagttgttggagtgatgatctagcctcatttacttggtgtctgatttgtttgaaatggactttgttccacctcgctaaatgttcctttgtcttcttaagctttcggtagaaattaatcattggatgttgatgaagcttctccttccaagcattcttgactacccagtggcatttaggatctcttccccacaatagttcatacttgaattgagatttactgcagttggctcccccattcgtgtcgagaaggatcggtctatggtctgaagtagctgcactaagtacatgagtgatagcactcgggtatagcattctccactctatcgatgccaaagctctatcaagacgagatctttttaaaccgcaccctccccctgtgactttggatttctgaaaccaagtgaactttcctccttgtgaccccaaatctacaatgcctgttctagcaaccatacgtctcaaatcaaacgagtaacgggctggattcctccagtttgagtagtgaagattctcatggtccgcaagggtaccattaagatcaccgataatcatagaaggattcacattgttcataattacatcaccaattctgttccagaaggcttctttccctgctaaagtgggcgggccataaactcccattaaattccaaggagtgcctggaggatccgattcgattaccacgttaattagattcttgtcttcactcaacaccgaacccttcatcccacaccgccaataaacaccaaatccccccgctagcccattaggggggacatacgatccttcgatgaaatgtagcttcaaacaaagtctaacgaatttctccatcactaatcttgttttagataagactatcacatcgggatttgattgacgaatcaacgccgtcaattgtcgaattgccgcggggttcccgagaccacgtcaattccaagcaaggactttcattgggtacttggagacttttgtgggcaagtctccatagccccaaagcaaaaatcctgcttggtttcatccaatcgatcattagtacacattgaactcatggcctattgctgagcatctgtttcacctatctcttccatcacacatttacttggcatgttcatatttttctcaattaccacaaaaggggttattgagatcaatggcaagttctactgaggcagtttttcaggagttggagtaatgcttactaaccttatttttcctcttattgtcgctttcctttttgaagctccttggtttcatagctaaattcaaatctttggccggtcttcctctctttctcgtggactccaaagactttggagcaggggtaatctttttccttggtcttcctctccttcgttgactatcacccttctcaaaggatccaggtgaaaaaccttcttccgaattcggtaatggggaatccagcttttattcatttcttggggcatcaaattgatcatcttcttggtgaagttctctatcatcatctttcttggggaagcatatagaaaccatttgtcgcttttttttccttggtccttgttctgcttcatagcatcgtatctcctcaatgtccaagattaggttcaatagagtaggctcactgtggtatttgtcaatagtttttgctcccaatagttggtcaaaggctaactcccaacattcttttgatggatactcaatgatatgggcttgtgtaccaaaagggctttgaggttcagggcccaacttcttcttctttaaatccttccatgggcttgtataattgatttttgggtccacgtgggctttagcttttgtttccttgggattgatattatcttcctttgccacctgtagtccaacgactagaaaattggacttctccatatttggttcattttcagtatcctctcccgagatctcattaacttgaaattcagaaagggaattttgtatagcgtgcctgattctagctttttcatgcctgggtttggtactgctgcaacttggtacatcttttcgctgctgcattgtccttattatctccaaaggaggaaggtcagggagtatcttttctacaaccagatctgcagtgttctcgaatggagtaacttctccaatccccggcaaacggaccgctggatatcaattgaggaccacttcaccggagttagctctggtctccaccaccgtttctacttgtcgtctttttccagggtattgcatctgaagctctcgcaattccgcaccttcaatctgaaggctaattctctggttctttagtaattgcctcactttctcatccttggccgccttttggttcacaatccactcactgaaccaattaggtagaggtaggtggaagggagacctttccatggcatcctcggccatccaattcccgtacattgagaaaaactcacctttggcatctttaatcacaactggagtcttgaaacagaatttctgttcatgtgtcattaggccacacttatagcaaattctagggagtttctcgtattgatattgaagccaaagatccttaatccctgttctcctaaggaagaaacctgagaaaagtggctttgatagctccaccgtggctcgaaaccggagagtacccatgccaaacgatcccctttcaaagttcttctcaatatgacaggggagttcatacactgccgaaacttttcctgccatctcctgcaagtttgttttgttccaataatatggagggatgcttttaagccagacccatattggcgaatggtcgaacttaacctcctctggagtgagccatgaaggccagggcatgagaactagtaaatatccacacacaagccagggtctccttaaaaggacattctcagcatcgaaactagttctgaatgtaaattgtagcagcccgtcttcacgttctttccaactccatccagaaatggatgcccaagcatttttcagagaaccctgtatcgcctttttcccaagtctggtgtggcaaaaaagtttccccaaaataatattgcaaggctcatttggggggtcaacttcgcctgggtgaagatcagaggttatgtcatccacactagcttggacagactcgtcgaataagtcggttagagttgaatcagccatatctcgttactgaggaaaatacctaaaaactttttttgacagtagagtcgtttaccttctttgaccacacacaacacaaataatggtaagcttctctatgaagggaatgcttccatactcttccaccggaagttagcacaagagtgcaaaaaaatttgacttaaatgtagtagtagtcaaaacgactagttgttaacgttaaaagttaaaaagttggcccactttttttcttcttctt

SEQ ID NO: 194088 - DNA, 2734 bp, Cannabis indica
gctgtgaattgggaagcaaacaacccttttctttctgctgctttaaagggtttgactatggcctattaaagagcatatgtgaaggtatataatatattcaggtacttttaaacaagactttagctggcaaaaataattataacaaatgaattgcatctttttcttgtgtctaatagttcctatctaggaaacttgaattacagcgcattttacaacactaacttataatataaaattatatactaagcaaatgaatagaaacccttaccaataaataagaatgaaaacaaagcaagctaaattatttgtatcacagagagagtcacatacttctaacacagccaaatttgctgcgccattctaagatcactagtgtggcaccataatgagccagagcacccatgaccacaaaaacatggaagatttgatgactatgtcctgccaagtcaaaccaaccaggtttcaatctctctggaattctactaacataaaaaccagtcccagtcaagtagaaaaaagccatggccaactcataagatagtatatggtttctccttggattgtcccagttgacaacaagagcatggattgttgggacaatgccaaatagtcccatggaagagaagagaagggctcgaaaaccgcggaattttccttctgagagtctcggtgagagcaatgtgatgatggtgaaaatccccatggctgttatcccaccaagatagcccaagtgccagtttgagtcacagtggaagatgtagtagattggagggaagaatgaggtgatgatcatggtggtgattccaacatagtcaattcttaatagaaagatgttcatagagtgagagtgacatgagaataggtggcatatactgcttgagaggagacaaaacattgaacctgataagaaaacaaagaatggccattgttctactgtgctataattattgccaaaaagtgttgtactgttgttgtattctgttcctgctgatgatatttgcttcaaatctaccagttttgttgtcccctgaaagtgttggaatggtgagtttttgccttaggtgggaattcagaaattaaaattttcatattagtagtgattggatggtaggaaagttgaaattattaccattgagatattgttggaaacatttgcttctgtactaattggtagagacctgcaccaacatttgaaaagaaagttccaaaaacgttaagaacttcctaaaagagactaactacagcatcaccactactatgtgtttgtttggtagtgctttaagaatgataaaggcttttcttgaagatatgaagaacaattacacctttcagctaacttctaaaaaaaacagtcgagaaataaaataaaaaatggtaccgaacaagctatgcataaatgaaacaacacaaagaacatgaacttttagagctatggtaagtcacacacacaacattgttcccttcttttgttcttacaaagctattacatattttctgttaattttctcttttttgcaaccaaacagaatccgtaaaggttaaaggttagttaactgagaaatttaaaaggaaaaacagagtttaactcacaaagagtcaatatttattgttaaatatcaaaagtaaagaagtgaagttgaatgccaaaaggggaacatactatctatatataaaattctgaattcatatattagtttaatcctatatattcagttcaatcataatattttaaaaaatctgaaagtaacacaaaacacacatatatatatgtaaaaaaaagtaaatatattccaaatgaataaataataataaaaagacaaagaacagaataaacaacctggcaaaaaaaccaaggagatccacaacatgaggtacttccaaaaaattcgccatagtcaaacccagaaacagaagaaatccaagtaagtgcctgcaaaacattccaaaccccaattcccaaatcagctcaataaattcataattgaatcaaaattagaacatgttacatcatcaaatacaagacaaaactatgaccaaaacaaaaaatcttgattgaaaagaaattgcaataacacatacgtccaaacattaagtgtttcattatgccaacgcagtaagctaaaaaaagcttctttcaaaggccaatcagctctgtaataattcaaaatgaactcattgtccttcatgtactccggtaagtccctaaacgacatcaaagcatatcgttttggcttgtttaagctctgtgaatccttatctttctttctgttttttttacagaagagattgcaatgaaagaattcttttgatgggtttgatccatttctttcattcctttcctcttgaaagcattacaaccttcggtaaagctcatatttgtatgtgtgtatttgtacttaggcacacacacatactaaaaataaacaaatgctgagaaagatataaaaaaagaaaaagaagaagaagatgatgatgatgagtttttagagttaaacgacagcgtttaagagagctataatgggaagctttatgagcttggtttgtagcatatggtgtattaagtgttgtttgggtaatgggtaccgccacaactgcaccaactgtgacatttaaagaaaaaaaaaataaaagagagagaagagtttggctaccattattacatgcatgcagctttctctttctcttatattttatttattttatccttttggtaataattaaaataaaaaaaaaa

SEQ ID NO: 194089 - DNA, 2172 bp, Cannabis indica
tttttttttttgtatttttaagcgcttatagcaactgcataaaaattattggaagaatttaaattataatttttttaaaaaaaaaaattgaaaagtagtatattgataattcccttaataatttttcttaaaaattaataataataatatttatactcatttttatattaaattttacatgtttattttccatgagaccttaacaaaatattaataaccaatgaagaaagtaatgaagtttgtataaaaatttctcttttaaggaaaaaaaaatgtttaatgtatttgtgttagtatttaaaggagcccttaattttcagtaatgaaagaagtgtcttttcacatagtctcatcttcatccacagttcagacaaagattcttcctttattcattttcttggtccaacaatggcagcagcagcagcagccatggcgatctcattcactccctccaaccctttctccaaatcacccatctctttaactcgatcccttctcccaatctacccccaaaccattttcactcaaaaccctaaaccctagaaaaaccctaaaattcataaccaaatccaaatcctccgatctcgacaatgccctctccaactcaccttccactctcccaaccctctctccccaaaccctaaaatcccgtctccacgccggcgaaaccctctacggccttttcctcctaagcctctcaccaactctcgccgaaatcgccggtctctccggctacgatttcgtcgttgtagacatggaacacggtcccggcggaatccccgaaagccctaaactgcctcagagccctcgccgccacacaaactccggccattatccgattaccggagacaaacccacttgggcaaagaaagcactcgatctcggtccccaagggattatgtttccgatgatcgattcacccgaagaagccgcgaaagccgtctcgtactgtcgattcccgccggcggggattcgcggcactgctcacaccgtcgttagggcttcgtgttacggaatcgacgaagggtattttagtaatttcgcagacgagcttctaatcatgtgccaggtggaatctgaggaaggagctaagaaagctggtgagatctcagccgttgatggtgttgattgtgttcaaatgggaccgttggatcttagtgctagtatggggtatttgtgggacccagggcacaagaaggttagagagatgttgagaatggccgagaagggggtcttggaaacggccgccgccttcgccgccgctgacggcggagccggcgccggaggattcttggctggatttgctatgccgcatgattcgccggagcagttgaagtcacgtgggtatcacatggtttcgggtgcggtggatgttgggatgtttagaagggctgccgttgatgatgtgaggaagtttaagatgagtttgattaacggttctgatgatgagttggaccatggtaaggattctgatgagaagtactggagtgagtgaatgagagattttcatttattttttcttttgttgtaaaaaaattttgttgagtattttgagaaaaatgaaataataataagaaaaaattggattgtcaaatgatttggtgaatcaatatattggagtgtgtaaatgtttattttgaaaatttgtgttattataaatttgtttacaagagaaaaaaagagagaaaataaatgaggtaatattctcaaattcaatttgagaggaaatttacttcacattttttctaacatttagaactaacaactccaagagactatgatatttgaaattaaattttgataacaatatttgaactaacaactcttattagagaagctgcggcttgtatgctagctatggagacgaccatctctttacattatccttttgttttaatggagagcgactctgatacactgatcaagactttgaagggaatttgttccaaggattgacaattttgtgactttgtaaaaatttctttactaaattgttatgttgtaatttttctttcattattagattaggtaattttgcggctcattatatggccaagtggacttttgccaacaacgttatcttctgtatcagacaatatcttttgtaatgaccataagatctaattttagtgtttatctataaatgacttcacatttttcaaaaaaaaaaaa

SEQ ID NO: 194090 - DNA, 1433 bp, Cannabis indica
gaaaagatcaggtggccatggatcatgatcagatgatgatgaatagtacttattcaacagacgatgatttcattgatcttgataacttctttcttgatattagtaatgatcaagatttcctcagcttcctacaaaaccctatatagctagctagggtttaacagagatcatcagtttgggagatagtgacttgatcatcatcgttagggtttcgtggcatatgaaataaagcactatatatatagttaattttccctttgttaataagtattgaaataaaagtactaattatgaacattttattaattgggataattttaattaatgttgatggtttgtaatatatatatatgtcggactaaattgaagagctttcaggcttcttcatatattatatatgttagttaaatgatgaatgatgatgatcacttttttaatttctatatttatatataaatatgatcaatgaaactatataactgtttttaacaaatcttaaacattgtttcagaacataatacttatctcgtttggtgtttcaaaaagaataataaatgtatttttatcggtttgtaagtaaatattgaatgtatcatcagaatttgccacttaaaaaaaaatgagatatcataaattttcagctataaaaacttcacaactgttaagtaatgtatgtacgtatttgccgaaagtgattatgtctttcacaaaaaatacaaaatagaataattgtactatactaaagtatatttcgggtttgattattaatatggtaaaatatctaattcatgatgatatacttcctttttttcctcctcaaatttgacaacatatctcagacaattaaattatattaaataatgctgtataaggaagaaaatagtaaatgcacagagatattattactacagccataatccatagtatttatgatgtaatccattggaaattaaaccttttcagattttttttttttctattataacccaaaaaaaaaaaaaagaaaaaagaaagaaatgctttaaacgtgtgtctccctcctggaagaatatgaaaaaagatgctctttaattttcgttggacggccacatatacatatacatatatgtatatgtgtatatatatatcatatcacaagagtagtgttgcagtttcttagcttttttttttttctacttctaactttttgtgctttaaaagaaggccaaaattgagcaacaagtgcaaaaccttattgctccttccaggtaagaatcaaaatagtgagaatttcgtgtctccaaaatcttcatttctactttcttaatttcttgtgggttttctttttccctaagtataattcaattcaattcagctatagaagagggccttagattctaatggagctctagtatataacttcaaaaaaaaaaaaacaatttttacttctacac

SEQ ID NO: 194091 - DNA, 4274 bp, Cannabis indica
atttgttaaaaaaatgtgttatatattttttagtaattcatttttgtgtttcaatatatcattttattgtttttatttttcttatatttttgttttaatttgttagttaattgtaataagtaacttatttctttatttaatttttattttagttatttaggtaattggtttatgtgatttaattttttaatttaattattttacgtaactgatttctctacatcagatttttgttaagttgtttaatgtcacaagtttttattatttagtttataagtcattgttaaatttttttatagtatgtatttttttttaataactgacttttgtaattgacctatcttttgattactttaggtttgttcaatttttagttaactgtaatataaaattggtttctgtattaaattattacttttgttattatacgtaactcgttttaagatttagtttttcatttggttaatccacataactattttctaagtatcactagctgataaatattactgatttctctttgttaaatttcaaggtccaacttcgacgaaaattctagcatccaacttcgatgacaactttggtgtcaaactacgcggtgactttcagtagcgacaactttttcgactattatagcaattttgtcaaatattctcattctattttctacttttattacggctaatattttgtttcaatgaatagtgtctgttttgtatagtgtgtcaatggtcgagtcgaggatcttcttagaaatttgtaactagtttttaataatggtcttgtgttggttttagttttgacagtgggttgataattatgtcttggagctattctaataagcatgtaaaatttatatatgaattttagtgtttgtaatagattttttcgttaaaaaactaattttgaattatatagaataaattggtttattaatttattgtttcactaaaattattttaatatttctttataaaaaattttaaaaaattgcagtcaaatcatttttttttattttagtgtgtcaatttttttaaaaaaaaaattaattttaaagttttatttatgtcatttcttcttatatataataattttttttgaacaaaaggaaattttttattcaaactgaggaaacaatacaaacaaggccaacgccaacaaaacaccccacaagctaccaactttctacaacacaaattatataattatcatccttttttacattggtaattacccccaaaatacgccacttaacaagaaatttaatctccttactaaccacattgaccaagcaacaacaactatcaaatacacatctattatgattcttccaaatcatataaattgtcgaggcaataacggtgtttaccactttttccttcagccccagagatggttttgagcaccaatcaattagatcaagtctagtctctggccaattcacaaatgccagccaagagtaaatatcttcaacaacattcttagtgaagatacactccatgaaaagatgatcatgagattcctcttcaatctcgcaaactagacaaagagatgaagaaatgcagataaatctgatcaagtggtttcttgttaaaagcatattgtttatagctttccagtacgtgtacctgtcctttgggatgacaagcttgttccaaacgtttgagcaatactcgaccttttcatccttgatcaaggaggtgtagaaatattttgctttgaatcttcctcctttttcagcttgaaacaagatgatctcattcatgttattgcacagctttaagagtttcttaaaataccagctcatatcttgtttgatagcaatgttccatgtgttttgaccctttaagtaaatggcattaatctatttcacccaaaggttatccttctttcgagcaatggcccaaaggaattttgccataagcgcaatgttccacttcttctgttctcgaaagccaatcccccccataattctttggaaggcaaacaaaatcccatgaaccaagatgaagcttgcttcttgcacccgaagcactccaaaggaacatacgacaacatctatcaatctctgcactgatcttttgagggagggtgaacaaactcatccaatagttgcgaatccccaagaggacagaatggatgagctgagctctgcctgcaaaagagagattcctgcttgtccagcagttgagtcttctatttagtttgtcaataataatgctgaagtctgaagccttccatttggttggcctcatgttgatccccaagtattttaggggaaaggatccctccgtcatgtggacatagtccaatatcttacctttaacttcctcctttactcccccaaaatgaatatggaattttgacctgttagcagagagaccagaggtatcgcaaaacacctggaaagccttatacattatctcagcagagctagcatttcctttgcataacaatatcaaatcatcagcaaaacaaagactagtcaaacaaagagacttacaaagcgggtggaacccgaatcccttcctggtggacatctgagcaaggattctagtcaagtagtccataacaagaacaaatagaagaggcgatatcggatcaccttgtctcaagcctttctctcctttgaaagaacctttgattcttccattgagaagcagattatagtttgtaccctttaggctaaccataacccatttaatgaaccttacaatcttcaacaaactgcagtcaatattgtcataggccttgctaaggtcaattttcataatacaacgagcagatctattcttccttgtatagccctttaacagatcctggaagatgagcaagttgtgtgctagtaacctgttcttcacaaaggctccttagttctcattaacaagccaaggtaaaatttcagacattctggagcagagcatcttagagatggatttgtatatggtattacaacaagcaatcggcctatagtccttcgcattcatcggagcttcagacataggaattagagcaatcaccgtttcattcatctccttaggcaaagtgccattttggaaaaaaaatccaatataacattggtgagatcatcccctatctcattccaaagacctttgaagaagcctgagccaaatccatcaaatcctgggcttttagagctatgaatattgaacaaggcttttttaacaacttttttgtaaaaagggcgaatcaaattaacttgctgttccaaacacaaacattgccaaatgtaagaatcttcggatctactcttttagtggttaagctttttctccccattatatttttaaaatggttcaaaaaatgattaaccactttagagtaatcatcaataactaagtcttcctccatgtaagttgtgatgcggttctcaagcttccttttttctcaaacaggcatgcaaaaaattagtgttctcgtctccaagtctgatccaacttattttactctgctgtcttagaaagcaagcatagcttttctttaattcagaataaaccagcaccttttccttttctttattctgcataatcgggttcaatgggtccctagcaaggtcctcttgagctctgctaaggtcatctttggcagccagaaatttagagcggatatccctaacattctgtttgttaaattttttgagaacatgtttggatctgaacaagtttcgcaccgtatctatcaaatttttggcctaattccaccaagctaaaacagcctgtttataccccggttgaagactccagtggttgcaaaagcgaaatggtttgtaacccatgttgctgtgatcttgatacttgataagacaatagctatggtcagagcaaggatcccatttagaacaagcttccattctagagaaaactcttaaccacacctcattgacaaaactctgtcaagctttgatttttttctccaacatcatgtttgttgttccaagtgaaataggagcccgaacacttgaactctattaattgaccttgtgcaagccaattttgggagtcctcaacttctttagctttgacatgattccctcatattctatcattaaaatagaacatagcattaaaatccccaaacacgatccaatgtaaggagggattaccaagagcagccaaattatcccaaagcaccttcctttcgttttttagtagttgctaccatagacggtcgtgacaagaaattcatcccccaaaatacaaatcttcatcttgcaatgagcatattgagcatcctcttcaagaacctcaaccttg

SEQ ID NO: 194092 - DNA, 1963 bp, Cannabis indica
acaccaatctggggatattgacatgtaaagccttttcttttgtaggacatcatgaacattcactttccaccataacacttgccagacaaaaactttttctttaggaggtacagtcattttccaaagtgaccaggaagtctacaactgcctcgttgtccttatgttatcaaaataagttttgcaagtgaatgattcagaattatcctccaatcaaaccctacaatcttccaacaatttacatcttatacttcccaacctctccagcaactgaataagctctgacatttctttgtcattaagattattaggtcactgattccaacttacattatctccatcaccttcgtgaaagtcaaagatgcaactgttcctaataaagaaaattctgccaaattaggaaatccctgttataaagtatcagatcctgcccacctatcttcccaaagctgaatagatctaccattacttactttacaagacaccctactcgaaactcttcataacatgacatgataccctttctaggactcctgacagtcatattgctcccataatggaacagcggtgtcctcacgcccccagtccagcccataggagaggtaatactttcaacctcactgcagctggtcagaaagagaaggacgggggctccagtggacaaaggttagtatcaacgtttatctgagctagtccgtgcaagccccttataaagaacacatggaactggtccacatggttgtaaaatacttaaaagacccctatgaattatagtgtatagtgtatactatgcagactgggctgaatcgaatagtaactatttagcaaacaatttggttcaacatgatcaaacaagctatgtggaggttggcatacatctcatgaaaaagaagctcgaatgtggagttatttgtataccatgtgtgctatctcaacaaattgcagatgtcttcatgaaagggttacttagccaaaattttgatttaattttgtaaacaaattattcacgatcataatcaatatctatactatacagtatacacaaacttgaggagtatgaatgatattttttatttcctaataattactccagatctaaactttcctaactgatcgtaattctccttgatgtaaggaaaacatagggaaagttaggtcattagccatctatttatgcctctgtttttctcccagcccagcaagtaatgatggaaagtaaaaaaaaaaataaaggttttcaattatttacagaaattaaaaaccaaccaccgattgacaaaaaaaaaaaagaagcaaccaatgagagaataagaaaaccattgctacctttaatgttattgtaccaacaaaccagccttgacggtgactggaagctttaatgaatttagtgcctctgccttcagtttcaaatctttaagaacaacatcacctgttcaaaattgaaaaataaaaaataaaaatattttttaaaaaaagagtacaaattctgggggaaaacgtagacaagatatcattatctttcttgtattaatgtgaaatagtaatacaagcaaaaattggttaaggaaatccagtgtgaagccgagatatcattattctggaaatcaaattttcatagcatttagtttgtaacaacgcaaaaggttacaggtatgtttcacacgtccagtaagtagattgtctccacaggcaatgatattaaacaaatatagtatctagaactataagaaaaaagaaaaggcaaaacgcgtgaaacaagctcataaaaagcaaaccttgccagacactgattcttaaagcttctgctgagagtccatggacatattcgcccaggtatcttcgaagcaaatgtagcacctgccaaagaaagcatgcattaagaaacaacaaaatcttcttatattgttgttgacataacatcttcattttagtctcaactcttaactcaagttatattccactaaaa

SEQ ID NO: 194093 - DNA, 1840 bp, Cannabis indica
gtctattctatttgttatctttaacaagctagtaacaaagacaaaattagccaagatatggtgtcgttttatggactttaaaaggaacgttgcgtcagtcttcacatatatatattttcttttttcctttttgctcatacaaaatagaaaaagaaaaagaccaatattatcatcaccatcatcatcatcattcacaatattaatcttttggtttcttctctctctaaacatatatatatatatatatactaaaattaatgtaatttttcttttggtcaaagtgggagaccgagagacaacataacccacacctatactgcaaaaagagttgctgacctaatttctcaaaagtttactaatcaatctcatcacctaaacatctttctttctttttcttcttagattgcatgctcatctcaggacccatataacatcttcgcttcaagcctctattaggctcttacactcacggaataatgactctacgtcactctcgtcactcatcctgaaattgctgatataggtagtattagtaccaatcaatccatttaagcactcttaaactgtatagtctcgtacttacacaatctcaaaataatctcagggttgcacaacttatccagtattttcccttacagatctagaaactagatccagcgactgtcacacatatttcatcaaaatttcttcaatatgccaaaacggtgccgtttattggatgcatgtcaaatataataaacaacaagtaattaaggaaaggaatgtatattaattgaataaatattgtgttttggtgcggccggcttattagtgtgtcctatattacatttcacagctactaaatttttaccacataatcaaattttgataataaaatattaataagtttggtggataaaatcggtataaaaaaaaaagtaattacagaagttagtagtagctaatgttattattaattaaagtatgataaagaaaaaaaacaactatacatggtacaaaacacacaccgacatttatatgtatatccatccactaagatttgtggacaagtgatctataagccaatgacctttcgagtaacccaatagatgaatattactatatataatttataattattatgttacaagtaccaatatggttttaactttaattattatattatatactatactgaaatgacgtaagtctcaatacgtattaacgtatgttattagttacaaattattattatgtgacacaatacacatatcttaactatatattaatttggacaatattgcgcgatgaatatatatatatatattttttttgaaatcgcgctatgaatatttaatgtaattatttggtaattttaaaataaaacgttatgtatattactccattaataatttattcaacaacaatttattcaacaacaaatataattaattttttttttttaaaaaaaaaccgatctcattaaaactttaagaataaactcaacaaaaaaagttttcataaaagaatatcaaacaatatcattaatcaattataatcataaaaatttgtttgcaaaacagcactagtacaatttgcatagccaaactactaaacataatcttgttagccatactattggcagtcttagaacaacataagaaaaatatcaataaaataattataatataaacaatgatatctttaacaatacaatctataggtaagactcaggaggaatataacattgataacagtaagaaggatagtcaaattccaacaccacttaattgatagccaaaacgatagggaaaagaaaaacgaccatttcgagttaaaatactaaagagaaatgctaaag

SEQ ID NO: 194094 - DNA, 2534 bp, Cannabis indica
tatcaatacagagaaagtggattaaatccattacaatttcggcaagacatgcacgtgtctcattgctaggaaattaggaccgtacgtacgtggttccacacttcgacgtaagtcccataaataaattaccattacatatattattacaaagaataaattaacttatatttataactctagaagccttttgattcacaatgggagattaggaggtatattctaataaaaatcccattcacacatgacgacgaggttttaagttatatatattatcttacaaatcttgttttattcattaattctagctagggtttcgacaaagatatacatatatcgaaggggagagatgagtgaacaagttcaggcggcgactatggcggcccaagacgacaataatactaaagccagtattttttatgccaaagttttcgcactctactggttattatttggtaacttcaatagacagcgcaaagtcaaccacaccatacagtcaacgccggaacaacgtcaaaacgctgttgttgttgatgataataaagatcacgttaccatcgagcttccctcctctgtccaatcaagtacttctccaccaccgccgccgccgtcgtcgccggagaccgagctacccaccacatcctcatcatcaaggtctctgttagggtcttcatcaaattatataccctactttcctttctccaacaggttaaacagctttgatggtgaatcgagtgttgtttcggtagactccgaaatgagccaaccttcaacttcttccccttcttcttcttctcgttctattttttcaggtacaacaggtagaaagaactctaatcatcacagttacacaatggcaaaagattcagatggaaatgaaaagaaggagaaagaagaagcagctagggcaacatttttaaatcaagagttacctaaatttatgttaggcattgctgttacacttttgatttgtcttatgatgttacagtttagtcatcctgaaatctatgacatgaaaaagacaaaacatctttgtctgtttatagccattgctttcgcagctctttggattgcaattattctagggggtctcccattaccttatcctcttttgataattcggaatattggtcattctcttattttaggagcattttatggtatcattgctatttttctatggcatgaccctaatctttttatagttcctgttgtgacctttgtggtttcacttgcattagatacttttaaatttgtcaaggactttaactctagtccttagctagtagctgtcctatataagtatatatataatttatatgtgtatattgaggaattgtattaaattgtaaggcttcttattcctttgaatctatcgatgtatgttgtgtaatttcatgatgaatgttatatgaagggtgttattgtgtgttaattttcctctctttcatttttcataatatatgatgttgtgaagtgtattgtagtgtagtgaactatttctttttttttatttattgatatcgatcattgcaatgcattacagatcgagcatctccgggtaaccattattaatcattttcttcagtctatttgcattttctacttctagctatttgcatatgttagagctctggagttgtttaattaatggcttagggatcagtggtggtatttggatattttcctttattttaatttctttggttaggctcagtgttgatcgctcttgtaaaaattccgttgcatctctctctcttcaatgtgattaaccaaaaaaaattgctagcttcatggaaacgttgttaagtaaatataatctcctaggagaattaaacagctcaatatatatagagcattgctattatgcttaccttatgaaccccaaaaccataccaatgtggtacatgtagttaattaggatacccttagcatttctactagttaattaggattacataggtgaactccaatcctcctttgacctagaatatatgataattaagctcctctttcacctataggcaagacgcgagctccattttttcttggccaaaaaagagtgaggtcaaatccttccttgacctagaatatatatataaggggagatccaatcttggcctaggcgcaatataattacaatgcaatgtacgtacagatggaccgttggaaaaaacatattttagctcatatatataatatatatacatttctccttagttattatttttgttgatttttatcttgtatatagttccttgagatattgagtatgtataaacatcatttttgttatactctgctctaccacaccctcaacaccattttttgttatactcctactacgatcttgaatttcttgtcatataattgacagttctcttattgtttcattagtgtttagggtttgttattactattatgcatggggagttatttagctaagttactataagcatcatcaacaataataataatccactacgtacgtatattatactatcatttggttctagctagatgtatcatcaacaagc

SEQ ID NO: 194095 - DNA, 1873 bp, Cannabis indica
tttttgtaatattaacagaagataagccaacttgagaaaatgctcacatatcaagattcaacatattaaaagaacaaccattgttatagaataaaaagtaatatttacaaagaaagctctgtattagattcagaatagaatagtataaatgaaaacaaggtagttctttcttgtcacacatcactatagatataaattttatggtaagaggacaataaaattgacctgaactgaactatatgctttcacatgtacatattgccctatataataactaatatataaatatataacttaagtagctgtacatagttgaaatctctttatgcaggagttccatccacttagagtggtttccagtcaaacgatacaccaaagggtttagaaggcatacacatctgaacaatggacaagcaataggcaaatatgtctagctgtgaattgactttcgaaattgcaataatttgtctttccacatagctgcatcaacagcaattaaattggttatcatttttgtataatcgaatcacaagcaatatgcaatcgaaaggctaaacgaactaactaaaattttacctgcatctttgtatctttcctctttgacagctaagtcaatattcttcaccaaaacaagttcctgagataaaaaatcaggaccctctacagcactgaagaacacacagatagcgattagagtaactactcgaataacgacggtaaacttgagagattcaaacaattaagactcaatacctgtcaagagatacatcataaatagattttgtatcacgcactctgcccattccatagctaattctaatagcatctgttaccacaatatgtttatttacatatatgggtgcctgcaggaaataatcacaaatcataaataacaaatcgaaacgaaacgaacaaatttcctccctttttcccctttaggtaagattttcagtaatattaccttgcatctatgtgccacatttatggcatcagagggacgagcatccacactaagaatgtccttttcccctggctgcagagaataagaaacttcataatggtactaactagttactattctttcagatgatgaaataagaatcagattccaattttaattaccttactaaaatataatctggcaaagtaagtattgaccactctttctgtaatttttaccatatttacctgaaaattgaataggaagaagtataaaggaaaacaaaaacaaacaataaaaagttcatagagttaaaaaccagtaagaaaaaaattctggattctaattgattcttcgaacaatttctcaagtgttaaggaaagaattcatacttcataaccaagcttctccacaagatttctcataaattgaaactggtttggagaattctgcaagccaaaaattgaataagctcatttttttttttttcagaggtgaaaactaaacaaaacaaaagatccaataccagagagttaaacaaacttacctcttttccatctacccaggtagaatctaccagtttctcaatagcaaactcacctgaaaatacattagagaaattatgaactatgaacacaataagtatatttcatggcatctttttaaaagtgtgtatatataaatatatatatatacttccaaaaaaaatgatattgtgacatttatgtatgtatggatgtgtatatacctacaacaattgggagcaaaaagtcaccatcacaagaaatctttagaaataaagttggattttgaaaccgattaagaaagctttggctaatgagattaaaatcaggtcggaattccttcctctgaacagaaaaaggaaactttttaggaagactcgattgttgcgaaggtcgccatgtatcttcc

SEQ ID NO: 194096 - DNA, 1884 bp, Cannabis indica
tttatatagatttaatttcagttctctttttcctttacaacaaaatccagctggtctttaagaaaatctgaataagatctgggagtgtcaaaacttaaactgcagttctcacaaaatttccagcatgaaagttcattttcttttttcttttacagctttcgagttcgcaactttatacaatgtctggctctgagatcattcagctatatgtcaacacaatgactaaagactattgaactcatggctgtgtcctttgtgtgtatatgtgcgtttacatttcttaatctatgtttgatatctcaacttcttgttcaaataatttgtgcttttagtttgattggtgccgcttaattcggtgttctgatgtatttgagtaaacttaagcttgatgaaagtaagttacttttcaatgatagggcacaactgttggtaagttggatgatgatagccctgaaggatctgataaaaacattggtcaacatcttgctgaaaatgtgcctggcattacacctgaaattaaggccacaggcgcaagattttagtggtgatgttttattggtgtctgaacaacctaatttggaaatgaaagaggaagatcgtgatgacaaatctgggtctctgttgaatattcaatcttctccttgtggtgattcgaaagaacctgcaatttcttcaggtcacatgttggaatcttctaaagtgtcagatgccacaataagcagtttgcattccagtgatcacaagctggaacatcttgatcgcagttttgaagcagtttgtgattctcatacagataagggtgatcaattattgggtgaaacaggtttgttgagtagagaaacatagttctgggtttcctgaagagtattctaatccaggagtagctatgccaaactctcagggagtacctagtcagcgtaaattggtagcttgttccggaaaaacttcttccagctcaaccactcttttgattcctaaatcatccacttctgacaatattaaatctgttgatctaaatgctaatcctattgctaaaccaccaatgacacctgacagtaatggcaatacaaggaaagatcgtgtccgggacgaagatagggttgacttctctaggaaaaatttgaaagagcgtccaaaatcattagtaaacactgttccaaagcccgtgcattcaagcaggagttcacatgattctatttccaagaaagtgactaccgaatcaaaagatagcacacattgtgcttcttccaagacctcttcaactccaataatttcagcttctagtgatcctagtgtatcactccattatcagagagctatacatacaaacagtagaagttcagcttcagggatgccgccaaaagttgaaaaatttaaccaaccaccttcacagtcctcgaaaatgaatcaaaatcatgtgccatctgtgtgtccacctattttatcaagttctccatcaacacttagtgatgaggaggtaagagcagacttcttcttctgccctttttttttttgaaaaatacagtagaatattctagtaattttgcttgacctatctatataaacgtctatgagcagcttgctttactactacatcaagaactcaacagctctcctcgagtaccccgtgtgcctcgtgtccgccatgctggtagtgtacctcagccttctccaaccccaacaagcatgctaaataagcggacatcaagttccggagcaaaagataacatttcggtaagattcttacctgatattcatttgtttttaagtggtcattttcctcctgctttcagcaggtatgtttacatggttctgctatcatgggttttttttttccttgtatcttaacatcatgactctataggttcccagaaggaaattcag

SEQ ID NO: 194097 - DNA, 642 bp, Cannabis indica
gagagagagagagtacatatttatatacataaacataccttcagatggatctgtagtgggttgagttccattctgggctcttgtataaggagcaagaacaaaaaaaacatgcaacaaaaaaataaatatataaagctcctgacatgaaaacttactgtgtttttctctcaatcacaaccaactttgcttaggctaatatatgcagaggaaagaagtaaatattgtatatgaaaatgtgaccatttatgatactgaagggagacagtatataattaaagttttcagtcttatttgtatattattatacaaataaatacattggacccccacactttcaaatggtggctaagcaagttgacaaacttattgcttgaaaaattaatttctttgtttttgttatatgtattctttatagaaagataaaatatagttttcatatatacacatgcgttgattggtattttgagggttgacaatattgaattgtgttttaaataaaaagcttttccacaaatagcaaccatgcttacatgggctccaccttttgaaagcaaaataagtgaagaagaagaggaagaacaagacttggtcaaacttgatgtgaattactattcaagtggtatattatctctatcaaattct

SEQ ID NO: 194098 - DNA, 679 bp, Cannabis indica
attgagctctaagcccttgctgagggaaatgaacggcaagcctggatcaacataatcagcaattccggctagaaaagacgagctgaactgcactaaccatagacagatttaggtatctgcccctattttatgcaagatgttgtaatatgaaaatcaggccatgagtacttttgcagtgactgaaacagcactaccttaagtaaactaaattttaattttatcttagcttgaattgagggttagctataaacttattcgaaaatttgaagcagaaattaattgaaatcattagtataagggaagtgagaaacctgcacaggcacagcatggaggcaatagtcagcaccaagcaaagcaactttagcatcagtcgttgcaattaaattttctggaagcttgtgttttgggaagtatttactaagaaagatgagcatagaaaaagttttaacacacattacatataaatgtatatgcactgatagtatagcataacattactgggacataagatttgggtgtaccaattataatgattctcattgattgattgacaaacttgaggatcacgtacaagcatgttaacttccagttgggactttctttcagcaacatgagcagccattgctgtaccaaaagatccacctccaagcacaacaatctaaagggccaaacatgaact

SEQ ID NO: 194099 - DNA, 941 bp, Cannabis indica
gcaaggggaagacctccagcctttaacaccacctttttggcaagctcaatatcttcctcattagaaggacacgaaactatttgggtgaaaaattcccagctctcttctgtggttcttagccgaagcgggtgagtacttaatggattcgaattcgcatgagaagctacagctttatcacgagtggtgatcaaaataatgggtctagtgtttccatctgacaccactgcaggtttgagtatatcccaagcttttttggacaacaaattgtcaagaactatgaggtggggcttcgcatcacgttttaagaaaccttgcaactctttgatccaatcttcttgatcactcttttcatcttggggccgaaggatctgattcccaacattgcggaggagtgaaacattactcatctcttccggaacagaaacaaagtgacgacgagtatgaaatttgtcgatgatggaatcatggttgaagagttctttaacgatagttgtcttaccaactcctttcataccaacaacagaaataactaagccgaatttattagtatcactgatcattttcaaaagtttcaggatgtcaacctccaaaccgaccgtaaagcatgaatcctccatcaccttaatcttgtacacttctttgcataatttaagatgttcaagcgtttcctcaatttgccggatacgtttgatcttcatgataggcttgacttcatgaaacgtttccgtcaaaaactcaaggcaagcttttcttgtatgaatggcaacgttagttgcctcttcttcgttcaaatgtttccgagtattctgcaattcgactcgcagattgttaacggcttcatcatcaagctgctcctcatcattaagttggtcaggaatcacagtaggcgtaatcaccacatcacggaaagagtctcgctctctcttgataaaactaaaacc

SEQ ID NO: 194100 - DNA, 2855 bp, Cannabis indica
aggttgagggtctagagaatcggccggcctaacaggttagggtgagaggccgctcccttcgccacagagctcttggaccaggttgtcgagagcgcctccaaactgcccacctgtagcagcgcggatgctttcgcgctggctcattccgcaaagtggcaagccattggggtaggtcttcaggatgcttgcttttttatttttccctgtccttcgtattggtgtttcaacctattgactgggctttatttcttaacaagcggccttgctggctgaaagggccaccgtggaggttggcacgctggtgacagacttggagctggtcaggacgtcaaaccgtgacctgggcactgccaacgagaccctccgacaggagctcacggatgccaagttctagatcgagggcctgctataggccaatcaacagttggaggaggagagtgcccgctaagctcgcttcatctaaaacatgaaggttgttcatgacctttatacagagactgtggaatggatgtccagcgcaggtccttcctctccgtcaggtggtgcgcagccatgagcctccagccggccttttatttaatatgtttattttttttttcaatttgtgtatgttccactccttaaccacactctttcaaccacggagacaattaactttgccctggtcacgggaggcttttttacagtttgagtaggatatatattttcattgttcctttcttagagacctgttatgatacactgtttaggggctggttgcattttttgaaacatctggttccaacggccagtgtttcaacctttttctcttagcctttggttgtctcctagttggctcaggaactgtttttcatctggtcgttccttttcgagagcagcgatgctttctggctcgcttcctggaaggttgcttattcggcactagccaggaaatggcctctctctgcaaaacaaggccttccactgtcccctttcgggtctagtcttctcataaagtcaagcttcgggagcattgtctgcgattgccttaagcattttcctttggtcttttttagcttctcattttgaccttttatgcaacttgctaggctaaactcctcgtggagcccgtggagatgtgtaagaagagactcaagtgtgtttcttcgattttgaaatttttttgcgaaatgggcttcttatctctgtgtttgcttttgagcttagcttctgagggaggaactcaagtgtattttccttcgaggagactttggttgagtatgttccccgcttttgttgcatgttgggctgaatgattttggcaaatggaagtaggatattgtagctgtcgacaactgaataaatcataccccccaaatgagctgggaattatggggcttagattctcggtcatttgcattgagtctgacttgtgtctccttccaacttctgaaaaggagtatcaagcatatctttgcctcacaccctccttccgtggacgtctttgagaagcgcagggtcacctgcaggcttttagggagcaaaaacatgagttttgagtgagtacccgatttatatcccaacaaccatttgtctggtgcaaatctcataagggaaactctaggctatttgtagcatggggccattggttttcccggggggagagctaggcgtgctcccttaaacaatcttccttgcgttggggtttattgcaacgaaaaatcatgtcgagtctcgcagtagcaagctttcggctttcactaagaaaggcggaaagcgcgcatgagctaagacattaatttttctagtaaacaccaaagggcgaagtattatttggttcacaaaagtcatgctaaactttcatgaggcaggcttcgacttccaggaaggaaggctgaagttgcctaaaagttcaagcctaaactttgcttgaaaggatcaaggggaagagcatcacaaggaatccttgtgttttacaaaaaatattgattagaccctctattttttaaaaatgataaaatagaccctatattttctaaaatagtataattaagatcgtaagctcaattttctacaattccttacccaaacagatgtagaaaatgtaactaattttatcataacacctctacattagattattattaagtttattttgacaaaatatcaatttaaggtactattattaatatttttgtaatcacgacacgtgaattttaatcaagaaaagtcaagaagtcatcagctgaccaacttcttaaactgatgctccaggacggtaaaggtcccatctcgcggaaagggcttttatgattgggagttccttaacttccagcaacggagagagtatccgtgaactgaagacttccccagtcccaagaaccaaagccatttgttcgccaaaagagtaagagttttttccagaaggaccaaggcatgctaagatgcgtcaaattgagctacacccttagcccgcaaagactttccttgtacgtgtcagcctacggacctagtgactaggcttttttaggtacatcgtcaagggttgtctcccacgatgcgcaatcgtacagggcatgtgcgtctcattgtacttggccaaatgttaatagctagggataagggaaattcaaaaaggaaaggccttgggatgacacgcgtatgacgcccaacttgtacaatctgacacccttaaatgccatatgaaaaaatgccacctaccaatccaatgcttagatttcgcccaaggatgatcgatccaagccagaacacgaggagaagttggcctataaatacccttgtaaagcacaacaggaaagggggatcttttggagggcaagaatcattctttgccaaactttgcaagcacacttgta

SEQ ID NO: 194101 - DNA, 1868 bp, Cannabis indica
acggaaataacaaaaaaaaaaataataataataataatatcgaaccaccaaacaaagtttgaggaaacatcaattacaaactttttgaaaccaaaataaataatggaattaattaatttattctttctgaaaggaaagaaattaaaattttgatttcgttaataatttcaatttatttctattttttgatggaaattctttaaaaatatagtaaacccggtctttaagaacgaatagaaagagggagagagaaaaaacttacttaatttcccgacaggggatccacaaggactaaatcccagtccaagcaaaaattaatctgttagtaatagtaaaaaccaatcgtaattttgtgataacaattaatatttatgaagatggaattttatgatctgcgttggaccttctggagattactgatttagtttttggaacccgattgaattaatttggcataagatccatacggcatgtgaaattaattgtgccaaatctccaaaattttaatttgattccaaatcgatcgaaaagcaaatcatcatcaagaattactagtactcctctaaaagctgatcaacaatggatcgtaaaatctgtaatattatatcgtgatcatatatactcttaatttgctgccatttatatagtactcactgttcttgaaaagtaaaaataaaaaatcagatagtattgcaagattcgtaacgataattattgtcttgatcaaataataaaaattaaatcaataacacagtgtcacaaaagtcaaacgtcaaaatatataagtgctataggattaatttggtcgattatattaataaatagggaataaatatatagagatagatatatttaactccaatttacattgcaagtgaaaacatcactcaatgaacagattttatagcaaagatttttgcctctacagtacatatcaatcgtacgtagatattacaatatatatagtagaaactctttttccaaatatttcatcagaatttagtatatattatatatatttaattctcattactttaattatagaaataaataaattttttaatacaaaatttattaattttttcgtaaaaatttagctaattataattaaataataaaaaaattaaaattttatcgcgtagcagcatgtctttaggaaactttttctggaatctccacttaatttatctttctaacgtattatggttacttttccagatagattttaacttttttacatctacggtttcgaaagatatatatatttatactaataaatataagcttatctacttatatatcatggaaatatatatttatttttcaaacaatatgtatggaaaatatgaataaacgatattttttttaaacgatatcttaattatatgtatataattatgaatattgaaagaaaaggaacgaaaattatgtgtgtatatatacgtacaacgtacatatatagggatcatgtgtacaagccatatgcttaatcttattttttgcatatgttcacgtacaacacaaatattatgagtttccaaaatattgttagaaccatggttacgagtaacatactcgctttggtaattttatgttatgtattcattccaaatattgaaattgcatatggaagaagattacatagttcagagttaggcaagcttaagggaacgatcaaaaccatagaggttgtaacctttttctccattatgtttacaattaatctctttttcttttaatttccaatatcatgtttattatcatcttttcacatatagaattagagatatatcattcttaaaatttgttctcattcagttatatacagccaaaatcaattaaaaattgtgtgacttttttaacaattg

SEQ ID NO: 194102 - DNA, 1354 bp, Cannabis indica
ggagagatcattgtcaaaacattttagagtattttttattcaggacaagatacaaatataaatatattattaagataaaaaataaaataaaaagcatcaaaatttcatagaagctcgtaacaagttctcatctttttaaaagagcttactagagatacagaacctactttgaaaaactatccaaacagataaatacttctaaaaactgatccaagcactcccaaaagtaatttttggcctctaggcgaagtatcgtgttgaatagaccataaggactaaatttaaagacataaattaacaaatcaatttttttcctttcaaagagcctaaaaggtgtgttacaaaatcaaatgtgcaaatcacaaaaccacccacaaaaggagctttctaacccggtatccccataatagctttatattgctatgaactattaatgtagcttagttataccttacaactaaacactcgtactcaatccatataaaactcaaaaggcaacaaaggttctcacgtgatactgtttctagtgcaagtgactggatagaagagagagagagagacaaaatgcaaattacataatcaacactgattgtgtttgagaaatggccacaagcgaagggaaagaaacagaaaacatgaaacaatacctttttgtccctttcattggcatgtggccaacctgcacattttaatgtactttgattgatagatgctgacatttcaacaagtttatcctctggtagaggctcccacctactttttgttcgtctacttggaatctttaacttattttccaatgaagaaacatgagtcaaactctgtacgttgctgcaacaaaagatacatctcatggatcagttgacaacactgaaacctgagacttgagtaaacaataattctaatgctatatcaggtgtaaattagccccagccccacatttacaacccaaaatctaaccaattggttggctcgtgcttgtaaatgttgccatcaatatagaacagaactaagcatggattttatatctacctcttaatcggaaatgaaacaatgtccttaacattaatacacatgtagcaagtgcgggattagatgagaatgagatcaatgtccaacaacatacaatgtttcaattttaccaataaacattagttaacttgttatgttgataactaatttggattacataggaaatgaatatataatagaaataaagtttggacaacaaaaatacaaaacaacaggccaagcacatacatttcagaaaaaatttagtactacttacgtagcctttaaaaaaggcccatgtgtaaaagaggagaaagagaggtgaaagtagagagagagagagaga

SEQ ID NO: 194103 - DNA, 977 bp, Cannabis indica
gagatatcatgatcttacaatttcctggatcaatataggcaatagagacaagaaatccaggacccaaataagaaaagaagtttttccagctcgtcctctacatttaaccaaaatataaatcagaattattaaagcataaactaccattaatcaaacaaaacacctctcaaaaccaaagtagaaaactttgacagtttatttcaaaaataaagctcactccaaaggtagcatatttgaaaatataatccacaaattattttactcttgccctggagtgttttacttttaactagttaaatagtcacagcaatttgagcttagcaattttgcttaatcttttcttttagcttttgaagttatcttttactttggtagattaaattaggcaaagcatcatataattttacaaaagtcaattactgaaataggcaaagcatacacaacatgttgatatgtactatgcatagcaaaatgcatgacaaagaataaaacaatttccaagtacgtaaattcctgttgaacaaaaagggcccatgtgctcattgagacaaaaagatttaagagtcaacaaaatttcaagtttcataatctcacgacacactcagctttttgtttttggagttatcaacatcatgagtttctctacattttcttaaccaatattaagcttttgtcaaaatagaagagctacctaactcaactcaatatatattatattttaatttaccatcttgcccctgattttggagtgtcaccattcacaatatgaaggtttcagcttgttctttaaatacttttcatcactcattctcaaagatgactttttcaacttgatctaatttcactgagcaggtgagtttggtaaaagaaaaagaatacccaccttttaccaagtaaataaattagcaaaatatttatactcatccacagattaacaaaacacttttccccattgatcaaaaagaaagaaaaaaaaa

SEQ ID NO: 194104 - DNA, 2024 bp, Cannabis indica
cagcagaaacagagttaaagttctgagtttgcaatatggggtgggaattgacatcttcatgattcatcaagtcaccactaatcgtagatggatcagtgattaaaaaacccaccaaccagaccctgaattgggttaactggggtaggtatcataacacttcaagaatttttaggggcacttaggcatgaaacagaggctagatgggagttaagaagagctgtaaaaccaacagagtgagtgagaaaggggttcactacttgtcctccttgggagaaatcagagaggtctacattaacaatggtaatggctggggcatgaggatactggaatggcaaagggtttttaaacagtttctccttaccacgaaggaggagatcataaggacaaggtggcgggacaagagactcatcacacttttgtaaataagcatgacaatattttttagtgtgatcaagtttgccacaatagaaatagaaatcagacaatctttcgtactttaagtctaaccacttagtgaattccctacccatcttaagaaaacaaacatgaatgccacatatgattggcttgttaacatctatgaggaaccaaaccctcaaataaggtctagttccatcccttacagtggtgctatctacttgaatcagatcacccacaccgtggcaatgagtttagccgaattgtatgacttacaccaaaatgggataccatagatttggacccagaaaggaacatagtgtagttgttcaggggtgataggaaaagaggagtcaggggtagaaaatattgttaggctttgagataagtgccgcggttggccatctataattctatgcttatcaccctcacagccaaaggtgacaaggaaaagaccttcaaagtggtcagacacaataacagggaacctacattgagaggtccagatttgggagagggttttgatcgaagacaaaataatacaccaaaaaatataaataaaggaaatatttttgcacttgctaatattttcaattttaatatttatgtaggaatttttctcatgacctagtactactacactatctttaaaaattaattattttttttttcaatgatttgaacaatgctagaaaattatcctcaacgatatgttaataaattacatgtattatagttttggataatatgatttaatgaagatatttttattcaattttttttctcctgaattagttaattataatttttctttattaattttgataaaccggttattattattatttatttattttttttagattttaagacaagaaatttaaggacacgttccactatgtaaaaattaaaaaagaaaaaattctatagtaacatttatttattcagtatttattagtggagtttttgataaaaggtggcttagacattcattttgcaaagagaaaattacacttcatttgtccaatttttttatgggctttagctttcttttatggtatttattatgtcatatttttgttatttttaatttcaaataccatattttattttttgttgtattatttttcggtcaaactctaattctttctaacttgtttctctctcagccaatgcaccctttcttctctctctctctgacgatcgctagttccagcgattgatttaggtccggtatttaatgatgtgaccaaacaataatggagaaccctactccttctctttcggtatcatcaattcaacttctcctctcccttgtttggctatttatgtgataagcccctattcatatttgtttaccattgaaaaagagggcctaaaggccacacttaagtctttcagttgagttttatccaaattattttaaggaaggcctgagttgtctttgcgtattagtcaattgggtttaattaaaacttctgatgtaaaaagctgattatatatacaagagattagaacttattaaagaagatagagaattaagtattgagagaagtatttgggatagagcagccctcttcaaaggttgtgtacttagagagactagc

SEQ ID NO: 194105 - DNA, 1320 bp, Cannabis indica
ttttttacaactaaaaatgaggcttttggagtgaaagagttactcagttggataaaggagtctaaggtttctcaagtcactgccgaaacggatagtctcataacagttcaagcttttcatagctcagtgaatacaaactctcctttcggctgttgcattactgaatgcaagagaataatttcagatttaaataatgtttgtttatgctttgttaaacgttctgctaaccgtgtggctcatggtcttgcccgagttttatggttatatgttgagcgtagttattcggttgacgctattctgaataacattattgatgtaattgtacaagaattgtcttaaataaagtttcagcttttaattaaaaaaaaaaaaaaaccaaacaaacaaacaatttttaagtgttataaagccaaataacccctaaaatattctcacattctctatgtgagctttattattccccaccatttgtgagttactaacttaaaatgatacataatttttttttttgttagacaaggtgaatttattatgatcttccatagaaagcaacatgattttaatttggtgaagagaacaagttttaggagttatgaaaaatatattttctacatgcttgtttttgtttttttgtttacttaaagtatatattatgtctatgaataaaataatattttggattgagtttgcaatttataattctatattactacaaaaacctattgattagttctcgagaaaagaattggcataagatttttaggcacaaataatttggagttgagtattgtgatataattatacattttatactcattaaaattcttactttcctgcattttgtacacatttttaaggctctagataaacactacaataataactatgtatataaatgtataaaggaagaaaattgaaacaaaaaaagtagtaaaagtagactttgatggaattatatatagatattaagaggataaacaaaaaccaacaataataataatctaactaacaaagtagtgagcatagaggaggaagatcccaaagagcatcatcaagatcatgatgaagagcttccatgtactcatgaactccattcattgcatatagtgaagctgaaatttgcctttctactttcatcctttcaaactccataaattcatcaattccttttgtttcactatccacattcttaatattctcaatattatttgataaatcaaactgatgatcatcacctgttatggcaaatgaaaattgatcaaacccgtcaattccccatgtacatgtagttcttaagtccggtttgtatgcatcctcaaa

SEQ ID NO: 194106 - DNA, 668 bp, Cannabis indica
acatgtataataattgtgtaaaaaaatgacactcaaatattatttataaacgaattgacaaacaccgtgtaatttgtttataaatagattttatttatatatatatcaatccattaatatattaatgacatgataaagtactaaaataactttaaataatttattagcgggtcaatttttgacacgatccaaacttatttaaggcaaacttaaatccgttaactttcgtacaaatttcaagtcgtattaccgtgtgtgacgtattttatcgccctttaagtaataaatactcattattggttggtgctccataatccaaagcaatttaatataatgtatttattatgttattatttggaaatgcataggagatagatatagcatatatagccgtactcttctttcaatgaaagaggaataataacaattttggaaagttaggtaagttgagaaagagagaaatgcagctttactcaagagccaccctgattttgtatggtagctctaccagccactcttcttctctgtccattggtggaactatgtgtccttgtggagtggccttggccatatggcccccctaattttttagaagagaaaaactatatataagttatataaattaaattagggtaattagattttagttattagaaaaaaaaaaaaaa

SEQ ID NO: 194107 - DNA, 2702 bp, Cannabis indica
ggaaaggttattgacaattcgatttgtctttgtttttttctgtgattaatattaataaccttggatgttacaaacaaacagtaaaaaacaaaactaaatctaacctcgcttcgcaaaaagtaaattacgaaaactttaagaaaaaatgactaatttttttttgaaaataaacgtgaatgtaccattaataaatagagttagacctcgcagttattacataaaaagttctccggaaccgaagaaaccgaaataatcccatacaacttgttaataaaagcccaattagccacattgtgggctgcaaaattacaagttctgttaacatacatgaaattacaacaaaaaaaggagggagagaacttaacacaaaatgagatataatagaggactaaatttagctttacttcacaattactaactctcctttaatagagaacgaagtccaattaaattataataaaatgatagaaattttgcacaaaatttgtagagaaatacaacaccatctaatgagtcaattgtgaggcctgaaacttctgaattgtggtggtatgtgacacacatttagatgcatctcgaaaataaatttaatttttcacttgaaccacattatttgaataaaaattgaaagagttataactatttttctgagctgtgtgtattgtaaaaaaataactacgagatcaaccgaactcttgggctttaggcatatatgacgaaatgctttaatgatgtgatagctatctttagtttattctttgacatttggtaagttcttctagcaattttactttagtaagcggcttatcggttaaaactttaaacgaatggacctaaatgtatggcctcagtatatgagaggtcaatactaagcattttttcagtttttcaatggagtggatacctagactcgaccctttactcacatagtaaactgagtgtatgcttgttaaaaaatataaaatttaactaatttttctgccaatatctctattatatatcatccatttttaaatataaaatatgagtatatgtgactgactataattataatatatagatttttgcgcaagagcaaattaaaatcttataatattcatatataagctaattaaaaatttaatttttttccaaattggaaatatatgtttcattgtttgcttaattaagggttttgttttttttttggttaaaatatatataagcgagatttgtcaaattaataacgtgaagtattaaaatttgtaaaacaactatatacttaaattactctaagcgatcataatgacacaatataaatttatggtgattttataactataatgcttgttttatggtcacacaaagtaactttaatcgtgtgtaagatcatttgctaataaatttttttattaataaaaaatttcataaaagttatttttacaaaataatatatatataactatactaataaacattgaaaattttcttctctttttttttaatctggagaaaatgaatgaataatgaacttttgtttttttttttttgtaaaagggaaatatttaactatttgaaatatttgtttttcaccctttatgagaagaactatatgaaagttcctatataggataaagttacacaaattttataaaaccttaattacgtccgagttacggaagaatggaatacgcataatgcatgtaattttaattttcataataaaaaatattatatatagcatccactttaataaaaattttacttaaattacttcgactatatatctaaaaatcatttgtttttttagtatggtactgcttaaattacttcgactatatatctaaaaatcatttgtttctatggtactgattttctttggtacttttcttccaatattaacatctatacatacatcggtagcttctatgtatatataaactcgtaaacaaatgaggaaatgagaaaccatatattcattgatatatagcaacaacaaatgctgtaacccttttgtattttcttgggtaaggtagaacctttgtttctactaatgaatttatttgtggtttcatcttttgccaacttaaggctcgtttgaaatgtcgtattcgtattatattgtattatattgaattgtatttataatattttttttatgtaaaactatatgtagtattaatttttttatagacacctaaatatataaattttagtataattaaattaaagtttaacataatattatataaaaatatgatatataatctaattaaatataatacaatacaatacaattgacataatacgacggttccaaaagagcccttaatgaagttgttgctcatagaaaaaaaaattatacgtatagaagtgtagacacaaatttgacacatatatatatggcaattggcaaatcatttttgatagatgagactaattttactttaaagatatgattactttgaaattaattgatatatgggtgcacgtattatccaatatttaaaaaaaaaaattcttatatatgcttaatttttttatttaattaaaaatattttttatatttatattatatggactgattttattctatcggctgaaaaaataatatgaaaaaaggcttcttgacaaaaaaaaagttgaatttttttaaatttttttaattaagtagttaaattaagtataaaaatttaattttacttttattaattatttgttat

SEQ ID NO: 194108 - DNA, 1369 bp, Cannabis indica
ctaacttggttgtgatctttgttccttagcttttcctacattctcagctgtatcatatattactaagttactgagctccatgtctaatttagtcgtgatgctctctccatcacccatggtatatttgtccaacttgtgaaaatgatctcctgaaactttttgaaatgatttctttgattacatagattttaagctgaagtatgtcattttactagtttaattaatagcgttgagtaatatatgaaatggttataaactaaggacaaaggaaagtaagtgaaaaagatttttaacaaattatatgtcatcagcaatatcctttttaaaaatgttatttattctttggcccatctaagagtagatggctctgccactgcactaaaatcacccctatttccaatcagtaagagggaggtgggagagaatgggcgagcatagcccatagtctcaagtaagacaccaaaatgctgtactatcttaattgagacaccaaaagttatttatttttttcttttttatttatggttgtgttatttgtagacacaagagttacctgcaactttttgataaaagggtattcccgttcatgctctgttttccatttagacgagaaattttcacacggtttgtatggagaaaatgtgcaattactacctgcaattactatgccaatttcctaaaaaaaattcaaggacatatcatgacagcaatacacattgaacaaacaatagttattttatttaggtgtctcaatcaaaaaaatactacaaaatggtgcatatgcatttttttaatactaaaacggaattccaatagtagtgtaatgtgaacaaaatttggtacataataaaagttatgataggagcatttctaagggaatgcctaataagtgatacaatcttacattttaacatttttttaatacatgcttctctaagactaagactctaatgtagaatcaagtgttaaaatataacaatacacttaggagtgtaaatggatcgggtcagatttaatttgactatgatccaacccgatcatgttcatgtaatgatccaccctgtcctgctagactagatatttggatcgaatccgacttgggttatttgaattgggttcgatttggccccactttaaacttagttttttttaattgagtttccaagagtttgagagcaagaatcaaaatttaggttactagaatctactcctccaatagtgagccttcataaaaactctaaatggagttccccaagtaagagcaatgagagataaaatatatatttaagatgggactcaaacaagcctgaaaccctttcaagagtcaataaatcaattggaaaatactatgggcattttacaattttgt

SEQ ID NO: 194109 - DNA, 1171 bp, Cannabis indica
gatgagggtttgtgtgtgcttatatttagatagaactgataagtgagaagacacacaggtttataaataaaccagccaatttaaattttgaagaccaataaaccatcctaatttgtaatctgaaccgacgatatctaatataccaattttccaaacaataattaatgagttacggcttacgagggaaaagtaatgaaacgatatcattaacttaacagcattactacttaattaatattatactttattgtgccacgcgaacacctactgtgcaggaccagcagtaacatattttaagtttaaaaattaattttaaagaaataattttgatttttctaaaagaaaattttggagttaataaaaaattaatgcattaatatttgtggttaaattttgtagaatttggaatgagctaaaattaataggttttatctcacaaaatcaattgagaattagaggattaatctattcatcttctatataattatacaatgataatttattttcaatacattagcaatctactctaataaattttaatcgtaactaattttattttgttcaaaggaaaaatcattaaatacaactattattatacatttcaaagattatgtggaaccaaaataggacaccattttagactcaaatttaaatccaaacttttaatatccaaatagcaaatgtgttaatttgttcacttggggaatcactaggcacacaacaaaagttcattcatctaagaaaacctgtaaacaaagtgatagtattcttgcttcgaaattatatttacaaaagcataatcttataataaccaatagtttttaaagtgtcccacgaagttttcacatcattaatcactttctctgcttgttctttcttgagctcacaaaacttaacatgatcctcttcatctctaacaagtgactgttttgaagtagttgcttgatcagccaaaacttgaagcatcttacctagacgtgtcttctttgctttcctttcggttagctgtctttctagttcggcaatttcatgatcaacagcctctgcttgtttccttattggcaagaactttgaagataattgcttcatagctgttttctgatcatctatggacttttccttctcttggatttctctcaagtcttgtttggccatttcatattgctcgcaa

SEQ ID NO: 194110 - DNA, 1247 bp, Cannabis indica
tatatattattttttttctttgaaaatcattccaatatatactaattagaaagaaaaaagattgcatgttgggattctaatatctaaatactacgattatttatgaaaaaagtttaaaatggtgctggtcttacaacgtacaaattatatatacaaaataagataaaatttccctgtgtttaataaaaaatgctttgagaaaaaaagtacaaacctaaaataccaaaacatgaaagataatcaaataaatgataaaataaatccatgtttaatgttaagccacgaacagccatttctatatttattactgtaaaatctaatttaggaattcatggcaattgttatcaagctaagcctcacaaaatatacaaccacaacaaactataacaaaaatagaccaaattaaaacaaattaactgaatcaacactcacaaatttctttatataaaaatttcattaaaatttgtattaaaccccaaacccaaccaccctctccttaatctcatcacatattacagagagacctgagaaagaataaccaaatatatatattttttcaaaattataataataaaaaaaaattccaaatattattattgtttggagttagtatagtattttttttttttctagaaagaaaatttattattttttattattatataaaatatggctttcaacgtgtgtaaatctttctcaatggtctttctgggaatggctattttattagttttagccggcccagcccacggccgtcggctcagccgtaaaggtcgtagctcaggcggcgatatttgccgtggagccgactacccagccgtatgccgagccgccgttaagggccagaagaacccgttcgttgccacacaagtggcgttaaagcaattgatttcgtcgactcagggtgcgaaaaaatcggcgtcaaaagggggaaaagggtcacaggttcttgggatctgtaaagaaaattacgatgatgcccttgataatctacagtcaagtttgaacaagatgagggcccacgataagggcagttttaatagctacgtgtcagcgtcactgaccgattttgtcacgtgcgacgatgcgttttcggaaatgggtataacttcaccgctctccaaaaacaacgcaaggctccgccgaatggcaagtaatatcttgtatttagccactttgtggcgctaaaacacctaatgggcttaggatattgggcttgggcctcaatttgggctttcatatttttt

SEQ ID NO: 194111 - DNA, 1764 bp, Cannabis indica
aaatctaattttaaatttaatcagcagagatgtgaatatagcaacactctttcgttttttttttttttcaatatctcttccccaaaatcagattgcgttgtgggagcagagttggtcacaccaaatcaaatagctacttttccctaacatcttactagggctagctagacaaagttcaactatttgatcttttcagacataatagtttgaatagagaaatatatggacaaagttaatttaactatttatcttttcagaaataatagtttgaatagagaaacatatggacaagaaaatagatggttcctaaaccctaatatatatatagcttattttgtctcagccaaaaaaaggataatttaacttacatatacgtacgcaagaccaagaacttacatatatttagtatatatattgtttcatacacgtacgtacgtatgaaggtgttacgtttaaccctaacgagaaagatctgatcagcatggggagagagaaaatataatataaattatatataggtgtatgtgttggaatttggaataaggtgaatgagcttccgtctcaaaattaattggttatgagtggagtagtccattgatcttatatatgacaatttattttcacacattaacaatgtggtagtaactctatacactctccttatgtttgggcttgaaaagtctgggtataacgaacgatctttaagaggtcacataaccgaacatgacatttgaaaaaattccacaagaccaaatatcaagaaatttatgggtgtacacgtttgtgaattttgaaacaagtcaaagacccaatactggaaactggcatagattagctaaaggtcccaaatggaagttaaaggggacaacaaaagtatctttttagatcgacaacactttggctcacaacggattacaaatgatttttttggaccgatagcactttgggctcataacagatcataagtgactttgataacttgttagaatttgggataaagtgattgaggttccatttcaaaaattaattgactatgagaggagtagttcattcattttatatatgataatttattattttacattaacaatgtgggactaactctaatgatatgtataatagtactttactaatatttatagtaaacattttactagttttcaaatatttttaagattatcatcattaaataacttattttacacaaatatatatcagtgcaataaactatttaaactgacattataaatttcaaaatttattagttagagggctatatataattaaaatggtacccagaaattaaaatgacatatatattttgaatagtatagtatatatatagtcacctctcattggacaagagtatgactcataataattacatacactatcaaataattttggtagtagtaatgcaagaggatgatgatgatgattatatgaaagaattcacgagtttgtactagaattaaatagctttatattaattcctataatattaataactgatgagatagtacgagaatatagtactgcacaaatatataaatataatataagttttggacgtatatgcattacagaatatttattcaaatttcagtacacagtactactaattaataacgcattatgattatgaattaaggatataatattacaaaccctagaaaatatcagagacagcaacttaacctcgacttctcagcctctctctcttacagatgtcataaactaatacctgcgccaagacataatttt

SEQ ID NO: 194112 - DNA, 980 bp, Cannabis indica
agaatacatataaagtctgaattctaaattattgaatctagaaaaatatataatatcagttacttccaaatgtctttttaataaattcaaaatacagtctgtactgacgaaactgaaagaaaattacagttttacaaatattgtgtacttataccgctaaaaataagcattaagtttatgccgtttacaaacttcaaacattaggtaccgtatttactcatattgttattcttcatattttatggaaattaatttgtatgctctatctatgttcctttgataaaatttccttttctaagctatgatgtatgaatacattatctatttaattattttttcttataataatgaattatatatatattttgtgtgtgttaacgttccttaatatatcctaaaatatagaccatatagcatcacgacactagaattttattctgaaacaataatttatacattgttttttcgaataataattatacattttcttagcaaaaaaaaaaaagaataataattgtacatttggtaaagtatataaatgtatatattcacgaaacaattatttttgtgtgcattatatgtataacgtgtagtttggtccagctttttagcacaagcccagcagcgccaatttactgaaaacagctagctgagaaaattggtagtagggtcacaccccaagagagtctcaaatctcatgcataaaaaatatgtttttttttttggttagataataataataattattaaataaataaatatccaagttgtaaagccacctcaattatctcttctcaagataatgcataatgtgtgtgcatatatatatggcaactacagataagataatatgatagaaaccatcatgtataggctgtatctcatatatatatttattgatatgaaagataatttagtaatggaaataatagtttggtaactgttgaccaatattcctcattcttcacatgcatatatat

SEQ ID NO: 194113 - DNA, 1156 bp, Cannabis indica
ctttatctagttcatctcctgaaaattataaattttatgaattttttatattattagtgcgaaaatattaatttttttttctttttaaactaaattgttttatggaaataattaagaaaaattaaaaaaaaaataagttactttacacttattttttccctttttttttcttgtaaaattttcctataaaataatatattttcttgggagacaaaaagatcatatttatacaaatttataatttaaaggccataaacataaaaattcccccttttgataacaatctacccaaagacaattgactaataaaacacctatactaattttttttaacttattttaatttaagttaccttttctgaaatccaaaggcatcattaaatagttttttttttctaggaaaaagcatcattaaattatttaattaattaaattaataagaggtacaatctaacacaaggcaaccaagtatatatatatactctaaaaaattatattgtatatctattttattttaatttttataattttttaagatatatttactttaataaataatgtctttatcatttttcttaatgtaattatatgctaaacttcagtaaaaataacaatatatttaacaatatacttacaaaataaatatatttaataaatataatataaataatttaattaataaattagaaaaaaaaataattctcaagttattcctacatacccagcccaagcctcaataacaaatctcattgattccaatctcaaaaggagaaaaagaatccaacggttatgattcagtcacgtcagcgaccgatctccgagaaaatagatgagctgatattacgaaagtacccttatgttgtggagacgtcagtgattgggtgatgtgtcttttttgggcatttcaaaaaaaggagaagagaagagaacgtgtgatgtctcagtcattagtgggccacgtcacttgtgttcccccaaagctaaaatccaaatctatcgacatttatttattttatttttattaataatttcatcaaatatatttaaaatttaaacaaaaattaattagtgtagtatagtatgaatcactcctcctccaccagctttctaatttccatatataatatttgtttaaaaaaacataaacaaaacaatt

SEQ ID NO: 194114 - DNA, 992 bp, Cannabis indica
gatggcttttcgggttgttttaactgaaaatgttggagttaatagtaggaaataatgtctcaaattgcattcaaaatttctttacctcgggcaagttggatcctagtattattttatttgcctcattcgtaaggggataaccaggacagtgtggatcagtttagaccaattgccttgtgtaattttgtttataaaattatctcccaaagattgaggctggttcttgatcgtttaattgctcatgttctatcggctttaattcatcctgagagatggattgttgaatagtttattcttactcaagagattgtcaatgttattgagaaaaaaaaggggaagggaggtttgatggcgatcaagatagatatgaataaggcctatgatagattggagtgagactttctcaaaaaggtcttggagttgttcgactttaactctcattttatgaagttgattatgtcttgcgtatctacgtactatttcatattccattttgctcaacggtagacctttgaagaaatttcacccgagtagaggcatattcgacaggggacccgatgtccccatatctcttatttcttctgtataatgaggttctttctagattaatttatatagaacaaagcaatggcaaaattcatgatatgatatttgcggatgacactatattctttttgatggctaatgggtaggaagcttctgctttgggaaattatatcaagacttttgaggggtggtctggtcaagttttcagtaaacagaagtctggtatcttattttcgggtaactatttcggttggttgaagtctgatattgaaaaaaaatatgggaatgagttgtgttcagtcgaatgagaaacatttaaggaaccctttccttttcactcgtagtaagaggaaaattttcaacttcctcaaattcaaactgtaccaaagacttgaagggtggcgacttagatctctttccactgtgggaaggatgtgtacatcaat

SEQ ID NO: 194115 - DNA, 1835 bp, Cannabis indica
aaaagtttgattcttaagtttgctatcaaatttttgtagattaaaaattttgttttgatggattacactttattggaattgatatgttcataattaaaaaaaaaattaattaatatttttatcttttgaacattgacatgtattaaattatgtttttttaaaatttttaagtcgttaaatttttttcaaaaactattaatattattagatttaaatttttggaaaattctacaatgcacccccttaaaatggatatattgatgcacccctatgtgttttagcatccgaaataatttttaagttcaaattttttctcatggtcatgtacattatagttatttaagacatcctgcaaaattttaagaaatttagaaaattttaacacgtcgaaaattatgtttaaacagtatgttgcacgcgtgactattttattttatacgcgtgtaaaatagactgtttgaacattggtttctatattgtaaattattccgaatttttcaaaattttgtaggatatcttataaaaaattcttctggatgccgaaacaagttaagggtgcatcagtacattcccttttaaggagtgcattgtagaatcacccctttttttttttgtctaatttcatttaatttactaatatgatgattgctaatatgctaaattgtgttcctcaaattttaatatttataaaaacatgtctcttaaactttaacatgtatcgatttatttcctttaaatttttatccacataagattttatttaataaaattaaacaaaaattattaaatttaactattttgaaaaataatttttaatgattaaaaatttaagatacataatttattacatattaaaattaaaggagtcaaatctaaattagtcataacaaagtatatctatatgtaaacttatttaaagtaaacgacaataatgtccctaatctaacaaaaacgataacagcaaaaagtaagggtataactgtcattacaggctcccaaaagattgtaacatataaatagcttgccctgtgctcaaccacatctccacaatccacacaccatctccaatggctgccacatcagccaccgtatcacctctgctcaacaccttcacgctccggcgcgtgcgcaatgaccttccgccctcctacaatccaccatctctcaaagcaacgccggcgaaaatgatgtcctccattcccagtcgcagacagcttctgttcttaattccggcaacggtgaccgcagtcaccgtaggggacagagcttcgatggctgcggacattccgctgtttgggataaggaaagggctgaggaaggtggagaaggaggcggaggagatcgttaaggaagggttcgaggcggcggataagggaatcgaagcggctgagaaagggatcgaatcggcggagaaagagattgagacggcggtgagtttcggcggcttagcgcaggctgcggcggtggccggagccgaggttttgggggttttggtggctacttcagttgtgaatggtattttgggaccagaacctaacaagtcctagcaatatttttttatatataattattgattgtaataataagtttttgtattttcggattatataaaatgtaaaatgttattatttagtaaatttttttagttttgtttgtaaagttaacatagttagttttaatgaaaagtactagtgagtatttaatactgaaatattagtgcactcacaatctaaaatagttacaaatgtgcaatcactcgacggtggataatttttgcattggtctaaacccgctttaaataaggttataaaggtaaatgttgatggcgttatttt

SEQ ID NO: 194116 - DNA, 1153 bp, Cannabis indica
tgaatttttttttcaaaactactgtataagttttatactgtgttaagttttcacagttgttccacgattattattaatttttttttttgaaagtaacgccagttcaattaacaagaggaaaacaaaatggggatcacaggaggatcaccctccccacagtacaaactagcagccagacacgaacttctagttttcctagccaaatcatcagcaacaagattttggcttcttgaaatgaaataaaaattacaaagatctactaacttaattaaatctaaaacttccaaagaaacattacaaaagttccaattcggagggagcttctttgatgagaatgcatgaactaaagtcctgcaatcagacagaattaaaatcttcctccacgaattcgttgtggccatcgacaaggccattcgaattgcaagggccttagcagccatagcattcacgcattgggcagtatccaccttgaagcaccaagaattgtcctcagggttgagaacaactgtcgccaaccccgcataaccgtccttccaagatgcatcgacgaagaaaatcatctcaggcctttcgagggaactctgctcagaggtgaatgccccaggtttctcaattgggggactcatcttattccaacttactgattctagactcacctcccttagctcatggatcactaaatgtaattgaggctttcctcctttaagtctgaccctgtttctccatttccaaatctgttgaaacacacagccaatatagctaattatctcacttctcttaagatcagatagagaactaaccagaaatccacaaattgcctcaaattagtgcacgacagcaattcaaccatcataggaaaggggccattgaaccaaattgctttggcaaacgcacattctttaaacaaatgtaaacagtcctcatgctcattgtaaacagtcttcatttcccacgattattttttagttgttcaattgttgttttaattattctattttattattttacggttattttataaaaaaaaacaatatttttataaaaagatttgtgtcacagtaaaattataaatttttacctaaagttcaataatttttttttttttgaaaaacctatatcgttttctgagttttgatatactacgtagctctta

SEQ ID NO: 194117 - DNA, 1670 bp, Cannabis indica
attcaggaataaaaaaaattaaaaaattctccgatttcaatttccaatagtggaagaattaaactaaaaaattcttaatgccaaaacaaataaaaatacacaggttaatagaattttcatatatattttttataactaataaaagtactagtagaatatttctaatttaagattcatagctgattgcttacttaatcttatttttatcaattcatggggtctagggtttgactctaaccagagtcactttcactataaataactacaaaaagttctcaaattttaaaataatttacaatataaaaaataatattcaaacactctatttcacatgtgtataaaattaaaaatttatatgtacaacacacttttaaactctatttttagcgagttaaatttttttaaattttacataatattttaaataattataacataattagtcatgaaaaaaaaaaaaagataactaaaaaaatttccaaatgtcgaaagagataagaatgtattgggatgtagaattttcataaatgtatttttagaacaaatacaaaacttgtagcacatttacaatttagaattcttagcttggtggccacttaagctaaaccttagtgttatcgacctatggcgtctagggttcgactccaaccaccgtcactttaattgttaatttgttttccctcttttttcttcttttaatttcctttcatcttcttcttcttcgtaccataatcaacctggtttgcttcttcctcgtcggtaaattatctcttctctctttctcctttactttttttttttgttttatatagctatatattgatattatgtaatacagtgatagtgttttagttgatatatgtatgtgtatataatgtttgatataatgtctgtgtgaataattggttgtatagtaaatgtattttgataattgattgtgtgattttttttttttttgttttatatagatttatatattaatatatatacagtgagcaaaacccctactaaaaccattacaactgagctcccatttctgctactaatcatggcgatgacgacgagtaaagaccaagctcagaacgtagccttcactaaacaacccttcatcgaagatgttggtccacgtaaaatgtgagaattatatatatgtatattcttttttttttcagaatatttatcatagataacaatttgtttttgaattttactttgcagaaaaggaatgcatttcaccgtacaatcggctgctgagattgccaaaatggctgaggttcaagtgtggaaaggtcagtattatgatcccactcggaaaccttatgctgatggcttattggatcctcgcatggtaatcttcacttttcttttacttcatttttctgattttgttatttgggctttcttaattttggttaagttttttgaggtaatcatttaaaatccatttacaaataggtggtgcttgttctattgtcttacagttttttgtgtgtttattaatgtttggattgtacatggttaactgaatttttcttagactttaatttattttgtagcagaatgaatacattttggttggtgattttgatagaattgtatactttttcatcatcatcgattttatttgttggaacagagaactattttgtgattttgttatttatttattt

SEQ ID NO: 194118 - DNA, 873 bp, Cannabis indica
tgattctggttatagtaatctaagaatattttcacggcactacaagtgcatgtggtgactggttgaaattccttcattccaaaggaatttcagttttctaaagtaagaagagacagagagatcactctattgtaaacgggtgagttgtgtctgaagttgaaatatacgagggtcattgccttcattgaaacgcttaacaagatcattccacatgtcagtggccaaatcaaaatacatgatgctttgagcaatctcgtgtgaaacagaattcactaaccaagacaccaccttattgttgcaacgaagccaagaattaagatagagattaccagtttcagggcgaggaagagagccattgatgaaggaaatcttgttcttggcatgccacgtttccagcattgataatttgttccattgaggacggtagacaccaatcccaggatgatcaccagtactgaggaagaaaggactggaatgatctgctatgaaaacgaggaacaaagggagttgtggtgttatctgcaacaatgatggagtgatcttgggtatgaaccaggtcgggatcttgattctggggcttgactggttgagttcgtcgaggaattgctgaggaggttggattggaagcaggatgaggatcgaaattgatcccagctgcttgattctcagccattgatggaggagcaccatcttgggaccgagttgaaggtcttgccattgaagctgtgggcaaggtgtcttctgataccatatgagagagagagagagagagagagagagaacaatgtgatttgttttatattgctcaactaagataatacatagtgaagccaagtttatatacacactcggcatcaaagagagtgttagttg

SEQ ID NO: 194119 - DNA, 2344 bp, Cannabis indica
ctttcttagcattgttgattttatcgttttggggttacgtctcttgtggtagtttgcctttaactttgactcataattttcattgtggtgttttctggtttgttatgtcttcaggaagtatctctgttttacaagcggagaccttggcacttttgtttggacttaattgggctctttcatgcggaatccaaattaaagaggttttttccgattctctgtctctagtcacagctataaacaaaggaaaggtttttttcaacgagctgggtgtgctttttgaggatgtcatagctttattgtctaaactcccgggagcagttttgtcccatgtggctcggaatatgaattctgcagcacatggtttggcaaaacatgctcttcggttagacaatgagctatcctggttcgaggaggtgccgccgccgattgtggattgctgctttgttaatcatgtgtgatctggatcaccgcgtcaaaaaaaaaaaaaaaattgctcccagggtctataattgtctaaataggtccaacatccatatattatttaaccttttgaataacaatcatgaaggctcaaaagagatctcccacggtctctagtgagtagtgagaagaaaattttgaactgtaaactatcttatagaattatcaatttaaatgcatcaatcaataaaatagtagtatcaagtggtatatagaactccaaaattaaggtctctactttttggagataattccgtactacaatttagtggaaaaactttaaaacatctttgagaaatgcattcagagcaacactctaataatcaattaattttaaaatgaaaactcatgcattcttataattctaccactaatcaaggctttatacttgttaactttattaaactatgatcttcagaaaaagatttgttgtcggtatcttttattgtaatatgatacaacccttgtcttattattattattattattattattattattattccagttttttatattcattttccaagttaacaatgttttggctttaaaaccaaacaaaagccacgtgtaccagtaccagaggcgtcagcactggttttccaattgttagagattcgttttctttcataggtgtattcatcccattgaccaaaatccactgaagaaaaagctccaatctatatttggcttgtctaacttaatttctgattaaatattttcaactttttttttttgggttaagatctgatatccagaacatgttctcttctagttgttctaagtcattttgatgtgttatagtgcttttactgaagaaatatatgagcaaaacactcaaattaatactagtttggattgatactaataagttgtagttgatcaggatcttgctgaaaaatcttggaagatgactcgaaatcgtttccaggaatcgatgaaatcttctgttttcatttgttatagcaatagagaactttttttgtttgtacacaaagatatgttggtgtcaaagctcattcattcaaaaagttaaatttgaaataaaaataacacatcttttgtaaagtgccttgaaactatattggttttccatataagactagtgttattagtctcatttacctttatcatacaactaacaattccaatacatatctgtgttattaggctaaaatggcatctgaaccagtaaatgtgaatgagttccaagaactggcaaggaaagtccttccaaaaatgtactttgatttctataatggaggagcagaggacgagtatacacttaaacagaatatggaggcttttcaaagaatcaggtaagatttactcgaaggccatgctatattcttgattattataacaataagtgttgtgctatgttgtgtatgtttctctaatgaactaatttagtttttgcatggctttctaggctatggccaagagttcttgtagatgttagcagaatagacatgtccacaactttgttgggttacaaaatcgcagcacctatattgattgctcccactgctatgcaccagttagctcacccagaaggtctaaatctactctcatcacatatttgatcaaccaaactcttagcttcttacatacataatgagtaaaatccttttgtactaaacatacaggagagaaagccacagctagagccgcggcttcatgcaacacaatcatggtatgtagaagttaacagataatgatgagttcatcatgtttagtttctgaaatttgtggaaactttcaacacttgatttgttttgttgttctcattttaggttgtgtctttttcatcaaactgcaccatagaggaggttgcttcaagctgcaatgctgttcggttctt

SEQ ID NO: 194120 - DNA, 2842 bp, Cannabis indica
aatcacccctattttgtcagtttgagaaaggtaatcattaaaatcacccataatgagccaaggttgtaatcgagaatttatgccaagtcgatcaattaaatgccaagaatgcagcttattttgagagtatggtgcaccataaaaagaagtaaaagtaaaagcagtaaaatttgggaaatttaagataacagtaaaaatgacttatattataagaaagtaaggttacatccacatcatgtgtccagatcaacaaaagaccaccactaagcccgacacgtgggacctctagagcgttaggaaatttaagacgcgaagcaaatttatttaatgctccaacagggagtttagactccattatatacaaaagagttgggcggtactgcttcactaaaagggagagagaacggaatgctcgtttactccctaatccacgagcaatccaacagatgatgctcatggctctaggcgggtacgttgagcgtcacccgcctcttcaaatgtctcttcatcaagggacttggctaaattgcatgcacatttgagcattctcctgaattcagcagtgttcaggcagtctagttgctgtggtttgaacttgggaacctgagaagtagtgggagcaggattagcagatgatccaacagcgaatcagagtggctgagatggattaagatcagccaaaatggtagagaaagcttgggagacgggaaccacatgttgggatgctccagcggtggccaccaaaatctctgccgaagtggagacagcctttgggagaggtgtagcaagttgctcagcagtggtaagaggtggaaaggataatggaatagagggaacggtgttattttgagtgagggcattggaaacacttttggtgggagcggtttgtgtagcggtcacactaatttgagggtagatcaatgtagtagtagtgagagggggttggttaaggttatgggtggggggagtggtcgtattggatgaggattgagccatataaagcccagaagagtagtttgcggctggcttaaatattgtacaccgtaagcgaaggtgggctcattgaataggccttccgagataattggaggttggtgaaactgataaggaggagtaggggctaaagaagtggggttagctatatgtggccttagccgagtccttgagcaagcaaagtaaaaaggatttgaggtgattcgaattttggctcttaaagattgatcataatgaagcaaagggggagccgaggaggagtcacattttgcaagaaactcatggcaatgattcacgatatggctaagtcttccacagtactgacagaaattaggtagattttcgaaacagaattcaagccaaaccggggcagccgttccatggaaatgaaagcccgtaccacgcggaagtggttgagttacatcgatctcaatgcggacccagagataagggccccaagtctcctttagagaagcagtatccacttcgataaaatgccctaggacttcaccaagcctttgagcaagagcacgggatcgcttaaggaatggaattccagacacttggacccaaaatggtgtagttgtaagtgtatcagcagtcaccacagaacccgcttccagaggtgtcattacaatgagtttgtaatcgaaatgccacgattgaccaataaggacaagacatcgatcaccaaaacatccaaattctacagtaaagaaattgggttccttttcaagaacattgatggagaagcgtttaggccacatttgcttgagtcgattcttgaaagcttcagagttgttgtggcgtgtggtcaaaagcttgacagcaaggaaggcagagggttcatcatgaccatcatcctcaggatggtcaggtgtttcagagaaagagtgaatttgagtttcgaaagcagtgagattgagagtggcattgaaagtgtttgataagtcatccatttgcaagagatagcagggaactctaaagtaaaaaagaaaggaaaaacagttgcagaacaaatatataaaaggaaatgtgacagagaagtacagggtgcagtgaaaatcaaagtataatcggctatataatgaactgggcaaagagttagtgtccttggagattgtattgccgcaagagatcaattctccatgtcaggtaatcgaatgatgatgcctacaacattgacagtggctcctagagaaattctagcgtttacaaatgtagagctaatcatcatccagggcggtttagggggttgggggctaattaatatggaattagtaaaggggcgtttcttgtatacaagcttagagaagaggaaaaaacgatatgggggacagttaatcatagatgggacatcaacacagaagttattacggattagaagtttaccggtaagggagaagacaaaggactttaatggtgatttctgtctgttagcagcaaacggcttcagagaatgggagatcgaaccgtcacttgaaggggaaaaccatggacagacttgaacgccgatagacggcgatgacgacagcaacatcgacgggacaagaaagttcgagaaccctagatcactctcttctcaggaggaactatccagaaggactaattttttctttttcttttttaaggcacgtcttcttactttgcaaatttgtgtaaaaacaacaattcagttacaagaaaaggctgtagaactctctagtagggcatggatccagttttttctagtatcccttacatgatttgcttcatccacaagcatatacaatgctcttcccaagcggaataataatacaaatcaactgtatatgtgaataacgaagaaagatcattgtgacacctccgg

SEQ ID NO: 194121 - DNA, 1731 bp, Cannabis indica
gaaacaacattgagtttggatctgagatgaggaaatttagagctcgatattggtttagtgagacagtcagctatttggtctattgcaggtacatgattgacacagatttgctgttgaaggactttatcacgcacaaaatagagatcgatttctatatgcttggtgcgggcgtggagaactggattggcagcaaggagaacggtactttgattgtcgcaccagattgtagggattcttggttgggagatatgtaactctttgagaagagattgaatccaggacacttcagacacagtggttgctaggcttctgaattcagcttccgtggaagatctcgagatggtaacttgcttctgtgacttccatgctactaaatttccaccaagataaatgcaatatccagttgttgatcgtcgatcatccaaatcagaggcccaatctgcatcacaaaatgcttcaagggaaaactctgaaactggtttgagtagtagaccgtgatcaagtgtaccagcgatataacgaagaatccgttttactgctgtccaatgttgcagcagtggcttgtgcatgtattggcatactttattcacacagtaggctagttcaggccgagtgatggtggcatattgaagaccacctacaatagacctgtagagagtggggtcatccattggctcacttccatagttggagagtttcagaccactgttcatgggagtactttgagtgtttacattttgcatttcagctttgcataataaatcttggagatacttggtttgagtaagtaagagaccattatctgtgtggagagtctggatgccaagaaagtaatcaagttcaccaagatctttaagtgcaaaagtgttgctgagttcttggatgagtaagtgtactgtgtgatcattgttgcccatgaccaagatgtcatctacataaactaggatgtagatacaggttgttgaggtgatcttgataaaaagtgaggtgtctgctggagaggaatgaaacccgagacgaattaatacagtggattgtcaaaccaagctctaggggcttgtttgagaccgtagatagctttgttaagtttacacacataatcaggatgagtagaactaacaaagcctggaggttgctgcatgtatatatcttctttaagatcaccatttaaaaatgcattattgacatccaattgtcgaattttccacccttttgttaaagcaatggtaaggactactctgatggttattggcttaaccacaggactgaaagtttcagagtaatcgaaaccactttgctgatgaaaccccttagcaactagtctggctttaaacctctcgactgagccatccttgttgtgtttgacccggagaacccacttacacccaattggttgtctgtttggtggaagtctaaccaatagccaggtattgttcttcttgagtgcttgatattcagtattgatagcattattccattttggaattttaagagctgcttgcacagttcttggtgtagtcgatgctaggagagcttttggcttcctgatacctgctttaagtctagtgatcatggggtgagaagctataggagtattattattattagtgggtggcagattgagctgggagccggaggtggacattttgggggaaaacaggtggtgtcaacaccagcaacgagtggggggcatgagatgcaacagtgacagggtatagggtttcgggtggt

SEQ ID NO: 194122 - DNA, 2893 bp, Cannabis indica
agtgaataatatttttcttatttggtgaatcacccaaaatttcattacttccattaatcatttacatataactcattattgctagaagatctgagataaaacaaatttactatacaaactctattttctcaacttgtcactatttttctccctttttacaatatagtatgtcaatctatgttcttttgagtctaattttttggccaaatactaaatattctacttttgagcgcttcttttgtgtgttatacaattatctctgatctagtcaacctaaacagccacaagacatcatttcttatgcacctgagatgttaaactaacgttgcaattgtagcggtagaaactttcctcttaaacttgttttcattggttctagcaatccaccaaatcaatgtatgcaaatctgtggtacaaactcgccaatcagatcttcacttgttaaaggcacctctagctataagagcagtcaaacaaaaggtgttctatatacgcttcctgcataccactcaacaagcaagtggtatcagctatgatgttatatttatgaagtctaacatttgtcagcttatcttggacaaccattcagagaataaaattatgtttgggaacatttagtctaccccatacttttttaatccaatgcaccctctcttggataggacacaacattttatagccttgagcaacttgataatttaccattgaaaattgatgttgataactaaattcttcatcttttttttaatctctaccactttctttcaataccaacttccttgtactggggccttataagcccaccacgcttcttctctgatatagacatggtaaacccatttgacccataggctatcaattttagtagcaattgcgcacacaaacttggtaatggcagcaatattttattcaaagatgtttttgaaactgatttgtccagcatacttggatctacatataagatcccaagccacactacccagaccaacatagcttgtttgacttttctacaagaaggcttgacatatagccattatttctttcagcatcttctttagaagcaccataattttgccctagtatgattaaattgccaacaataccaagttaactaaagttgcacgccctgtaaagaagatatttctagagcttcaacatttgatttttgctgtcattttatcaacaagtattctacattcatctgttgatattttttgggcacaaataggaattctcaagtaccaaaatgacatatccttcctgctgaaaccagatgcatcaatcattcgctgaactttgttttcctccatgccactgcaataaatggcagtcttagttttgttcggatgcagccccaaggtacaagagaatatcttgagaccttgtagcaaatggaggcttttaaagtctccatgacataagagaatggcatcatctacgaaacttagatgatttaattgtaatccttcacatctttcatagaatttgaaatcatctttcctccctaatctttgcataattcttgagaggtattccatacccgaaacaaagaggaggaaagacatttgatccccttgcctcaaaaaatccatgtattgagccattaaatataaggaaaatttttagaatttgaacacaagtcataaccagtttgatgaacttacttgggaactggaaggtagtaagcatgtccacgatgaagtcccattctaaattatcatatgccttctgtaaatgtagtttgatcatccagtataccttagctagtttcctcctataatgtcaaacccagtcttggcatatcatatattgtgagctatgaatctttctttgatgaatcctccttgattttaggccaccaattcagggagatcgaatgagctttaatcttgaaaaaatgagtttagtggtttccttgtatacattacaacaagcaataggccaataatgaatgacattgttagaacacttgcttttgagaatatgtgtcagtaccgttgaattgatttctgtaagaatttgccctgagtgaagaaacgagatgataccatcacagatgtcattgccgacaatatcacaattatcctaaaaaaagaagttgttatagccatctggtcctagggctttaaggccaggaatatcaaaactgacctttttaacttcatcttgggtgaattcttccagcaaaagattagcttgtcggttggtaactagaagaccttggtcaataatagctggtaacgcatctctcctctactccgaagtgttacctatgagtttcttataataggataaaaagacctctgttacggttcatcaatcctatcttcttcattaatttctatggaatatatcctattttgatttcttttttctctaatactagcatgaaatagagctgagttttcatctccctccttaatctaacctattttagctttttgttgtaagaaagagtagtacgatttatggacaacaacatacttactcctagcttcaagttcctgatgtattaaggtcgtagtcaaaggatttgactttaacatgtcttagaaatctgctaaagcattcatagcctggatataggctacttgtatttcattaagcacttgcttgtttatttccttcaacactattttaaggcttttgggtttacaaaccacttgatacatcttggtccctttatattgcatctgctaatgagctatgatatgatcaagaaaacttggatgagttctccatatacgaaaaatacttaaatattttttgaccacttggaatttctgaacccactattagaagagtaggaatatgatcaatgtaatgctcccacttcaagtcttcattgggccctaacaccccaagtaacgatgactcttatacacaagtacat

SEQ ID NO: 194123 - DNA, 915 bp, Cannabis indica
aaaaaaaaaaagtgcaattttaggtacttaatttgtgtaatttcttcttttttaaataaaaacttgaacctctaatggtaagtattttttggaacataaatttttattttcatttagaagagcatctttgaagtatatatgggcctaaacttagcaccaattgcaatagattcacaacttggcacaatgggggaaaagctagtggctttgagagggtcatgttgatttggattatttgctagatatggttaaaacttgaaagtgttgatattgcttctagggtttctgattatttgttttctgtgttattttagtctagtttgatgttaattagttctcttttcttagtccttgggatccctaggttttctttgcttcattcagtcttggcctacgcctttgtttttcgttgaaatttcgttctttacttcatatttgtttttcctttaataaatttccttattattttcttgtagcggtgactagagtcacacataattaacaatgcagcaaaccacattcagtggtagaacctcctcaaaccaaggtagctcgtctaattgaaggacatgttttgtcaaaccgtaaactgcaggaattcttatcgcagggcacatgggacaagtttacaagtttgttgtctagatttttgttttcgttgtatgatactatagcatttattcttaacttcaaaaaaaattgtacagtaaatgttgattatatacttacaattttaatttctttttaaacatatttgtgacaactattatttatgtgcatatatattatcaagcatatagtaccataccaagcccatatttagctaataagtgcaattgaatggtaattaaataaaatcttcaacatagaaactaataatcaaaaatcttatgtaatgtcttttttttttttttt

SEQ ID NO: 194124 - DNA, 1241 bp, Cannabis indica
aaaaaaaaatggaaattattctagtctaaatttaacctctcttttctctcaaatgcagccaaaataataccctcttctttctaatgtggtggagtttatactttatacaaaaatgttgttttttgaagccacctacaagtttacatctaataaataaagaattccattgaaatatcatttcttacatttaataattgtagagaaaaattctcttaagctgctacatttgaatttttaatcccggacgtggaacttggaactcggtacttggtatttgctataaaatctaaaatacattgtcctctgtttttattattattattagttgaataaaatagagaaatgaatatgaattgaagcttttcttataaagggacagggagtgggctcattgtgggcccatttgggcctcgagttgttttgggtatggaattggaatgggtaaagtcaaatatggaatgaatatgaagtcaaagggagggtaaggagagtaaccaccgtcgtttgagtcgaaaacaattttagggttggaaaaggagttggtccaagtcaagcacatgttccattactcaaaaatcaaattcaacaagacttttaattaacttttggctcatcaactcaggcggcgtctccctttctttctcaactatcattcaacctttgaacttgccaatttatattgtttgcccataatccccaccatgccaccaacaaatctacttttgtaaagagagtgagtttataaatgcttaaaacccctctctaattttataagggttaaaaacaacaagtttataaaggagagtcccattattccatatcattggatctgttaataataataggttttataaaacttacacacaacctaaaacacattggatagttggatgtagcatttatttaattttaaattaattaattaaaaaaaattcaaaaaataattaaataataaaaaaatattttcggatttttaaataaatttaaataaaataaattaatatttagaattaaacctacaattttgaaaaattaggtttcgactaacctaaatatcatttcaaaaaaatttgctaactatcttttaaatttaatcttattttataaattaaatattcaataaaataaaatgattattaaatatcttttctgattttataatttaatttaaataaaaaaataacaaatttaaaagttagcaaatatcttatttctattcaaatatcatgattatagtaatc

SEQ ID NO: 194125 - DNA, 2087 bp, Cannabis indica
atgtttagttttgttgtttttccccctctagaacaaagatggtgcaggtgattcttcattccctgtcatcaaagatcaaactcaattttctgtttcgcatgctcgctataataaggtacttagaacttttagtgtgtgcaattgttttgatattactgtgttacttctggtgttagtttgggctgtatatgtctgttagtatattttttagattctggtagactctcggacaagatttctactatctaaaacaaccaaggagaagttagatgattctatatcattttgataaatatgcaatgatcattctagatcttctaagcagtttaccttattataaacacagtaaagttgtactttgttaaaattaatgttgtttgatggtgtatattaatagcataccttttatgctcccttttgttattgtccattgactactgcattatgtttgcagagtaacccaattgccagatggcatatatgccaaggttccattaatagcatcactttctctactgatggaacgtacttagcaactgttggaagagatggtactatgttaatattgtactttgtttgtttgttcaattacaacttcaaatacacatgagcattggtttaatttctgtactcaggttatttacgtgtttttgactactctaaagagcaacttgtatgtggtggcaaaagttattatggtgcgctcttatgttgtgcttggaggtgtgtaacgttttggatattcaattttataattattattatttacatcccagagttgagtttagcgcatatctctgttgttcttttcctttgagacagtattttttcattctgatgacatatgacatgatttatgacagcatggatggaaaatacattctgactggaggagaagatgatttagttcaggtttggagtgtggaagatcggaaggttgtagcatggggtgaggggcataattcatgggtgagttttataagatatttacatctttgtgagtttcttcttcctcttggtttctcatcatctcaaacttattgcttaagcaggtcagtggagtggcttttgattcatactggtcatcaccaaattcagatggtacagaagagactgtataccggtttggttctgttggccaggtattataattttgatgtttgttctggttgagttgttattgttattttgcttaatattgatatcaatgaaggtcacagagcttaataacttgtatctcaccaggacacacagttgctcctttgggacctagaaatggatgagattgttgtaccattgcgacgaccacctggtggatcccacttttagcactggaagccagtcatcccattgggacactgtttgtccaattggcactcttcaacctgctccgagcatgagagatgtcccaaagatctcaccactggttgcacatcgtgtgcatccgaacccctttctggtttgacttttacacaagaatctgttcttactgtctgccgagagggacatattaaagtttggatgagaccaggagctgcggataaccaatcgagcaacggtgaaactgtcttgagtaccagcttgaaggagaaacctttattgtcatcaagtaaggctggcaattcaagttacaagcaatgactaaactgtctggacaccaggcaaaaccaaagctatttttttcccatttcgagttgctgtttattttcttgtgtagctgtttttatctctttggtattgttccagttggttttcagaactagcaccaatgatatttaaccaactggggttttattgtatagactaaaatggccattggaggcactcagaggttggaagagggaaagagaatgattccctttgtaagtacagaacggccttttctaggacatgtctaattacttaacaggaataatttgaaggtgcaatctttgaaatctgtacatcttagcattgcgtttttgagcatttatataataccaaagaaatcttgaggccattcattttagcaccttttttgtttgatttatctgttgagtatgatcctcaacttgaggtggcattggtttgggattactgcagaggct

SEQ ID NO: 194126 - DNA, 1228 bp, Cannabis indica
gattgaaccgtgagactagcacctttgtgacaagtttttagatatgacattgcagaggcaaattggacgatattcttgcatacattgaggtttcttaaccttgggaatcagagtgatgatcgtcttgttcaaagctgaacgatcaacattatcattgaggatgcttagtactacttttgtaactagttcaccaacgacagtccaattcttttaataaaatatggctgacatgccatcaatctccggcttttgtcaggtcctatggagtgtaaagctatgtaaacttcatcctgtgtgaacggcttaacaagtgattcattcaagtcctcactaatcatggcaggaatgcatgagagagtggtattaagggcctcttcgtcaatggatgtggctatgaaaatttcagcgaagtaagcctggacaatagctacaatttcttccttggagtgtactttttgacccgaagtattgtattggaacttgattttgttgttggatttctgtgatgatgctttagcatgaaatttttttgtgtttcgatccccacaagagagccaatcaacccttgatcgttgttgccaatatacctcttcttgctccaataaatcttcaagagtagcttctgtactttgtaattcttagaagtgttcactggtgcgagaagtagagttgttcaaatcagccacctttgattgcagagtacttatatttttcttcattttaccatacttgccaatatgccaactttgcaaatttagcagtaatcgggtcagcatctgaatgaaggttccagctttttgagattatttcaacattttcagggttagcaagccatagtttttcaaatcaaaatcttcttctactctttgttggattatcaaccagagaattacaggaaaaactaacagcaatggctctatggtctgagtggtagtagtcaagatgttcaacagttggcgtgagaaaatgagacatccattggttgttgataaaacaccaattaaggcgttctttaagtgtctgcagagcagtacgatttttagtccaggtgaaaggatcaccattgaaaggcacctcttgcaggaaatatttatccgatgttgttctaaaggcttccatttgggattcacgcctcaagcttcccccaatttgtcatgttgaaaaaatttcattaaaatctccaatagcaagccaaggttggagtggagcaacatcaccaaaaacgctg

SEQ ID NO: 194127 - DNA, 1731 bp, Cannabis indica
gtcgacctccaattctgagtacacaagctcaactaatagtaagtaagttatgtttgactctaactttaatgtatttttattttttgtgccattaaaaattcaatctcttctattgtgctcccatacaccaatgtacacaatcgttgattttgaaaaaaaaaaatagccatacaaagttgaccctatgaatttaaaataaaataaaataaataccacaaaaaaatacaaaatgtataaataaaacatacatcatcgaatacatatcaagtaccatcgaacatgcattatgcaacaattgaacaaaccacacaacttaccttacatcaaatatgcatcgtgtaacaatcgaataggtaatatggctaatttatatcaagaaactatcgaacattattgaaatatcatccctaacctctaaaaatactactaatcgagtaagcatcgaacacgtatcgaatacatcaaattttacacaaagaaatgagagaaatccaaaaacgcaaatatgattttctaactaacaaatcggcaaaacacacaactaaatgtatatacaagaaacaaaattaacactaccaataaatttaatataaaatcacataccaatttcttttcagccaaaatcatcccaaaaccttgaaaactttgaccttcttctcctatcttgtggtaaggctcttccttcatagaaatttgttcttctttcaaatataactactccaaaaattggtctaatggttatattttttgggtacagagaagagagaaaatattaagagtaaagagggaaagaaaaaagagaaggaaggaaagtgatgggataaaattaatacaggtatatttttggatttacactaaaatttgaacatatataagatggtgtaaaaaatattatctatttttaattttggtgtaaaattatgcgttaaaactcaaaattttcacagttggcgaattcatggctgcctactaactcagctcttgctcataggaaggtggctatcgatccaacatgtcaacgttgctctaaaggggtaagtgcaactattttccatgctctatgggggtgtaaggcaaataagggagtctggaaaattagtggcttcaaagctgaaacacaaaggttggggaaagaggatgtcatcaccttcctcatgagaattacaaaaggtttgacccaagatatgtatgaattctcttctggtgctatgttggcaattatggtatattaggaataatactaagcatggtggaagagtgccacaagctgctaaagttgtggactggagtgtccagtatttgatggagttttgggggccgagaagtgaagggaacaactgcgataggaggcagaaggctcggtgggtgcaatctccacaatctaaaatgaaactgaatgttgatgcgggagtgaagcaaggaggggagagatcgagtcttagctgtgtaataagggatggagggggcagtgtacttttgcttctgctacaattttgccaaaggagtactcaccgctccatgtggagctactggtcattcaaaatggcttgcaaattggtttacaaaggcatctacaacgatttagtattgaatctgatcgccaagaagccatccatttaatccatactaaggaggatggctgcagggatgttgatgagatactaaattgcattagggaattgatgttacatgactcagtagtaggcatttcttttgtgtatagagaggcaa

SEQ ID NO: 194128 - DNA, 1574 bp, Cannabis indica
aaaaaaaaagataattaattaatgttttaaccatgttagttaatatttttgttaaataccacatttaatataagagatatttatatatttctctccaaaatttgatcttacccatacaaaattctatcaacagtcttaaaaagccctactagtaggatattctgtgtaatctcatgcaataatttttctatttatatttatatcgagaatcaactgatcgaaatcgctaccaaacctaaattttgggttaagtccatatctagtgcaaacattagagcatcgagattactttttcctaatacaagaattgagaaagacgcattttttgtgtaccaattatcgtacccacactaaacattgggtagtcaaatttgaagtaaataactgttgaaagcatagaaaatctatctaaaattatataaatatatattatattaattaaatataattatattatatatgttcaagttaaataatatttgttgttctcacacataagtgtaagtatattcttatatttttttcacaaagcatcaaagagtaattataacaggatcgcgtttagactaaggtaggagttcgcgcctaaagccgaataccacataattttctaataatgaatccgataatttttcttcttctctaatgtttatccaatttcaagaccgacctgaaaaacaattacacaatggcttaaagtgaaggttgaatttaacaagctataactaaattataatagctatagtggtaacatttactaacaaaaataactatatatatgtatcaaaaaatatcattgtggtcccataatgatttgatgtaataataatatatagtttggttgggtcaataaaattaattttagagggccatatcttaggccgccctatattataatatatggcatgctacataagttttttttaccaagttcagtgtatatattttgtgattaaaaaataaaagttcagtgtatatactcattcttctcttttttttaaaaaaaaaataataaaaataaaaaataaataaataagtaaaacaaaaattatgtactccactagagcaagttgttgcaaaattttgttattattatcactttgtgaatttgttactattttcttagaggtgacatgtaaatgtaaatcttcttgtgataagatagattgagtcttatctttataaatatagttagagaattggtaaacatccttttgagatgtaattatattaatggtgcaatttaatattaggatctatttattttattttaataatatttataaaaaaaaaattattaactatttttaggatgatactttataaaggtattaggtattatagtgtttcgtaataatactcataaagttagggttcgacatttattagccataatttgtatatttgtaaatatttacacatatgcaaacattgtaagcattgttactaggtactagtagtgttagtattttttagatatgtcgtcttacaattgattagtaatactctttaaaagttattaaattaaattatatagaatttgatacttaattacactaataacgatattaaca

SEQ ID NO: 194129 - DNA, 1028 bp, Cannabis indica
ggggcacgatttggtatatatatcaaaattcagggagaaaaatcgctaattagccattcataaattattagtgtctttgtttctttcaaagtaatcatttctctcatcatttaattaaacatattcttaaaaagaaatacaatatgcacaatatgttattttcgatctttagcaagaaagaaaaaaacaaaaacaaatacactcttttaaaaccattattactaggtgaatttaaattaaatacaatacacacttagaaatcataatgatcgatatatataatatagattgatcacgctcacccacagctaatacgtttactatgtttattattgattttcagatgtacgacccaaaagtttggtcactctcaaggagagccatttctttagcttttaaggtaatgaatacctcgactgagcctttaccgtacagatcatcagcgtcaaccaatatgaccaaatttctaaaagcagggccaacctttcctatgcttccaacgctcagcggtttcccaaacccaaaatcaacatcactgaaatatcctttccagctagtgaacataatgaagtcaggctcagccaactcgatcgaacacatgtactccagctggttcaaaatctcactcactccctctttgttaccactcatcacttgatcaatgaaatctccactaaagaatcctgaagttgcatcatgcatttgtaccgctaaatcactcaactccacatcatcatcaaagctctcaatgctatattcgtctggatcaaacgcagctagtgcccaccagaagaaatttccaaccgctccgtcgagtttaggcttcattcggggtctcatgttcaccgcttggccagcaatggatggcttaggggatccaaacacagcccaagaagccgccatcgcgtgtttccatatcaaacacgagatggcctcgttgcgagacgggttgggaactcgttcgcttttcgccttttgtttaagagtttcgatggattttgagcgaaaaacaaagctcttgtgacata

SEQ ID NO: 194130 - DNA, 1164 bp, Cannabis indica
aaaggaatatatcttatacttttccaataaataactccataagtaaattgggttgggccatgatgactaggagcccaattcttatcccaacccaacccaacccaacaagctcatgctaattttgtgtttgaaaccaggaactcagggagcgttactgtgagtttgtgtatcaaggtatcctctaccttagcccacatatggcgctgcggtttctgaagcttcccagtcacatcaccaccactcccaactcaaccttctttctctatccaaatcccatcttcataagctttccggtaaattatctcccttttaatgatgacttgttgttggtgttgacactcttttacttactaatattctcttaagcattttcacaaacaccttgtgttctagctgatttcaacttggatttttggagtcgtgtatggtaagttttctatcttttgcattaattagattgattttttttttcagtgagatgggtcggagctcaaatgcatattccagtaagaagctttgctgttgcgaagattcaaccaccaaaaaagttagttttttattcttctgtccaactcgttcatactgtgaagagcatttttctgggtgttataatatggtaataatgaagttgaacatggacaatttagtaactttcttaaaaggttttggatattttgtgagttttgggaagttggttttgactactgagtctcctgtgttgcaattaggtagtgaacccatctaagcctatgtataatattgctttgtactcactcttttttatcataactaagtttgggtgggctaatgaaatttttcaggaggaaaaggcttgatgagatatgtgttgaaaggtttcaacaatacagccgaaccttcatacagtcttggatattacaaggtaagccgtaaaagtatacaaaaatatgcagtcagaccagacacacacacacacaattccttatgttttgatactttgttagtttgttatctctcttttggcaccgttttgggatttctatgttgcatccatgagtaaagaagtattagttttattaagttgaaagtttcctctgcatttagggtctttgtggctgacacttgtagtgatgcaggtaaagtatttgtggatgggaaggtagtcaataaagctggaacacctat

SEQ ID NO: 194131 - DNA, 1443 bp, Cannabis indica
tatgggctaattagaagattttatatgtctttaattgtacggtactgtctttctcatttattttcaaacttttattatatatacattataacaaattagaagatcatgatatggatatttataagcaaaatgaagggagagataaacaagaagaatattgactaataattattaaagagatgatcatatcatgattatcatcaataccccatatagcatattttgacctcttaatatatatataagaggaataaattaagaacaccttcataagacattcttatatattatgtagtatacataaagatatattatttattccaatcataacaaatggtaaattgtttggtattttgactaaacatacaaggaccagaacggtttattttccaatcataatgctcacaactttggcattgtttgttatcccttttttcatcgtaaatatcaaaccaatgagtgacaagtggagtttcggaccatttcatactacagaagaagagagtgttgtcccacacacttggatagaacacaatctcgtacgagctattgaaagggattacatggacaccgagatcatcgtcttttgacttacaatgaacggtcagatcagctcgatcggaatcaagatagttggttatggctacatgggttttgtgtataaaaaaacccactaactctcacttttgtggctgaatatgaaagcaaaagaaatacaacaagtactttgtgtatgaggcttaacacactttttctcatattttgttaattagagaaaaaataattattatataatattaacctagtagggtgttaggggttaattagtttttgatcccatatatataatgtatataaagaatatggaatataagtatatgcgttttttctttgaaaagaatatttgaataagtagtagtgtatgttagtaagaaataatgcttaaaaaggtaattaattaatttatacagcctctcttatatatttagctaaatattgtatatattaatatatatatatttatatatatatacaatgtataatgggcttaattaattatatacatattgcatagctgtaaattattatttgacaaagcacacatagctgtaaattaatattaggtcttaatataattttgactatactagatagaattgtatttaatgtattaaaaaatgaggatgtaccaataatattaaattaaatggaataattttaaatataatatggaaattgacattcaactaaaaaataatttttacaaactttataaaagggaattagttaagctagtcaagtgaggttagataggttcagagaatctagtaatataagtgagcttattcttatatgcaatttaattttatttgggctaaatttaatttttaaaatttttgaattttcagattgcatttttttgactttctcttgtatttttga

SEQ ID NO: 194132 - DNA, 3105 bp, Cannabis indica
gtaatctcgattcggaaaactgatgtagtatgacatctaagtgaaggtggctatatataatagagattatatatgacaaggaccgatatgaataaaactaatctttttcctaacatgctgtttactataaagacctaattcatatcataatgatgatcaatagtagatcgacctaaatcttgagtaatcgtgaactcttgctcatgttattagtttctttaattcactcgttaagtttctcaaagaagatgattcttacaacttttttttttttggtaaatctaataatgtgcatggctgggaacatgatctacaattatggaatcctactttcctaacgaattgaatattggttccctttaagtgttaattttagaactggaaagttgtgcacaaatttagatgggatctaaattgtacttccactagtgaattaaaagtaactagtgaattaaaagtactaaaagataaagaagtaattagaagggtaaaatagtaattttatcaaaactgattacgaacagacagataaagggctaatcactggaattgatcttacacaaggaataatatctgatcatatgtcaaagaggtggacacgtcatttcaggggaaacatatccacctcctgtcttgcagtagagatccagtacttatcctccagtaaacatatggctcctggtccgtggtaggcttctgagcatcatcttgtggtaggcatccaggagcatcttgcgtggcctatctccaggtgtatccctatcttcattccttccgagtcctggaagactaaggaggctttcgtgccttgcaagaacattatgtccacaaggaaaagttttaggtctttgttgggcatggccatgttccagctttggaatggccttctgagagtgaaaaggcttaagcccaactttaagtggtgattaccttcagattatgccacatgtctatcttctagaaatacggataatagaaatttatttttggatatgtggagtgatttaaaaaataattttttaagatatgtaaaaaaataataatagaaatatatatattttaaaatatgtgtagtgaatttttaaaaaataataatagaaagatatttttttaagatatgtctaaagagtttaaatttgaattgtaatgtttaaaaaataatagtgcaatcttttgtatagccacatttaatataagagagatatggtgtcacacttatttttctcatatttttttggctaaataaaatttagaggtgcaacacaagaacttctccagaggtcacctatcatagtacaactctcgcccaaacacgcttaaaagcaaaaatctgataggatttggtacattagcgctggtatgatcacacttttattttatttttctcatgtttgtggtataaaggtatgcagtattatattttacaacaaatagtacatttttcttaagtattatgttttttccttttaaaaaagcattatttgttgtaacatgatttataatagagaaaaaaaataatataattaattatacttttattaatgtatacttacaaatagggaaagaaaaaagataaaatttagaaactagttttgctaacaaatgaagacccaagtagtgtttgtttgctaagaaaatttccaaataatctcagatttgatgtggctttacgacaagcctcatctcccatggttctctcatacatcttcttcaatctcagttccatctccttatcctccattaccttcctcaacccttcctctacctctttcaacccaactccattaatcctcaccccaattttccaaactttcacaatgtagttgcagttaacgaattggtctccggcgattgggtaacataataacctcttctgcgactgtatggcctccattgttgagttccaaccacagtgggttaggtaaaaacccaccgctctgtgtcgcaaaacctccatttgaggagcccatgagacgattttactcctattggagactctctcctcgaaaccaactggtaaccctgctctccatgaattgcccaaaacccatatgaagaaatgccccaaagactccaacgccatagccaaagtcctcaccttagattcaccaatgggactcacccaactcccgaaggagatgtaaattactgaattggacttttgtttgtctagccaatcaaggcaactattgtcttcttcccataaacttgggttttttgttgttaaatttttgctcaatggactgattgggagaactagtggaagaagttctttattgagtttctcatcgttgagggattcttcgtcgggaaatgaattggcgagtatccattgaagagttctcgatcgagctagtgtcctggtccagaacttgaaccttgctttccttgcagctaaagtcccaattagccatggaaactcatcggttgatagaatgggttgattcggaagaaagctaatcgggcacaaatgttgtgggcaacctgccaatcaagaaaaagaaagagaaataaagcatgccaattagaatgttatttgatcatcttaagagacagagagagaaaatagagattttattttctttttttaagattttttttttaaatttttagattataaattagaaagtgtaaccctttttcttggttgtcctttcaaccattgctttcattgtactatctctaataggagatgtaagcattgtgtcatgtttggaagcaaaaataacattactactatattgagtgaattgtcaaaagtgtcactttgctagtaacttatccaaaaattaattttttaacgctaaaatcccccaaactcagattctattagcatttagtcatttttatccaattttaactattaaatgccatgctagattattcacatggacacagtatacatgtggtacaattttagtgatccacttaaatatattaataaaaataattttttttaaaacaaataataattaaaaataaaccaaaaattaacaaataaatattaaagaaaaataaaactaaaagaaaaaccctaaataccaaaaccaataacatgcaccatagtttaccctctctttcttcagcctatctaactctctcgat

SEQ ID NO: 194133 - DNA, 1627 bp, Cannabis indica
cttaaatgttttagagaaataactcttttatactcaatttattacttaaattatcttttgtcacaaaaaaacaaaaaaaaaaaaaaaagacttttgtcacataaaatgttcatggttctcatattttatatattcattttttaaaaaaatttagaagtgtatcacttaaatatcatagtatatctatattaattttttattttaaaattaatttttttatagattattgtagattgttggtatatatattttgtcgtacattaaatatttttttattatatgatatattattattcttccatgatattgtttattttattttattatgtataatataggtgttatccgtgtttctggaaagatgataaatgtacttccaagattcgtttcactttcggaagactcattatcaggcccaattgagtgggtcagcccactaaaggagtcagtctgcgactccatgttcagtaacatattaaaatcatccattacaaggtcagatcgtccaggtccgggaaggattcttggccagaagaaggaaagcccagtatagcatatccggataccctcatagggtattccttgaatgactatctaagaaaatcccaaagcaaaggcttatgtggagatacctcggatacgagatttcactaaatcagaaattcacctagcgccgtatctttcgatatttattgtatgaatctagcagcgcacaacatctatcaacattaaatggacctcacgattgtagatgatcataatcttataattgggtctttactaatttatctaaagttaatattaaatgtatttacctcattggtgagtctagcttcataaaaaaactctaacaatttaaaatcctggccaataaataagatactacatcttcatgcaaaaagttagaaaatcatcattcaaacactaatattgagaaattggggttcttaagcttgagcaagaacattatccttgtgtaatacatcaaagttttttagctaataatattgacacatggactaatgctcgttaacgccccaaccacgtaaaagtcttagttttcttcttctttattttgtatatttcttaagctctatttattttataatcaatttctgaaaaacttgataaatattttagtgattttattgagagcttgaagaaagatttttgaccaaagctgtcatctacaacaatggtggctactagaaaaaccaccgcaaaatctactgtttgcgagggtgaagaagatactgccatggataatgttaacggacctcctccagtacatactcatgtggcaaatgtaggggatggagaaacgtcagaagtcagtgatcgacacgcttgaaaagatccacaatctagaaaataagttgataaaaaccccattgacgatgatgatcaaggagattctaatgaaaattctcatcttaatcaagagtatgaagaagagtactacaagcaagatttcgaagtgatacgattgggaaaagaactcacagatactcagaaaataatgacaggtcaggaagaattttcccaaaaaattgtaggaagctcttgcacagatacaagctaaagtcaatctctcaaaggagaacatcccttgtaaagaccgcttagt

SEQ ID NO: 194134 - DNA, 1568 bp, Cannabis indica
atgcttaacttcaattagtttctccatcaaggttcatagtttcaacatagcaaattccatcttcatagcttgatgaaagcaaaagcagatcagctaggaaagtactgatctttatgcaccttcacaatgtcaccaactcgaagtttcttccatctagtctcgtggaaggcataattcttatacactttcacctttcggttatttgactctatatcctgaaaccattccaaggttcagatgagaaatgaacaatcaataaaatagtaaattaccactaaagatttcctctttttttttttttctttttttctttttttcaggagcatgggttaatttagtgggagatgcatcgacaacataaacagaacacaaaaagcaaagtatccaaatttataatcattgtagctgaaaataaagtataaataattaaataaataaagaatttctaacattacttgttttcttcgcctccaatcttccacagcttctttgatcacggtaactccaatcactaacatcaacggaccaagaacactgattgctgaatatggtgctaacggactaaatgaaacacaagctacaataagaaagtatatattcgctactctcctaaactgctcaaataaggacttgggaagaaaattgatcacagtgtatttggttgttgagacataatttcctctatatctcatctgaatgacctcgggattgtcaggatcattacaatgcacaacccttgagtaccctctttgcccaatttgatcatgactgtctcccgacgacgatcgaatacaagaaaacgagtaaagcttactaaaatgtatcctcttcctcctccttccttccaccatattttcaccccaaagagaaaagagaaaatacaatataaaaaaggttgcttcttttccccaaattcaagactaaaacccctcaaattctcacccacattttctttccaggttaatcaacaaacgaccaaacaagtcacaatcacagctatatatatttcccctcaaaccgacaatttttctaaccttttgaattgatccaaataccaagaaaactcaagaatcactacaaacaaaaagaaaattcacaacccttccatttccttaatgtgtattttggttcacataaatccaaaaccattaggtgagctgaagaagcaacataacttggcagtcacatatgctccaaaatgctttgcttctgagtcccaactatatctatcatcattcgcagccaaaccaagaatagaatcaagattcacgaaacctttacggctttgtaactaagctataaaaattaaaaaagaaaaagaactcagaaatcaacttcaaatgaccttaaacgagctggtcaagaattatcagaaaccctagagttgagtttttccatgaattcctttcttgctgatcaagttgcagagatctcttccttgtcgtttcagctgaaatctagagagagaaagagtgagtcttgcagagttgtagtgagggagggaggaatggtatgtgctttgtgtacaagtagttaactctgtgcctttaccgcttttataagcaaag

SEQ ID NO: 194135 - DNA, 3113 bp, Cannabis indica
gtatgaatcgaactcgaaatagatttggcacatgaaaaactcttaaaggttttctcttataagaaaaactttagattatatcatacacaatatgataaaattaccaaatattgagcggaatgccttctttattagtggttcacaataatcacaaatttcgggctataattatgcaagaagtttctataatatcctcattatattctttcacttctacaacacattctattatacatttgaatcttacttattaagcctgattagattgatctttcatgttgttgaaataaaaaattggtgaaatcccaagtgaaaaatgaacatatataatataatcataacttagacgacaaagaccgctgattcgggtttctcaccaaaagttgctacatagactcacttatctcaaactgtttcgatttgctgatccaacttagctcaatcaatacaaggaagcattgaagtaaacaagaatcgctcataattaccttgaggcttatacgcaatgaattaatagatgtttcgattaagcatttctcagcctcatttctacaaatcaaaacctgaaaaagtacttctaattaaaaatgttatctataaaaaaatatacaagtaagaacttctgtcactaaagtgatacttactggattcagtagaagttctgagctagtcctgaaagttatgaattacatatcaataaacacaccaacccaacattcagaaaattattacaaaactacttcatatgaaagtactgatagttcttaagaaaaaacagtggcacatgttatcagccaaaaatccttaacatacttaagctcaacctcaggcttgttatgtctttcaacttcttgacaaggaaagttctgcaaaaaaaataaagaataaacaagtgagaccccgaaaaagtttgtcttgaacttgaacatgagtttcatatgggcaattaagtataagggcctatagatttttggtactaaaaatggtaaaaggcatagtgaggcttagcataactatgaatttcacataaaagttttctctttgaacatgaatttcatatgggcaattaagtaaaaggacctgtaggcttttggtactaacaatggtgaaaatgcatagcaaggcttagcataactatgaatttcaaagaaaaagttttcctcttgaacatgagtttcatgtggtataactatgaattgtgaaaatgcatagtgaggcttagcataactatgaatttcatataaaagtttttgtcttgaacacgagtttcattagggaaattaagtaggagggcctataagtttctgatactaaaaatggtgaaaatgcacagtgaggtttagcataactatgaatttcgcataaaagtttttgtctcgatcacgagtttcataagggaaattaagtaggagggcctaagggtttctgatactaaaaagggtgaaaatgcatagtgaggtttagcatataactatgaaattcacataaaagtttttttgcataatgaggctaatagctttctgatactaaaaatggtgaaatgcacagtgaggcttagcataattggtaaccattcgaccaaaattgtgatcatgaagaaaaagaaagaaatggtgaaaatgcatagtgaggtttagcatggtttctgatatgggcaattaactacgaatttcacagggctaccaactatgaatttcacattaaagttttgtcttgaacatgaatttaatatgggcaattaagtagaaaggctaatgggtttctgatactaaaaatggtgaaaatgcatagtaaggcttagcaaagttttatgcataatgaggcttagcataataactatgaatttcaactaaaaatttgttgtcttcaacatgaatttcatatgggaaattaagtagaagaactaataggtttctgatactaaaaatggtgaaaatgcatagtgaggcttagaccaaaattgtgattaaaaaagtacctgaagacacattgcagcttcaagagtattccttatacaagttaagtacaaacgtaaagtattggcctgtaattattcgttagtgtaatacaattaggaaaaaaaaaaaccctaaaatggagtttaaaaaacaaagaaaataaaatctgggtgtgtgttaaagtttcataaatcttgaaaaaaagaggtaactttagcgagactaatcaaaaaatttaattttaaataaaatttcaagtgttccacagagccattgattattttcctagactttctcggcaaccaaacaggggaaaataaaaaggagaaaagaaaatgagatccgatggtgttaccatatcgtgtagcgaagaggagaatggttctggattctgattctgaacagagatgaatgattgtgacgaaagtggatttttgaatcgtatagtgtttggtgctaacgtgcgcttagttctgttcagttaaacatgctaaaatgcgcctgttctttgtagaagaagatttggtctgcagagtaaaaaagagaaaaattcaattattaattaattatttaaaataataaaaatgtttcttgaaaatattataattaaaataaaaaataagaaaaatccgacctaccggattcgaaccagtgacctaaggatatctaatggcttaataaccaactacagtcctccgctctgccaactgagctaaggtcggtttgtgaaaatgtagtttaatttaaatattaataatataaaaaggtatacatgtaaataattatttatttattctaaaattttaaccaaatcatttagtaatatataagagtatttctctatttttttttagctaaaatagatagtccttcttataattattactctaatcatggtttttattttagttagtatttgattattttaatattttttataatttaaatttattaaatatgaattaatttttataaaataataaaaaattaatagtgtttttgaataatgtttcattattttttgttaaacaatctgtaaataaggttgctcattgaattgttcgagagtcttgtttatgtcagattgcatttttcatgagtttgatgctccggctaatttacaaacaattgcaatggttgatcgtttgtgttaat

SEQ ID NO: 194136 - DNA, 1718 bp, Cannabis indica
ctcagccttggaaagtttctcctggagaatctgaatctcactttttaaaggagaagcaaccgaattcacttcttccttaagttttttgccgaaattgttctttaaagtttgaagttcttgttgaacaaggtcccgctcgtttcttgtctctccaagctctcctttcaattcaatcagctctttctcctgaccatttagtttgttctggcaggatttcataagtttagcttgttggaacgctaccgcagtggtctgatgagaagaaacatatcgaaaaagttagttaatatggttgcaaaagtattataaagacaaaaggatgatgataatcacttaccaagctcatcaagctctgctgcttgagagcaagatcagttaagtcctcagagtcaatccacaacccgtctttcctcaagttgtctccaacttctttctcgaaaacattcaccataggggtggcaaaggcctgtacactctcgagaacatcagacattgctcgagagcgagcaggtaccaactcagtttgcgcagtttccattagcacttgctcgggagtcctaatcgcggccttggaagagatggtcgcttcaggagttttggctgttgatttccttgaagtgtccctgcaggtccctgctgttatttttctcttcttccttcttttcgagtcaacattaggattggagaaacaagcatatatatccatgttacctgcacagacaagaccccaaatgttaatagcaaaagaactgtacaagtattaaaggaatttgtaaggagttaatacctctttttctcttcttctttcttttcaagttgacaataggtgtggagaaacaatcaaatatatccatgcttcctgcaaagacaagacaaagatgttcgaagcgagtaattgtacaagtagtaaaggaattagtaaggaatcataccctccgagctctcgagctcatggttaattattgatgattctttcgagcaatcgtgtttatgcttcaatccttgttcgggggattcaatgtgagtgtcatcctcacagaccgttgggataatctcaagttcgttgttagcttcctcgcattggggaagatcatccaaagtctcctcagaatcctcaacaatatctatgtttgctggagagcaatgcagctccataggaagattgaatcgagggacaggcccatgatatgccttcttaaagcgagaaccagcttggcgacaagagtcagacaaaccaagagaatgtgacatatcaaagagaccacactcacgaagattatcatcagtaagcaagacttttgaactcttctcctctgaaggcaacttgctgatttgctcaactcgactgattatctcgctatcaaccttggatcgcttgaatggccctataaaaagaatcccaattaagaggaagactcaaatgataaaggaaagagaaaacaaacaagtttcatggaaggaagtttaccaacttgttgaaaattcaggttttcggctttgatggctgtagtgaagaaaaagcttttcttgtatggacctgcatggctagggatgtctgtaaccaagtttccagaagcataaggccaagtgcttagatagtaaaagccatctgtattattgcgattatcgcgaataggattggctttcaaaatatacatgtagtgaatctcctctgggctaggagttggccatcctttctgatggtacaacaccttcag

SEQ ID NO: 194137 - DNA, 1426 bp, Cannabis indica
tgtgtgatcttgagaaagaaactaactctcacttgtttttcacttgtgaaatagtaataacatttgtaaacagatttttgattgggttgggcttcatagtaagaagatggagcttggcgcttgtttaaatggataaattaaagagatgtagacattccaagtttggcagggaggtgtatataagatataacaactataaatattgtagtatattatatttgggatgcaagaaacattgcttttttgggagaacaaaatgtatactgtgcatacaattgtaaatagaattaagaaaataatttgtaataggttttctcttcttaaaaaaaagaaaactaatttaaaagatagattgttgtttgagaagttaggaatacctaactaaacagtgcttgtatatttgatttagagcaataatagtactttctcatttacctaaaaaagaattagtaatagttttgatagttcatgcagatattttgaaaataaaataaaaaataattgacaaaactctaccaaaaaatccaatatatatcaaattatatatatacagaaaataaataaataaataaaaagttgttataatactgggtggatagagggacctgccagcatgattaagtgaacatatgcatgcatagataatgtgaagatggtgggcaattaatggtcatagtatgcatatggtagtggggaattacaacacataataatacaatagttgtagttgatatatattatgagaaatgactactccttattattatgatatacaccatgatattatccataaaaatcgagtgcctttcagtaccaaaccaccaaattttgtttgctagtttaaatcattttcttattgtcaatatattactattattaccattattaacaactgtccaaacattatccatgcatgtattcatattttctcctccatatgtaatcttagtaaacaggtatgtatatatttatatgtgaaacattatctaaaatacctatagaaagataatgatatatatatatagttaataatatactttatgcaacgtgagagatttgcgggataatatatataaatagacacatatatctctatcatttcattgataaaacaaagtcagaaattacacattgtggcaacagtagtactattagatttacgtttgtgttgttgatcataataattgacaccatctatggggtccccgtcccaaaaagaaaagagaaatatatatatatatatatatatataaaaactaaagagctataattatttatgttataaaaataatagctagctatacatgttaatttatatgatcttatatagtttataaaggttgtttgtctaactagctcaatctataaattttattcatcgtaaatggtaaatattttttttttatttataagtggcattgcatta

SEQ ID NO: 194138 - DNA, 2511 bp, Cannabis indica
  modified_base (1636)..(1636): a, c, t, g, unknown or other
cagaaacacactggagagggacaaactctttggggagaagaccaagaataccatcgttcgaggttctctatctccgacctcggcatcgattgattgcatcttcttcgacgtcttcaagtgaggagcaagcttagatttcgggtgaaattttttaggttttgatattttttggggggtttgctggttttggggatttttcttgttttggatttgttgtttgaaattgaaaggagtttgagcggatgaggttattttgcacaaccttgttcaaaagattacaaaattaaaacccaaacccaaaaattaaattaagagctaggaaagcaattttttttacccagaataaaattgcatattaataagaaagaggtattattaacaaagatacaaaatccaaacttagaaaagttcagacgaagaaaagaaagaccaaataatgcaaaaattcaaaccttgaatctacggcagcatttgaaccttcgacctgggttcttcaccgtttttgaggtgcgaatcacgactttgtggtggtttgtaatcgcatacccgtcgtcccattcgttcctcagtcacaactgttaaatctcaacttgctcaatggccatggtttgagaagatgaaacctcaaacgatacccgtggtcgacaaagatggaacttgtattggcgttcattgtcgattgatgggttcctgtagtcagagaagaaggttgtgttactttctctctccctggctctattgccctccctaatttagatttaggggtttattttataaataatttagttttattctttcaattttaatttatttattaaatcttattagaaaaagaatatgtgttaacttttttttttattttagatttaatggatgtggctatttaatattgatgatgtgacattattttaaatgacgtgtcttgccatctgtcacccaacatgttagaaaacggcaaggtacctacggagcttccgaaagtgtagcagaatgtatttttaccattaaaattttaacttaggtattaaactgtaactaattatagataaacttaagtatttatgtcgcaaattacttttttataattaccactttattatttaattaatcaattaattaaatacagagcaatatttatttatctagaaatttgacttaatcacattaacatactttagacacgtggcaaaaagaaaataaccttggatccaaccacggtccatttgggcattggaaaccacgtcagtaccctagttgatagtagtgggtgcccaggtagacactgagatctagcgaaggtgtttctaagtgtcatccttcgacaaaattcaagcgaacatgtcctcataaccctaaaatgatgaaccatgaagatgagaatgtcacctggacgtcctagggctcaacatgggtccaacatatcggtgttgggcgcccaggttaacatcaggtgcatcgtctcgcatcaactttggttcctactcgcttcttatgggcaatttgctcagtcattatcttaaaatacatgagagacttggcatgcttctttgggggaggacctcaaacacaggacatacttaagagattttggagtcatagcagaagatgtttgtttgattttgtactggtggctacngaaaaagtcatagccatctctttttttgtgcttgtatagtaggagtgatttataggttctggattggctgggatttggttcaaaaacattttcctcttgactggtagtttttagaaaggatcataagaagcagtcaatctcgaaagagaaaaacaatttatatagtagctcttgatactatgtttattacatttggaaagctaggaatgaggttttatggaaccgaattgtgtatacaattcatcatattgacagtttattaaaagctctttgattacaaaattgtatagaatagatacgaagaagttaagttgtaaagatagaatatggctcagcaatattttgcataaggagaatactgccatataaacttgtgtatagccaacttggttggtaattgtacttgattaaagttttgcaataaaactcattgcttgcttaccgaaaaaaagatacatgagagacatgcctcagccaagtttcagactttggagataagtctacaacaaacggtacttgagcaccatgaaaccctaatgggtgccatggttgacatgtagtcgatctgggcacaccatgactagggtttaggtttctaggaaaattcttagaccccaatgatatttcatcaacgacatcctgaaggagctatgggcgctcaggttgacattcaaacatggacactgatttcgtttaactgggtgatgcctgtgcaaatttgacaaaattaaaatttgtggagtacttttcaccaaaaagaatattgaacattaataagactaattccagggatatttacccccacctgggcacctagtgcaggctcccatgccaccttgggcgcctagtgcaggctcccaagccaccttggacgc

SEQ ID NO: 194139 - DNA, 1478 bp, Cannabis indica
gtacataatggaattattattatctatttttagttcatgaattgtaagtactcttagcattttttattttttttttcaaagttctcttacaacattgatatagctgttgcaactccctaatattgtttgctactatctatgtacagaaattggaccaagtttatgaactgcattgatggttcttgtcccattttaatttttcttttttatttaaaaaaaaaaaagaagagagagaaggaaatcttactaaatggaatataaaagaagaaaacataaaagagagagagaaagataacacgtgtagcatttactctttgctaatccaaaatcaatcctccacttaagcaaatctagccaaatccaatatcctcattacacttatcatcacaaaatggaattttctaatataatttagagtagcatttcaaagaaaggaaaaagaaagaaagaaagtttgagatgtatgatttttattatggaaaagtagtaattatagtttgtaaaaaaaaagttgtaattatagttttttaaattttaacctttttttatttatttaaattaaaatggaatgtatattaattaggggagtcattcttataattgaaatccccattttaaaaaatcaaataggaataaaaaaaaatcacacacgaaaaaaatcaaattgtctgagtacaatgcaaaaaaattaataattatattgcattagataattttttggatctaattttacaaaatatttttgttagtttttcttgttttcaaaatgctcatattatttatttttaatataccgaaattaaagacaatgaatctagaatgaattaccgatagaataatttggctgagtcacgaacaatgtcgcaaacgaagttccaacaatttttctagagttattaatgagataactcacaccttaatattgtgtggtggcttggttattctttatgtattctaatcttaattttggttgagtccattgatgaataaatttcagtcctcatcccctttctttagagcttagtatttttgaaagatgttttttttctcaacaaaataaataaataaataatgtaagaaataaaattttggtagaattgttgtttgtattgttaaaaaataaaatttatatatataaaaaaaatattaaaatttttatagattgattaattattgttaaaaaacttaaaaaaacaaaaaaaatattttataaacatacatatatatatatatatttttcaaaaaaaaaataaaactacctgtttacactctaaaacatatttaataaaatattcatataaaaaatttatagtatagaaagatacaatataatttttttttttttttacttatttaagtacgttattatattagtaatactatatttttattttaaaacttactatttttattaatctatgtttaatttttttactttctctactttactatttaaaaagtaaactattaataattct

SEQ ID NO: 194140 - DNA, 665 bp, Cannabis indica
tttcaaaaagaacaaggaaaaaaataaatgaatgactaaccttgtcttttccgagagaagagcaacaaggccaaagataaaaaacatcaaaagcatccccgagtgctcaaaatcgttcatgtgagatgggttcaagactccatccacgaaaaacttgagatggggcgagtagagaagttcaatacacatatcagtgaaagcaccaatggctataagataaagctctaagtactttagccttccatcaaaacctggaactgggttccacacccgaacccgaaacgactttggattcaatgagtacctgaccaaagcacaccatatgtgccacaacccaactaaaagaaataatgttcctggcagagcatgacccttgaaagaacccattgtttctctttttctttttctttttcgttttgggtaccaacgaacctctcaaatcgacatatgccttattgggtctctgtaacttccttttcctgattcaaaccaaaaacaaaaatagaatcaatctcaagggaacaaacatggattgaattgtcgtatcttttgattcttttcagggaaactttctcaaaataaagaaaaatatattgccttagatttgaaaaagttgatgcaaagccctttactgctctacttcatcaaacacacacacacacaca

SEQ ID NO: 194141 - DNA, 1799 bp, Cannabis indica
aagctgaaaccatctggtcctggagccttgcttccttcgcaactaacactgcctccttcacttcctctatctcaaatggcctctccagatccatggcggagtcaagagggatcctttgccagtcaataccttctatgcttaagccctgtcttctttcagctttatacaggtttgtatagaaggacactatctcatcgactatatcttcttcactatcaatgattgacccatcttccttttcaagtcttgatattgtgttcctggcttttctggcattcaagaggttgtggaagaatcttgaatttgcgtcaccctctttagcccatttgcactttgattttagccacacacttcgttcttcttcaaatacaagttgctgccaatcttttttgataacattcctttcgtccattaaagattgattccaatcatcagaggcctccagtcgatccaggatcatcaatcttcgttccatggcgatcttagcctcgtgtttgaggccataagtttcttcgctccacttctgaatgtttcctcttactgctcttaatttgctcgtgaatttcgtaccagcccaccctaacctgactgcctctttccaccagttgcggaaattattggggaacaatttatgttccagccactggttatcaaatcggaaagggctaggaccccatctaggcgggtttgagtctagaataataggactgtgatccgagacaatcctcaccaacatttcttgtctcacgtacgggaaaacgttactccaattgctagtaaaaaggaaacggtccaatctacaacaaataggtttgtctcggaagtttgaccaagtgaaacacccattatttaattttagatcaattaacttcaattcccgcactaactgatcgaacatcttcatactcttagtccaagaagagctatttagtttttcttgtaccgatctgactacgttgaaatccccgcctaaacaccatgaatcaccacaaattgcgctaagaccagccaactcatcccagaaatcatgtcttgttttgtacgaacacggtccatatatcccagaaaaccaccacgggcttctaccttttgcttctactaatactgagatagagaactcgcccaccaaggagtccagcacattgatacttctggtatcccaagctaacaacgtccctcccgaacttcgattggttggaatcaagatccaagctttaaatcgggatcgccaaatgctgccaatgaagttcctatctacagatgctctcttcacttcttgtaatattatcaaatccgggttgactatgttgatagatgccttaattgcttttctttttgccttgtctccactgcctcttacattccacgataggattctcataatgatctcttttgggatcccccttttttctgacctttgtcatagtcaatgttaaaggccaattttttgagttctctgatgctcttcctccgagcctttgactgttgtgttgtttgttcttcttcgccctcattcattatcaggttcagtcccaattcctccatggctctcaccaaattgtttccttgagcagcccctatctcgccccttgcagaaacttctgccgccacatcgcccacttccaaacacaattcataactcactgggcattctctaggcttttcactatcagtccaaagagccttgatatccttcataattccctcctgttcttctccttcatcttctactaatcccggatcatcatcttcttctgaattatcgctctcggaggagaaatcgagaatctcatttgtca

SEQ ID NO: 194142 - DNA, 1555 bp, Cannabis indica
aatagaccttgtagggatctgacgagcttctcaaagaacacactgtaatcttctcttaagactttgtttccttcctctacacgaatttatttctccactcttttgtaaaagtcatctaatccatccaactttcttttcagcatactcccccatagcccacctccagggtgtaccccagcggctatggcgaacttgagttcatctttggacaccttccctactatggtaacttcagtgttgaagcgttgatgtagcttcacaaactttcttgtcccctttgcttcacattggtgatacttgtgacaggcatagtgttatcacatgcagcctgatgttgttggaggaattcgtctgaaaatttcttccaagaagaaattgtcctcggttctatccatttgaaccatttatacgtggctctttttaatgtgattaagaaatattgacacctggccttacatgacaccttttcatcttcatcagctcattaaatgtgccgagatggtactttgggtcaattgtaccatcatatggtgttatatgcagctccttgaagttcggtggaagtgttccatttgaatctccctcgagacagggaattcttcatcaaactcctcatcatcattcaagtctccaacgtggcgataactttctttcgacacaattcttacatttctgcctccaacctcttcatcctttcgctcatcctcttttgggggttagcgagggaaacttgggtcttctatgtgttttgcactgggcccgtgagaagttctcctcttgtccgattcgtgtgggacttatcactaaagttgatggataagcccattcgcttaccttgctcttggggggagccatatacgaggtgtcccctagtatgagacttcttgggtgaagtctcttccctaggttatggggtgtttcactcagtgaaatctcctcatggtgggtaggctcgagttgtctcagctggcccattgagctcttgtcttgcgacaagctccttccgtgttcatcacttggggtgctattagtggatgacattgaatcacctttgctagcatatgcagttaagatctcgatccccatttggtggctttcgtgacgaaaatgcgaggcttgggttttgtctttgagtgtgtcatttaaaacttcttgcataccaaccacagtggtttttagcctcctgttcttccagcggaagtctcttatttcctcttcatagtagtgagcttgggagcttgaactcaccgagtacaattgcttttcctttctatgcccacaccttgaagcgtcgaggttcgatggcacaaatggtgaagggcaccgcaccagagatagcgttctcgatagttgagtacttctatcgatggggttagccatcgatgtagttatcaagtcacgtagtgctgggggccctcttcgtgtgttttctcggtggtccacactgattatttttcctttagccctctctgacggcaagaggttgatgtccccttcttatggtggccgactagttatcatctgtgtgaagtccattttctcagagacgatggga

SEQ ID NO: 194143 - DNA, 573 bp, Cannabis indica
tcaatattaatcctcaagactacagtaatagtggcaatgatggtaataataataacagtaagaatttctacactacccatgagaacagcaccaacaacaacactactaatctttcttctgcaaaaatgagaggcaagattatggcacatcctctcttccctcgtctcttgaccgcctatgccaattgtcaaaaggtgatcatgtacatgatgtgattaacatgaaaaccccacttcatgcaagggatttaaaaactttttttgttcctattcttttcaagaatattagtattttatatactgatctatttttaattattattattaaaggtaggggcacctccagaaatggtggctaggttagaggaggagtttaattataatttgaataatatttcaagaagtagtactacaacaagtgggggttgctcatcagataatcaaccagacccagctctggaccagttcatggaagcttattgtgagatgctgatcaaatatgaagaagagcttacaaagccttttaaagaagccatgctcttcctctcaagagtagagtgccagctaaaagccc

SEQ ID NO: 194144 - DNA, 1060 bp, Cannabis indica
aaaatctataaataaatatcattaagtacatcaaaagcaaaaatacttatactaaaaaaaattaaattaaccacgcgaagagcggctatattacctaattataatataaataaaaatatcactccaacactttttatattcactctccaaattagagtgtcaaggaactatagctagagattcctaatttaaatataagatcatcatcatcatcatcatcatatcctcaaatctacaaattagagatagtcattaaaaacattctaattaattaatttcacttgaagaattaatataataagtctcttcagaatcaaaaccagaaccagaactagaatcagacgaagacgaagacgatgataagaacgatgtggaagcattcatcttctcttgtaccaaacgttccttctcctcataagcccaatcaagtccaacacaataataaagaggaggattatgcctaaaatcattaatatcagaagctaagaaggccccatctcaaccaaaaacttcacagcttccctctttcgctctttcgcagcataatggagcggtgtccatccacaaccaccgccgccattattaacatgcttaacttcagcatcgatattcgccccgtgcttaagtaactccttcatgaccgagatgtgacccccctccgcggctaggtggagaggggtgatccctttggattttgtgttgcatgcaacaacatttacgtcgattattgtttggtcgtgatcatccttaagaagacgttttacctcttttaaatcccctttacgagcatttatatgaagcaaactcaaaccattttcatgattttgattgtcctttgatcgagatttgcttagcctagtccttgataaacttctacgacgcttagtagaccaaccatcatcatggtaattagtagtaaaaataataataatgatgattattattaagcgattgtgtaagtagttaattgagtttcttcttctttgtatatttataggttggtatgacggtattttaatggaatttaaatttttgaattataaatctaatccgcgtagac

SEQ ID NO: 194145 - DNA, 1304 bp, Cannabis indica
ttgcgggttgacctaatcaggtctagttagcgccaatcctgagttgaaatgagtcataaaaaaaaaaaaaaaaaaaaagacccttactataaagataaatggtattttaaaattattaaaaaaataatatattatttaagctctaggtctagcctaccttagcttagtgccaactttgatccaggtgaaacctgctcaaaatgtttagtcttaggttgtactagtttagtcaattagtctttctactatttctgttagtcttgacagctcatagctagtgagttcgagagtcggttagttagaggcggttactgattatacttcttgtgcattacattttttaataatcaatatactgagattgtccagctgatcaagaactctataacaacatacagttacaaattattatttatatatactgttgttgctggtgttgtgtcgtgaagaagcaggagaaaacccgtccccaccggaaactttttcttaaaacaaagttcaccaatgacaccaaaagctaataataataaatgataattaacaacattatactgtaataaataatacaagtacctttcattaatcccgaagataaaagtgattgattatgttcaagaatcaaagtggcttagcaataaatccaatcttcatattaattaaacaaactataggacaatatatatgtgttggtttgcttttgtaatctgaaatgatcggcatataacttttttttttttttttttttttttaagggatggacatataactaattggttatatgtatgttgtaataatcttttcttatgccattactatcattgctttttttttggaacaaccattattatcatgctttgctcgcagtaaataacacagttctatatacacacacgacaattagctgtcaaaaacgacacaactttaattgcaatcataataatcaacaataaatatgataaatttcaaaatgccaaaaacattcagaaaaattattacaaataaacataatatcacaattatgttccaaaaaaaaaaacataatatcatatataattaatcacacatgcttccaaagtacggtttcatatataaatatacatttatattaaagcctagttataatcgccccccactgtagatgagttacttaatagcaacgacaatagttaatccatgatcaattatgctagcaagaaatccatgcagtaatctctcacagctcagattgttaaacctagcatgcatgggcacaagagagaaaatattatgaaataattaaaggtacatctcaacaaatcaggatc

SEQ ID NO: 194146 - DNA, 1759 bp, Cannabis indica
atcagagccatatcccttgcgagaaagtatcctatctcatccgcacctatacagatagtgaccatgtccattctaatacgttcaagattggtgagaaaaaaaatggccaccatattgagggggaatattgtagacattggaataaatgatagagtattgagccatatataaaaatataggctactccactcatcaccacactcatcaccaattggttttgagatggaaccccatgattctaaacacataacactatcaactatatcttttgaaataacattcagaatctaactaataattaattatatttttacatctaaaccaagggagaacaatcgtcaagattaagacaaggagagttactatcgatgaagctcaacatgttcttagccaccaaatccaatgtcatatattgcacgatttaaagagttaatatagttgtttccagtaaagtttggaggtaaggacaactgcaggttgatcattgcttccgagatggaaaggattgaaagattcattgacaccaacttgaacgacattcttagtagttgtaacaaattgattgtcaccatcgtgactagaagaaatagttggaccactagtcatgacgaccggagaagaagaataatgattttaaaaaaaatgacaaatctaaacagagccttgataccatattagtagagaaaatatgcatttaaggaaagaataaacgaaagagaaagaaaaaatatttgaattctcaattctactactaataatagtatttattaagcacaagacaccacaaaatgagctcaaatttaatacaactgttaatattgtgtaattgatttattaactttacatactagccaattatttcaaatttaatggtacttttttatcaaatacataattatgtccatttaatatatatacaattgacaaaatatgtatttactgctttaacttaacatttttaccctaattaaataggtactatgtttgtgggcttttcactatgtaagttaaacaattagcctttactagtcattaaattagaatttgttatttttgtatgaacaacaaaatccattaacattttgttatactttcaaaaataaaaaattattttataatcatctatgtgaaatgatttatttattattgtattaaataaagataaaataaaaaaaatgtttacttatacaagtataagtatatatgatattaatttaaaaaaatatatatctataaaaagtgagaatatttttaggattccactaattgaattatataattagtcgtcaatatataagtatatatgatattaatttaaaaaaatatatatctataaaaagtgagaatatttttaggattccactaattgaattatataattagccgtcaatacatattaaattataaaaaaaattaaactagctaattgataaaacaagtactaaattgcactaaactacttattaaggtcaatgctaaataagcttgccctcccaatttagagttctgcaagttcacttttttcgaaatatttatctgcaatagggtgtccgacgcataaccgcctgtagagattgagagggaatttgaaaatcggagagattgagaaggagaaagctgagaatttgagaggaaggttcgatcaaattcttctttttttcgtgggaatggaggcgatcaaatcaaataaatactaagaaaaattgggtagacaacacggtacagttttaacgtttgaagacccattaaactaattaat

SEQ ID NO: 194147 - DNA, 1461 bp, Cannabis indica
accctgaattattgggatttgggtaaaggaaagagagtaaaagaaaggtgaaacaacttacccttatgtcaagaccattcaacctgtttctcaagatttttcctctatcacagacaaaatatagtaaacagcttaatgcagaagcccaaacagattcttccttttcttctatctgcaaaatacaacaaaggatagataaggataagaaaatgatgagaaatattgaccaaaactgcataaacacataaaaaaattaaatgaaacaacttctttgaaaataactattgtttctgaaagccaaagccttcttggcctataagatttatcaccaatttacaatgcctactcaatcttcaagtgccttccttggtttcaatccaaacattaaatgttttgtaataaattgttatctgcgagacaagttttctcaatatacatgcaaactcaatcttcaagtgccttccttggtttcaatccaaacaattaatgctttgtaataaattgttactctgcaaaacaagtcttctcaatacacaggcaattgtcaccttcattcactcatcaacctatatcatgaacctcctccaagatactatatagaaatctacatatataacgtattttggtcgagtgaaagtccaatccaggtgagagagaagaaaacaatcttcagaatcagatttatatttctttgacacttccacttagattcttgtgatacatcagcagtaacaactcttcgaatagtacaagatttagttaattcatgattccatgcaaaagcaatacaaagtaatattgagcacaaaattgtttcttatgtgatgtcatctataacaaccagggtatctcttttctctaatactggtgtttccatgcaagatatgaaaagcaataatacctgaacaagaagaagcagtatctcatataaaatgttcaaaatccaagactcaaaattatgaatagctgagcaagcccccatcttaagagaatcagttttcacttttccttgaagtgcaagtttagcttcactgtcaaagtatgattcctgtgaatactcttcttcaattgtggatgtgctatcagtcatcattggctctagcaattgagcatgaacaccaaggttcaaaatcaaatcaaatgcacgagatctacaagctgtttttggagaattgagcatttcctgaaaaaaattcaaatagcttttcaaaattgcacaagcaaaacaaatatataaatagacaaaccactacgtacaaacatggaactgaaatatcacctccagcataaacaatgtgaaaggagccgcagtcccagaatccgaaacatacctacaaaaataaattttagtgcccttttgctcaacctaaagactaggtaaacctgcaatccaagttgcattctttagatgaagacccacacagaactctctaacttagtacacaataagagaatgatgta

SEQ ID NO: 194148 - DNA, 1737 bp, Cannabis indica
ttcaagaagcatgcacgtaccatctaaatcttcttacacttagtagtgcatttcactgttcatgattttggagatgcaccaagttgttgtgaatatctaaacataagcaccactaataaaacctacctctttgttgtcacaaatcaccgcattcataagaggagtctgaccagatctgtcaacagcatctatgtctgctccttcttcaataagaagttcacacaactctgagttcccagtgcttgctgccctatgcaatggtgtgcaacccacctgaatggtttagagaattagcattaaattatgctattgtagggaaatgcattgtgtaaagaaagtaagggaaggctgttaattgaaggttacaagccttgtccttcagattgatctttgccctatgagagatcagaatttcagcaatctttagccatcctttgctggcagcatagtgaagagcagtacgaccgccatcattctttaaattaatgtcagctcctgttaaatagaaattaatgtcagctcctgttaaatagacgagtcagaataagggagtgtaaacgcagcatattctacaaaccaaacacaggaaggataaattatcaaagcaatgacatctgaaattcccaccttcaactcatgcgtatctatacatctaattttggtacaacaatttaagtgaaagtggatcaaacacagcatcaaacattaacttttaattccactacatcaagggtactgctgtttaatatctcttctcacttctgacagacgagtatacattttctagaacaggcatcggccacaccattaaaagcaaagggtttccactccagtttatttatgcatttcaagaaaacaagaaggaactaaccagaagaatacactaagtaaagcaactctagcttcttttgctgctttgctattgattcaagtgtaataatcacccatcaaaactatacaacacgttgatatttctaatttgacttgaatctattaggaaaatcattctttctttcattttttttaaaaaataataataatataagagaacttatcttgcctatacttagcaaaatgtccacaatttctgaatttccaatgctagctgcagaatgtagtggtgcccagccttcttcatcagcactgtttaccacactcgcggcttcatcaacagctgatagtatcttcaccacctaataaagaataattcaaacacatttgaatttgatgtcggaacgaacctccgattatctaattcgaaactaaatcatacaatgataataatgttggacaaatcaaccaaaacatttacacttgtaatctgaggcttcacggaaacaaaacaatagatacgagattttcgctagttttaccactcatttataagcaattaaacaggaaatgaaaaattgaaaggaaacaaaaaaaatggacggacctcgacttgacttgaagaggctgcgatgtggaggagggacctgccgtcctcgttccgcagcgaaaaagatttcgaaagctgctccttggaaagtgcttgaaacgtagaggaatcgccggtttcggctgccttgaagagatcttcggctttgaattggcgttctggttgcagagtagaatcgatctccatttccatggcgattactgtctttagcctgcggtaggttagggctttttgggggtttagtacagattacattacagagtaccgtttgtgtaatttaaatttacagttcgatg

SEQ ID NO: 194149 - DNA, 3303 bp, Cannabis indica
attttgcaacatatcttaatagttgctttgttcatttgaaaaaggtttggagtgcttataaagaccagaaacacgatctcttcctcccttcgagtgctcagtctgctgcagctggagtagctgggctaattgaaaactcatcatcaaggctcacttatgcccttccagctccaccatcacaggcacaacctacttcattgaaaccttctgcttcgtcaacatctgactcaaacggaaaacaagatcagctttcatagtacatggaatgtgaaaggagtcattactgaagctgcataccgatctgtatagctttcatagtacattgtacagttttttcacaaatttttttctttgcctgtctgctcataaagagtagacgattaaaattacaagggaaaacagaaaacagggaagagagtcatttgttttacatgtaaagatgactttcgcattgtaaattgagttagcgtcttgccaattagcgttgtgtaagcgaggtggtttgtgtgactgcatcatggcaacttttctttctaatagttggacattattttttttctattcccttacaactttaagaacagtgacaattcatgtcgtagccagccaaaacgcacaaagattagggagcatgattgattgattgattttacttactgtcatttcaattgaatgaagtgtttctttattattaatattgctattggaatttggaagatggacatctgttgcttagcaatgtcattatataaccacattgatgtgctatcaaatctatcgagactatcacacgacaggtttttgctacgatgtaatgcccctacaaaagaaagagaaaaaacacacagattgggatgtcatagccgtaaaatgaagagaattttaatattatacggatagatagcaatgagccgatggaaataaattgctgttttcaactaaagaaggttcgtaatcaacaaatgctcagtagaaaacaagtgactcaacagcttgttttgttttagtgattagaaaatgttttgatttctgatgattatagatatttttggatcaggcatgtgataacgcatagagagaagactaagaatttaaaaaccataattatctccatcaccatgtgacaatgctttgtggagtagtagctgataccgaagaagaagatgaaagagaaactaatcactggctcacaaactcccatgcactcaaaacatgtcatgtagtcttcgccatgaaactctactcctaccttctcgtcccgcaaaattcccaaaaccaagaccccgaaccccccatttctctgaactcgaccaccggaccctcattttcttcgacaaatcctcctcacaatccttgccaatgccaagcttccctgtctcaatgcaaaagatggtttggtacgttctcgattggggctcacttcagtcaggtaggagtattgagtcttgagtcttgactagctagtttcccaccaacacaaagtaaaaatggaatatataaatcacaatggtaaaaatgaaaatattaagactgttagaataaatgaaaataggtacacaaatgcccttctcgctgatgtggcagtaacgagaaacgactactttataccattatcttcttctgtctgtgtatgagtttcagtggccatatcatcatcatcatctaattcttcatgcatggcttctcttcctcttcctcccaatgccaaccttcaaactcaattatctttttccaaacccacccaaaccctttccccgaattttcatgaaaatcacaaaagctttcagctttcttacaaatctcactgccaccaaatctcttccctctgcaaacaaggccaaattcaagaagctgtggacttgttcactaaaatggagctcgagaatcttcaagtccagcctgaaatttatggagagcttcttcagggctgcgtctacgctcgagatctttccactggtcagcaaatccacgctcggatcatcaaaaacggtgagtttctggctgggaacgagtatatcgaaactaagcttgtgatattttactctaaatgtgatgcttatagtgttgcgagtcgtatgttccgaatggtgagctcaaagaacgttttttcttgggctgccattattggaatgaattgcaggatgggtttctgtgaagaagctttgctgggtcttcttgaattgctagattctgggcattttccggataattttgttgttcccaatgcattgaaggcatgtggagcttttcagtggattgggatggggaaagggattcatggatatgctataaagatgggttatggtaatggcatttgtgtgtttgttagtagtagtcttgtggatatgtatggtaaatgtggagctatggaggatgcacggatggttttcgacggaattcctgagaagaatgtagtaacttggaattcattgatggttgggtatgtgctaaatggggagaatgagaaaacgattaagttgttttgtaatttgatgatggaaagcgtcgaacccacttaagttactatatctagctatctttctgcttcagctaatatagctgctccagacgagggcaagcaagggcatgcgatggcaattgttgaagccttcaatttgggcagctctaaggttagtctgatagaggatgctgggttggttttcagtaagatggctgagaaatatgcggtcaattggaatttgatcatatcgggctatgtgaaagtaattggaaagattgacaaagctctctgtgacgcttgcatctttaatgtctgcttctgcagaataatttgaaacttggcaaggaagggcttatcaactgtatgccttttgagccaaatgcacatatttttagatcacaactagctgcctgtagagaacacaacaaaactgagttaacaaaatgtttgtctgtaaagctattagagttggaccagataattcaggaaactatgtggcactttcaaatgcatatgcagctgttggacagtgggataagctaaaaaatgtgaggcatttgatgaaaacaaagggcctgatgaatgttcctggctgtagttggatttaaattagagaagaatcccatgtctttgttgcaggagatcaatcacacttcaaaattgtggaaatcaatttgacattggctttatttggatcagaagttttgtgtacgtaattttcctacattgattgtaaactagcttctccaaagaattctagtcacactaagtggcttgtttacatcggtggtcaacttggaacagtgctctacccatcggaaagtttatttaggtcagtatct

SEQ ID NO: 194150 - DNA, 1671 bp, Cannabis indica
tttttgaaaaattaaaatttttacatttcatttagtagattaaaaattagaaaataaagtgttaccatatggcaccttaattagatgtccatctctaagtgaagaaataatgttcaagcaaattatgatgatactagatacaaattaactcttaatgagtacgtatttcgacaaattagctgttgtcgctttctaatgtgtgtcctgccagctaccatatgagataaaaagttaaactcatcaaagaattttacaactaacgtttgacaaagtaatcggcgtaattatcaatatataatatgagaaatgcaaaggtacaatatatacaatgagaaatggaaaagtacaataggtgcttggcatttttttttagtgtaattaaacattcaacctcatataacttaacataataaattttagatactattactaattaatagatgagcgttacttttatgtagtactaagcatcattagtttgtctaataaaaatgttctataaactataaacacatgacaatggttaacaaatgagacttaagttaccaaagagtggttattagacggacagtagcagtaacttgtaaagatacttgctaattaattatagaattttgttattggacactaatggtttggcactttttaagtggtggcgcttcatgattaattagttagccatattacttaaaaattaattttttaagttataatagatcggatatttaattacacaaataacagtaagtatgaaactgaagaaagtgctaacaccaattatgccattgagctgagcataaagttgcacaagtgatatattaagagatgatatatgatgactgataataaatatgattgccacacaatttcaagtgcaggtcaaattaatgatggaaacatgtggactacatttgcagcagtattagtaacatcaacaccaccgaaagcacaagggattaagctttttcggccacacaaaaatcattataaaataatattattgaaaaaatatatataacaacggatggggaccgtatttcatttggtgcatttcctatcaaaagtgatttaattaattgtgtatccataatgattgaggatatgtagatctactagtaatcattagtgctgtaattttgtgcatgtcatggtcggcccaatctatctatttatttatatattttttttaaaaaaaagactgtgttatggtgtgtttatgaataaatatagaacgtaccttgtcaatatttttaaagggtagtccgacaccatccgtaggcttgatatttttgtactgtgcttagattcgtgcagtgttttgctcatgtcaattcatatttcttaaaaatgccagctcattttcatatatatccgtactttacttcttcatattttttttttcacatctattaaagcatatgtatattttatagctttaattatatttatataactttctaaaaatattttacagttaatgatataaaaaaattattagtattattaaaatataagtgtaaattgtcaaattattgtatcatactccataaataaattaatatataattataattttttatttttaatagttttaattataaaattataatattaagtatcattgttaaatttattattatttaaatttatttataattaataaatacatat

SEQ ID NO: 194151 - DNA, 1965 bp, Cannabis indica
atttacaaaaaaaaaaaaaaacattcccacatttcctcatttaaaagggttgatcacttcatcttgatgtttgtatttttgatctgaattcttaaattagacatattacattacttagaaagataaacaagtaaaaaaaaatagttttcaataaaataaaaccaaaaaagagaaagaaaaaagagtgataaaaagttctcggcggctacgtattgtgtgatgtaatggtaggaatgtctttactagtatttattttgtttgagtgaagaatctgaaatccgaaacatcctttcttaaaagattttatgagtaacctttttaaaaactatcttactgtgacaattcatctttaataagatgaaattttttaaaatatatctaatattgatgaagttccaattaaggtaaaggagttctctataactcatctctaatcttcgacatcatctaaaactaaatgaatgagaaagagatcgaagccacttgatcaatatatatgaaaaaaaaatcagtgtgagagaaaaactatttgccatttttttgaaaaataaaagataaaagataaaagctgcatattttgtttagtatggtagtaaaatacaattacaatgaaacgacatgtcgtttatgtttcaaagatcggcatccgtctctgagtttgaacggcatgtcgtttggtgttttttcttcttcttcttcttcctgtaattgtaaatatagaaccacgggaatccaacagctaaacgagaaaggaaaaacggtaactttttagaaaccgaacaagctatgttcttcagagatgtcatttgccacgattggtagaagattacacagaatccaaaaccatctccaattcttgttaccacttgttctactctcgccacactcaacctctgcttctcttctttcacattcttctcatcattgtctctttcaagcatttcatcaaacactttccactcatcaaaactctcctctgcaaatccaccatttctccactcttcaacaacattcatcccgatttctcggcggcccatttgagttcaacccggaaagatttcagattcatgatgagctccaagaccctggtcttctccggcttcttaaactactcgaacaagttgctccgctttctacggaagcagaagccatggcttctcttgatgaatcgggtattgagtctagtgtagatatggttcgttcggctatctgggtattgaggaaagagtgtaaattggctcttttggctttcaaatggggtgatagatggggttgtgtgatgagagcttggaatttgatgatatgggtattgggtaaccatcgaaagtttaatactgcttggtgtttgattagagacctgcatcgatcttcaatggatacgaggcgagcaatgcttatcatgattgataggtaagatttagttatcatcgttttactatctcagtgatataaatgatgaacttaatcaactacttaaatgattaaaatttcaatgttgaatcttgtaatagtttctaatgactaaattaatccaacatgttgtttgggatgttaatcaggtatgcatttgcaaatgatccagacaaagccatatggacctttcatatcatggagaagttcagattgagtcctgaccaagaagcattctacatggccttaaattctctttgcaaacatgaatttattgaagaggctgaagaatttatgcacggaaacaagaagctcttccctctacaaactgaggggtttaacattattcttaatgggtggtgtaatgtatcagttgatgtatttgaggccaaaagaatttggagagaaatgtccaaattctgtcttacaccggatgaaatgtcttatacacacatgattgcctgtttctctaaagttgggaatcttttcgattcgcttagactgtacgatgaaatgaagaaaaatggttggtctccaagtgtcaaggtttacaat

SEQ ID NO: 194152 - DNA, 1407 bp, Cannabis indica
gatatcatcccttattcgtgatcacattaaaacttacatatactataataattactgccaataataaataggtcgactacatattttaatgaataaaaaaagtattaaagaaaaaaaaaaaagaaaaaagaacgaagaaaagattcatgtgcttcttacacttgttgaaagtaaaactccatccatgcatatcgcgtgattaattttcatttgaattattttttatttatccgttacagtcaaattatgactataagaatataagcaaaaattttaactgttagaccattgatacaactcaaattctaaattataaattgagcagaataatataaatatatatattattattatattgacattaattctcttctgaaaactttctgaaaaagattatatgcacatgcagtagtcccagtatatctctcaatcgacctatcatataaactatccaaaatagacttaagataatatatgtatttaaaaaagaatatagtaagcatttattatatgcacactaatttaggatttattatatagacaatacaatagccaatcagtattgttattacttaccagtgttatctaacactttctcgatatgttgagttgcgattggttaacgatattttttaaaaactattatgttaaaatatatgggacccgatacttagttgaaccaataatgaataaacttttaaagcctacctttaaatttccataccatctccaatgggagtgggagatgtacatggacacaacaatttaaccaacacaacaattgtaaaagatttgatgcaaaaactattcaaccatcaatactcatttaatatttattgaaaatgtgaattattattattattattattgtctcacaaaagaaataaaaaaaaaaaggaaataagaagtctacattcaaatttagttttgtctcataataaaaatgatgtaaaacataaacaaataaaaataattacctttggcacattattagtataattttaaaaaataaatgaaaaaacatatatgctatatcattagtgaatttcgaaattaattaagaagaaaaaaaatatatcatattttcatgcatgtcttaatagatagaaaaaatagaaaaaagtgagataagtatgtgtgtcaaccttatacgattttggtatagaaaaaagtggaaagatagaaaagtaaggggacgtttcgtaacacttttgttttttaattttaaaaataaaaaacaaaagtaaaatttgtgtttttaaaattttattttaaaaaaataaaaatgtgttctataacgacttttgtttttcaattttaaaaatagaaaacaaaagtgtgttctataactttcaattgtatttttatttaattttatttaagtcaggtccaggtccgggtccgggg

SEQ ID NO: 194153 - DNA, 864 bp, Cannabis indica
caaaactaaaaatctctaatcatcttcattgtcaaaagaatcttatgtatgtgtttttcagtgcattttattttgtgtgtgtgaatgtaattgggttaatttggttgggttatgtagacaggattattggaaaaccgttggatgcttatttaagttattaataaataatatatcgttgtatgctatttcatttattatgttaacaatttttatcaaattattaattaggtagctaatggtgattaatttcttttagttttcttgtaaagatgagactcttatactgtttggttatatatataggcgattgggtaaacctagtttctacacccagccaaacacatttattatagtttatgttgatggattaggctgtttaacaatttacatatgagtgcttaattagttaattatcaagtcaacgtgtattattttaattttaaaaattatgtatttttaataaattatattaaactataagttaattaatgattaaagtagttacataaaactaaattaaaaagtgttcacatatggtactgatgacaattatatatctagttaaacaattatgtcattttttaatttgtcaggtgtaaaatttgaaaaaaagattaatttgcaacactgtaaatagtttaaggaccactttatcagattgaaaaattcagaaaacacaaataatacataaatcataatttatttaacaagataaaaattctaaatatgcttagttaattagtcacatcaggtgaaaaaaaaactcatttatattctcaaagtggaatataaatgcaatattttcacccattgaaaaattatgattaggattaccaagtggttataattttttttttttttttt

SEQ ID NO: 194154 - DNA, 2208 bp, Cannabis indica
gacttgtcaaaaaaaaaaacggaggataacgctgcattagttgaaataatgttatttataatgcaggcatttggtaggacaccactaattagtgttagtccaaagaagacatgggagggaacaattgcaggcttgggtggttgtatagccacttctgttgttttatcaaaaattctttgctggcctaaatccatgctgaggtacaatgttttctactgctatgtgaaattcttgatatcagttcttttgtaattgaatacttatttttttatactcttttcagtgcaatagcgtttgggtttctcaatttcatcgggtctgtttttggtgatcttactgaatcaatgataaaacgtgatgcgggtgtaaaagactctggatctcttatacctggacatggtaatgacctttctcctgtagctgtatttattctttcctgttttttgttaaagatttcagtctaagaaattttttaactggttcttggcaacagttttccatggaatctcttagacaatcatcttaattgtagtatctattatcgtgtgcaggaggaatactagatagggtagacagttatctttttactggtgcacttgcttactcttttgtcaaaatctttctgccactttatggagtttgattcaaataacaatcaccaagaatcaaagtttcatcagaagaattttttggggttttctcatttcgatggctgcagcagacagaacaattagtcaaataaactaaaagcttggatgaaatatctctccctctaaaaaataaatatatatgcaccagcaattggcagtaatcaatctcatcctagaaaagcatttccttatatcctttcttgcctgagggggaatttggtgacaaggttttcaactccacctgacagaatgtcgaagagatctcttttcgaaccggaggagaatgctcgcttatagcaaagattaaccaaagccagaggtcagtttgttgatatatacagtagccaataataactgaaaaggctagtctagtctacattttcattgtctcttttctcgttggaattcttcaataaaatcttctttgtttgttattcgtgcatattcttgtatgttacttagcataacataggctaaattctccaacaccaaacctattaatattcacaacagaacacaatgaatggtactgaaacctattaatcactaaataacaaaaattatacagacctatgataaaagcacaacacaacacaacctttttggtactacaatcagcatataattggttggttggtccctcacttcacttggtcccacgttacacattaacttcatatgacattaacacctttggtttaaactattgttcaatgatgaagcctgtggttattagaaaatttgggatttgttcatgtttagtgtttttgaggttttctacttttcactttaatgcatgctgatactattggggacatgccatgtagatttgtttccgctttgatggattgattaatgatctaataagatttaggatgatataactaaatcatttttaatgtcagatgcctacttttaagtgatcttattactgttccatcaaaaaaaaaaagtgatcttattactgaactatctttctcctgcccaattatattgctggttgtaattaagcattttgtttatgtttttatgatgaagatgaggacattttttattattttcacccagaactgggtattgatgaattaatttgttactcttggtaaaagttctcatgcccctgagtaacgaattcttaagtaaagagatgagagtttatttctaattgtaactaaatttgtaatttatttattaattacgttgttattgggaaaaatgaaacaaaatagctgtaaaatgcttttcctaagaattatttgaaacaatgttactgtaatgataacaaatgttcaattaccaatcgacgtggtttagtttaagggcatctttagacaagcaaatgacatatcgtttcatcaaagctcaaatatgtcttttaaacatataaagatcaaaacgcatgtctttctacagtgctacggcaaacattcaaatagcaaatatcatgtcgtttcgaatagcctataaaaacgacaattttttaaaattcgaaggagctaccgtttttcatgcgcagtttgttttttgaggcttgaattatttctaattctaccataac

SEQ ID NO: 194155 - DNA, 1167 bp, Cannabis indica
agttttgttgggttttcatcatcatcatcatcatcatcttgatcgtgatcactattattattgttattgtaattattagttattgcacgcttttttaggtgggtgtgccaatggttctttatttcattgtctgttcttccaggcaatttcgcagcaatcatcgaccatctacatatatttaaaaagaaattgaaataagtagatgatcacgatcgatgagtacaagtctagtatacataatgaattgatattattattagttagattctatgtataaatgtatggttacttacttttttccatgttgttgatgtaatttgatgattgtattttcttcttcggctgtgtaattaccacgtctcacatctggtctaaggtaattcatccatcgtagtcggcaactctttccacaccttgatagtcctgtaattacccaaatcatcatttaatgtcattattaattatagtattgttatacataatgattggtcgatctcagtcatattttttaagattatttattaaagttatatgggatctcatagtggtgttcttgaatgtaattgtacatcaaatcacgagtttgctgtgttctaaaaaaaaaaaaaaaataaataacgagtttaattataattactttgaaaattagaaaataactgtccttagtctcatgctagctgggggaaattccataattaaatagatgtgtatgaatttgtatatataagcattaggcacacacttatatctgaaaagttcgaaatattgaagataatgaaggtagaataactaaaagtttgtagtgaaaagcctcagtactattaatatttaatgtattaaaaagatcagttttattataaaacacaatcaaccaaaatatttactttcataaacatatacttcgattattatatgcataagaatgctttctgaaatattatattttatatatatatataaatatatataccagcaaacttgggaagttcgcgccagttccagtgtccatatctttcaacataagctcttaacttatcgtcttcttcaggactccatgcacctcttttcactccattttcatcaataaacggagctctcaccatcttaatattaattaattaaattctagctctatatatataactgtctacctctctctctctctct

SEQ ID NO: 194156 - DNA, 570 bp, Cannabis indica
tatatatatatatattattggggcttgaaatggaacctttattacagaaagtgatctgtcaaatttgaagaggataatagctctggtgttgatgctctaatctaattaatagctatatgatttttatgaggtcttggatttatcatacggaaaagtttattcgttgaattttagttttaagttgaaaattataaaaatcataccatcatttgttggattttgtctttacaagccaaaagtattataaaaatcttactttactacttgttttggttgagattattattatactgatgtagcaacaagaaatctttaagattggaattgattgcaggaaggaattcattataaaaattgagcaaaattatatgatgttacaagaactcaattcttttatctctcaactaaaagatgaaggtgttatatatatctttaaattgtgatatttaaatgcatgcaatgttatttgaataacctcacatctagttctgaacttgcatttatttctttcataaacttttaactgtatatatgcactcatgttatgcataactgaagtcatattggata

SEQ ID NO: 194157 - DNA, 1960 bp, Cannabis indica
gtattaaattactcctttcgttttattagtgtatctgatatcaagatttctgtaatactctgtcaaacccaaaatgcctctcaattccttgagagattgggcaagttattcattgctgatatctttcttgggttagctgcgattccatccttcaatatcttgtgcccccacactttgtgaagttggcgtatattgattcttttgttagagctgtattgctttgcttacatgccttcaatggactgtttcgttagtgctatagatgaggatgctatataaacaatatcattattaacttcctcataaaggtgggaataaatcagtcataagggattgaaagactgttgatgtgtttttgagtccaaatggcattattagaaatttgtaatgtcgagtttgggaggcagtttttgggtcatctttcaatcccttataatttggtagcccgatttaaggtccaactttaaaaaaaattatgctccatgttactcatcaatgattggaatttgacatttacaacccacacaaaaatgccatgtcttctccttttttttttccttttaactaaattcaattgggctagaaaatggactagacctgacctgaaatttgcatgcttctaacatttctttaatcagtcgctcaatttcatttgtttgatatattggaccaacaactttcttccccacattttcagggatctggtatattgtggaatcaatacgattttcctgtattcttactctctgagagtagtacgaagaccatccaagaggtagtaaatgtcgtgtaatttgatttgcatgttgtacagtttactaaagcaataaaacgacttcaaaagaaaaaatctagttataacaatatattttggtagttttagagcattttcaatagaatgttaaaatgcagtgctatattttagcatttttaataaaattagttctttaaaggtgtgttaaaagttgtgccaaattttgcacaagatataagtataacattgtgccaagtttcacacaacaataattgtagcttttttaattacagtattcccaacaactattgtcatatcaactattaatgacctgttttaacacccattttttatttactatatttccattaattttttttaaaaatatttaatttatcaactatctttaatggcattttaatttttacactaattgcatctttaaatgttattttgtattggagcacagttgcaaatgttttgcaaatataacatttgtttattattttgcattggagatgatcttagtttagtattgtaattaactttttgatgtcacttatatgcaggtttctgaagaaattttgaagagacagagatcttataccactgttgtggctgagtttgatctagtgatgcaggtagcttgtttgtttttaactttctgttgcattttattgactcttatctcgcaaacatgtattgtttttttgcttaatgatgtttccatgtactatgcgatacatttgattcgattagacagtgaaagctggaacccatgattcagaatcttgtttaaaagaggagacttgctttcctttagggggatacaggtaaatctttttgcatttgtaggtatccataatgaagttaatggctgtaaatgttgttcatgatatgtatttgtctcatctctcttttgagtttgaaatctgtcttttgttttaaaatgtagtccttattctcgttggtatgactcagtttcattttctttcgtacgagaatttacattattgtatataaatatacatatttgtgtgcatgtgtgtttattgttcggggcaggggatttcgtgaaaatttctttctcaatcttatttgtacgggggaagtcaaaattggtctatagttgagctttataggattcaaatcttctattctgaaacttccatcaacttttagtttttgaaatacatcttcatatct

SEQ ID NO: 194158 - DNA, 1493 bp, Cannabis indica
acttttaaggtaaaaagagagttatggaaaaaattaacatcttcattactcaatccttcatagttccgaaggatagtttttatgggcccaagtggatttgcaatccacaccctcttcccttccttaaccctatttcctcccaaccaaacacataaaagctaaggattgatcaactcaatccatagaccttaatccatcattcctctaattcctcataccaaacgaagtgttaatctctaggtaattggataaatgatgaatgtgattgaaatctatcagaatatatatatttatagaaagcattgtgatggtaaatacatatcataggcactccaaacttttgagcgtgcatgttataaaaacagtttgacacatgttcttgcattccattaaactgaaaatcaaagctgctcgaattcagatcagttaagcacttccagctaggggtaccaaaaaataacagaacagggattgcagggttcaagttacacgacagagttgaaaacatagattacataataatcactacgttaaatctctctcttgcatagtaatgatggttttattgtttcgtataaaaagagaagttgaaacatgaaagagaacaaatgagaaaagaacattacaaactatttatatcaattactcaaggaaatacagaaacttgtgctcaaatgatgctaattttaacccaagaaaatcaagtagtggtcaattcattaaagttaatgagaaaaagatgaataagtaaaagaaatatcaattcttattttgttcccccagattagctatattgagtatcctccgtcctctttaatatcaacaatacggggaaaataaataattagcaaaatccagtcatcctcgaagtaaaactcagtgttggaaaacaaagaaaagaaaaaaaagctaagattaaaattagaacccatcaatcattgaaagcttatagtccaaaagactattcaattcacgaacacgcggcaaaaagtacgagtttaactaacaaaaccatattttcatacactcgaataaagagtaaaaacagggttagccgaattaacaactaaacaaagatcaaattggagttcaaacacaacaaagcagaaaccattattattaattcataaagacatgaaccctgtacaccgaaaagatcagcaacccattgaatctttcaaatacaatatactaaaaaggccaagaaacggaaagaagtacgaagtaatttagagactgaccttctcacctctctcgatgtacttaacggctacaagctcgtcagtctgcctgtctctcatcaacctggccaccccgaaatttcccgacccaatatcgcgcacaagctcgtagcgatcgctatcgtgcataatcggtatgtccatgcctggtccaactgtgatcatcgatcgatccatctttctttttctagtttctttataataagggaaaaagaaaagaataagaccaaccactcctctctctctctctct

SEQ ID NO: 194159 - DNA, 2089 bp, Cannabis indica
ttttatgtaactgagaattttgcttgatattttctggttgggaattgatattgttgactcgaaatcgaagtgaaaatgtctgatttgctcctctcatttacttagtttatacaagtttatataggaaggaaacttttaaattaggctggaaattaacacatattggcatatggattgtggtagacttatatgtttaagccgatacgattgtatgaaattatacacagttgcactcattgcacgtttgttttgcttgtcatatgatgaaaccagctttgacaaagtgacatttcggagggccagagactatactaattttagctcaggcttggtccacgccattatttttgaagtggaagatagggaaacaattgggggttcagcatacgggggtcaaagagcagtatgttgcacaggggatcttgcgaaattgggtgtatgtaaagaaggagaagtcattcaccgcccctcacctaagaatcctgattggcctcaagtttttggtgtctcatttgatgtaaatgaagaaattactacattgccttcaaagtccatagagattactagaacaggaatgtataacttgtatttcatacactgtgatgttaggcttgagaatgtggttgtagaggggaaaactgtatggaaaaacccaaatggatatctaccgggcagaatggcaccacttatgaaattttatgggctcatgtcatttgcttttgtattacttgggctcttttggttctcacagtatgcaagattttggagagaagttctgcctctgcagaactgtattactctagtgattacgctgggcatgttggaaatggctctgtggtactttgattatgcagaattcaacgagaatggaatcaggcccactgggataactctatgggctgtcacctttggtgctattaaacgtactgttgcacgattgatcattttaatggtgtccatgggttatggtgttgtcagacctaccttgggtggaattacatcaaaggtagttatgcttggagcaaccttctttgtggcatctgaagttcttgagatggtagaaaatgttggtgcagtcagtgatctttctggaaaggcaagattgtttttggttcttcctgtggctgtattggatgctttcttcatcctttggatattttcatccctctcagcaacttaagaagcttcaggtacttcgttacaattcttttcaccttatgttcatcttttgctctgttatctcccatgcttgagcttgagtgagtacatgaattttttatgcgtccaacttaatatgcattttggtggcctcatgttatactggttatgtttccccaattcttgaatctgtagtttgctttaaagaaaaaaattatactgctaacaaaatttgatttctttccaggccaggcgaatgttgattaaactagatatttacaggaagttcacaaacgctttggcagtagctgttattgtttccgttggttggatatgctatgaggtagtcaacacaaaatgtttacagctatgctcttttttcttctgcgagcttagcttatgatgtagtttagttcgtttaaatgtgctttcaaatttatttacaattgatgatattttaaattcggaattgcagctttacttcaaatctaaggatatttacaatgagcagtggcaaaatgcttggattatccctgccttttggcaagtcctatctttttcggttctctgtgtcatctgtgccctttgggccccatcccagaactctatgaggtaaggactgcgtcatcccatcttcatcgggatgcatcattctcatttgtcctctttctatgatttgttcactgttgaaacaaaactaattaagtgccatcctgcctgaatatatgtagaaaattaacttccatgcagatggcttcgttttttgtttcttattcaatatgcccaatttataccactctctctgctgtcttatgctttcgataggtatacttactctgatgatggaaatgaagagttcgaccgtgatgatacctctttgtacactcataaaaccatctccaatcccatctaaagatgttcgccccgtgcc

SEQ ID NO: 194160 - DNA, 1058 bp, Cannabis indica
aatattttgggtgtagtgtatatgaattttaattcaagtataatcaattagaatgaatgaacatatttctacttatcaaaataactcattttttcaatccttatccatgtggtacttatgattttcttaagaactaatcacatatcttcttagaaattaatgaaaatcaatatgctttgattaaagttaataactaaagtttggaataatttttcctacagctttaaagaggccaattttattttcatttatttaatgttttttaagtttttattatttaaattttggatttcctctttgttttttcaagtgtgaaaccactatctacttataatttttttttttttttgaaaatttagatcttaaattttgaaaataaattaaatgaagagttttttaatcttttatattttaaagtgaaaaaactcaagattttcatgaaaggcaataaatatttaatctataatttagtctagtactaagcaactctcccataataaataaacaataataattaaaaaaaacaccagatatcactactccaaactccaaatgatgagccaaaacattaattattttcttaaaaaaatatttaattttttcaataaaaaacaagagttagttttcaacggatgaacagtcccaatcaagatagcaattcattgacaaagctcaaatactatattttgccatatatattatcataaccttcaagaccagcaacacattggaccatctctaatatatttggactatgaaagtggacatttcaacttattaaatcacttacatctagggctctactagctagctacatagagctactgtcaccttcattcatttattaatttctttgttaataaatggtgtgcaactaattccatccaccaccaccttagtcttttgctaaacatgttatgtggccaagactgtttggtggtacatagcgttaaggagctactttgatgatactaacttgtacatagtaagtagtgtattccaactcttaataaacactatgtattgcctattttttagcactatttgtatatgcatga

SEQ ID NO: 194161 - DNA, 934 bp, Cannabis indica
tgttacattagttgaagtataatgcgaaccaaaatgacagtgcatcactatgtttccatacctgcatattatggcatcgtctttggaagaaccacgtccgtagagatacattacacttaaggcatctgaaccaaaaagaaacagtgccgaaccactcctattaatggaaattttatgaacggcaaattcaagttccacatccggtcgcaacacctattaaatttaccagatttaataaacaatgcattgaaatcaaaatgaagaaaacagtccaatagttcttcaagcaagtataatcaagaaactgaaagcttaattttaagttcttaacaactgctattgttttcatagattccaaattacatagagatgtcatataacaacggttgatatgtattcggaatcacaagcataggtaatggagcacccacattccctcatattttccttcactttctcagcaaccaaaaataaatttgaaaaaagaagagagagagaaaggagagacctttgaaggagaagcggcaaggacagaggtgggttctgggtcgccgaggcgaacggagatcctatgaaggaaaagttggatggagtcccaaaagtaaagcctggaagctccgtcccaagccaagagatttgtggggggtggagcgaagttggaggcatgggctggagtggcaggagcagtgaagacggggtgagtgttgagggggacccaatggagttcatttttgggcgtggatgaccttccatgatccgttttcttctcttcaaattcgaagttgaatctcatcttctggctattcggagctccccagctatggtgcgagctcttaaaccctgatttttgtttaccgggaaaacaactttctccaaacgacgacgcttcatccttgagaacatgaacaaactatatttgtaggtcataatataa

SEQ ID NO: 194162 - DNA, 2405 bp, Cannabis indica
tattatttaaaaaaaaattgccgcattttcttttgagatgacgtggcatcttagctccgaccagtgtgtatataaaggcccctaaacccattctgaaatctcaacatttaacagttatcaccaaatcaaagagaaaaatgggagaccatcatcatcatcatcatcaccaccacctaactcaagaatcatcccaatccatggaagatcaacctctcaatttctcagctctccgcctcgagagttcacccaccatcactacaacaccccaccaccaccaccacccctgttccaactgcggcttcttcggctccggctccggctgcattacagaccactccaattccgcctcccacaaacgaccgttgccacctccttcaacacccacctctcttctttgccctaccgatcttaacgatccccaacccaaacccaagaaactgtttcttgaacagaacgacgtcgcttcacaatctccgccaccgtctgcggcggcggatgactctactccgactaacccttttctccttcgccgatgcgtttcggatccctaccacgctcctccgtcgaccgattcttttaggggttctggttctggcattttctcgaacacttacagttctcctcagaataatgtaatcaagaccaacactaactccgtcactccttgctcggccccgcttcctcctcggccgccgccagttctccgccgctgcgtctcagatccaacttcttctccgttcaagaactattcacgtaattcgagctctaacgatttggataaaaccccaaaaccaaaggtattatttatttttattcatttaattaattaattaaaaaataaattaatacaattcttgaatttatttatttttttaattaatttgacagaagttgggaaaaatgtgggattgttggaaagagatgaattcgaagatggaagaattaatgagtgaagaattattagaggaagaaaacgacaataataataataatgttgttgctggttatgagaaaaacgacaacgttgatgaaaaacgacgtcgtttcgaatgaggatgatgttgtagttgaagaatctttgagtgtggagagaaaaggagaaagcttaactgttcgattcaactgtcaatgtggaagagcttatgagtttcttcttcctggtggtaactgttactacaagctcttgtaataataatctcacccatttttctactcattttttttttctaaaaaaatttaaataaagacaagacatgttctggttttgttgcaattcttattctttgtaaagaaattaataacaataataataaaaacaaaatttagcactgtaatttgccttatatttagttgttttagtcgttttgttgtaactattttttcatgtatgagaatacctatatcattttttttgactttgtttttactaaaaaattaaaaattggaaaacgtgaatatatgcctaaatttgttttgatcgtggtcaaggcacctaattgtttgtttgtacgaaatattgtcgttctaaaactgaattcatgttattctttgtcgtttaagcatgacattgtcgtttataagaataaactactgtcgttttgccccaacaacatgttacttattccattacagtttaaacacaacatttaaggttgcgtatagttagaggtaataaaataaaatagaataaaaataaattaaaatgtcaatatttctactattttagtgaaatattctattttttttaatgactattatattttaaaagagaaatttgactaattatccattaatggggccaaaattgttctcctaaacataagttatttaatattagtagaataaattattttctcttaaaatttcattctacccctcttatttgaacatacatctctatgtaaaacacacacacgaaggagaatacaatcaaaccacccacacggtccatgactcaaggaccagctcgatctcgcgaccacaccacctacacgactcacaaaccattacgactataccacccaacgccgacaatgtctttgtcaaaaataattcttaattttttcatgaatttttaattgtaattactatattttttcatgatctaggattaaagcaattaaatttagggttagctctatttttagtggagaatatgtaatttttcaggtttttaggcttgtactgtgttttggagagaaatttgtgatttttgcttggcctaatataagttcgatgtaaattcgatatagggccggatggttgtttaatattaaaggggttgaaagttgaagaaaatacacccataagtctgatatatgagccggtagtggctggatggttctcgtaattttaagttttgtaatattgaaagttgagatgaaagtccacgcgctcatacttgc

SEQ ID NO: 194163 - DNA, 2034 bp, Cannabis indica
atatcctgctacagaaaggaaaccgagagttaaaataattgaacagaaggagttattaattttcgctgcaatcaatgtaagattcttaaactttgttattttatcgttttgttaattttatattttaatgtattagattattatgtgataatcatacattcaactattattttcaaatggaaaacttacaaaaatactggaatttggattaacttttacaaaaatactgtcacacggaaatctttacaaaaatactgtgtttttataaaacaccagtaaaacacaaagcagaacaactcaaaacaacagtagaacaactaaaaaacaccagtagaacaccagtgaaaacttaacacagtatactgcagtatgaaacttataaaaaaaatacagtaaaaaatagcaaaaattagtataccatgtaaattttcatacctaaaaaaaaactaagtgggcttcaatatgtacaaaacccaatatattgtagcccacgaaggcccaaaaaggagaggaaatatgtgaacgtggaattgtggacggtagtggataagttgggtccgaccgttacaaaataaagactaaaaaacagagtgaagctctttcgacggttggaggttttgcaatggcgtccatatctctttccttagctacaatatcttcttcaaaagctttgctttctcaccaaaagacatcttccattgccagcctcaaaccccatgataagaccttatcacattctatattgggtaccagtctaataagaccaacaacattgaccacaaccagaggaaaagcctcttctcctacaactaagatcacttgctcagcttcttcttcttcttcacctcttccctctgcccttttatttgactgtgatggagtccttgttgacactgagaaagatggccaccgtatttctttcaatgacactttcaatgaggtaaccaaaaaaatatattgtgaaattagaagaagcttaatgctactctcattatacttctttcagaatatgagtcttttgttttgttaatattgtgaaacttagtgagaattttgcttggtagcttggaaaatgttgggaaagaacaaagaagagatgttagacaatctcttttttttttgggttttgattagattggaaatttaggagatgggaatattgacttgcatggattaaaggtatataataatgggattcattgtgcagaaaggattgggtgttacttgggatgttgatttgtatggggagctgctcaagattggaggtgggaaagagaggtaaggaagggtcttcctcaagtcattttcatatgttaatgtaactttgagttaaattagtagtaatgaattgattgtggttcttgtagaatgactgcctacttcaacaagacaggttggccagaaaaagctcccaagagtgaagaagagagaaaggaattcattgcttcacttcacaagagaaagaccgagttgttcatggcccttattgagaaaaaactactgcctcttcgacccggtgtagctaagttggttcctacctgaccttctattaagtgtttaaataaaattcatgttttgtttgaaattcaatcttggaagagcttaatgacacaagttagatagtcatcaataatcattgatggaataacaatttgttgaagtcttcctcatatgtttgaaataagtggtttggcttttgggagccaacttgattataattttcaattgggttattgagattttctaataaaattttacaggctggttgatcaagcttttgcagaaggtgtcaaagttgctgtatgcagcacatctaatgaaaaggcggtatgctttattgggtcttaaagttcatatttttcgttgcaagttatatgcttccacttgagattaatttttactatgaagggaataagtacttactatgatctaaactgccagttttttttagcttttaatcacactattatgaaatgtcaatttacaagtatttcatattgttttgtataatttagtacattgatgtgttctgag

SEQ ID NO: 194164 - DNA, 1018 bp, Cannabis indica
cctttgagatttagcttgctataacagtaattattcaaagctacatataaattcttaacataactacatactatttgcaaaaacatagccaagagcaaatacattatgaagagagatacaggcatatgtttttttgagacatttctctttcatatctcttttgatcccattaattcagttgtcctgctgcgtgatctgaaaacaaatctacattatttttgaaaggatcctataatataatatactacacatttcataattatataaaaatgattaaaattgtataaaaggtcaattatctacgatggtcaaattcacttattagctacaagtgcatgatgaaaatttctaacaataataggatgttcaagaaaacacataatattaactacaaggttttgcctagttaatattagaaattcctttatagattagaaattcaatgcaaaattaaactatatatcagacaacacaataatatatgtgggtgtaccaaacaagttaagtctacaatcaaatttattatgtatatatatgtgtaaacattctcctatttttagaaactctgcaacggaaaaataacctgatcaaaatatttacttgagtagctatattataattaacttactattttaaattttcttctctgccgactgagtatataccttctctatgtatatatattagctacacgaaccaaatccactccacatattatttggttatcaaactttacgtttgatatcattcttttaagtactagtttataaaattaataatgattagaggcgtggtatagtacaatattctatcaaatatataaaataatttattaaaaatgcacagaccatatattaaatgaatatagctatatatctatgtataaaattttataaatttagaagtgaattcgatatataatggtcactccctttttcaaagaaaatggaaaaacaatatatctcctaccccttatatcgtttatataagaattatgattgttaattttttttaaaaa

SEQ ID NO: 194165 - DNA, 1048 bp, Cannabis indica
catatctttagacatgaaaattgaaaattggtgctaaagtcaagaattgtgaaaaatactaagaaatctagtggcatttattaaggtggttaaatgaatgactctgtttgcttcttatgagtatagggacaatcattgaagactattttggactactgaacaagtcaactaaaggtggacatattttctcgcaagttcacaactttgggattattttccatgtctatttttggctctcagatttgcattatacttaaagcaaggtatcatccattaggttcccatgaacatgaaagaaaataaatataatccaatattttaaaagattttttacacttcttctaggtctttattgtctctactcaagattaaaaaatgtattaaatttcaaacaaaaaattcgtttgtcaaactcaaacatagcagtcaacatcaattaaactgaatacacaagtaccttacatacttaagtgttataaaatatggattgtttagtatcatcagcttaggaagggtatgactgtgatgtcttgtctgtaaccatagattagccgtccaagttgaatagaggtgaaaatcagtaatagttccaaagcatgtataggtaatgggatgtacgtaacaacaaacttttgtggagtaattttgactgagaattgtcaaagttagaaattgataatacttgaacctacctaccttccataccagtgagctagtatatatcgtgtcacgtgttaaattacttagtgatagtatcaatgataagattcttttctgattattcttgtcgagtatagtatctcttagaagatgtgttgtgatcctctcttacacttgacgcattaccaaataagtgatgcttcaatcacatacctgattttatcttagatttgtcactttctaatattgggttggacaaaacgaaataattactcttaaaatgagtgtgcatgttgctagccattagttaagaacttaagagcataacatattaattggagaaatacgtgctttcaacggtttgattttgtttttttttatttttgta

SEQ ID NO: 194166 - DNA, 1777 bp, Cannabis indica
gagggttgatgtccagacaggtataagattgattcttaacctttgtttggctgatggttttgacatgtttcccactctcttagtcacggatggttcctgcatgattgataggcggatggggattcacgggcatcctctagaaattcaggtatgttgaaatgatgaacttgttgaatctttacctttttattccattcgatggcttttctttttatgatcttaattagttatgttgttatgtttaagtgtgcttaaacggagattgttttacaggctttgttctactcagctctgcgatcctctcgtgagatgcttatagtgaatgaaaacactaaaaatttagtggctgcagtcaataatcgacttagtgcactttcgtttcacattagagaatactattgggtggatatgaagaagatcaatgagatttatcgttacaacactgaggagtattcgacagatgctatcaacaagttcaatatatatccagatcaaattccttcttggctagttgattggattcctgaagaaggtggctaccttattggcaatcttcaacctgcccatatggatttcaggttctttacactgggaaatctttggtctattgtttcatccttgggcacccagaaacagaatgagggcattttaaatttgattgagaacaaatgggatgatcttgtggcacaaatgcctcttaagatttgctaccctgctatggagcatgaagaatggcgtatagtcactggcgctgacccaaagaatacgtgagtatcttttaatgttcactttcgttgatcgtttgaacaaccttgtttcttttaatggtttagtgttatgattgaattagctattcagttactgataaatattctgttctttgcttgcagcccgtggtcatatcacaatggtgggtcttggcctacactcttgtggcaggtaagggcgtgttccattggagaagtttcctttttttccttaagatttactgtaaatttcgacattgatacaagtacttaactgatttgttcaattaccatttttaaatgttagtttacattggcatgcatcaaaatggggaggccagaattagcacgaaaggcagttgatttggcagagaatagacttgctgcagatcagtggcctgaatactatgacacaagaagtggaagattcataggcaaacaagctcggcttcgccaaacatggaccattgctggttttctagcctctaaaatgcttctagagaacccagagaaggcagcattgttgttctgggatgaggattacgagttgcttgaaacttgcgtctgcacacttaacaaaaccaaccgtaggaagtgttcgcgtttcgcttcaaaatctcagaatatggcgtaatgtgatcacgctagcatgggaagggaataaagttatggaagagaactctgctttaaaccacccttaacaggttgtgttgatgacttcctctataacagtaaagacattaatttgttagttttcttactttctagtattaagctgaccaaactgccaatatgattgtaaaatatgtatcccatatcataatttttgcttagcatgccgattccatttagaatggctttattttagagaagccttctaactcatttgtttggtttatttcccaattgggattggaattgtaagcattttagtctgaaatatattaaactcaaaataaaatttacttttctctatcttatatcttttttaatgatcaaattcaaaatatatattattgatgaaacattaa

SEQ ID NO: 194167 - DNA, 971 bp, Cannabis indica
ttatactaatagcgatagtaatgttaaactccattttctctttatatatctaaattaattattacttttattactcatgctgcacttagactgtgttttgtataaatgattgtcatgctcaattttgaagatatatttgtgtgatcttatttgttttaaaagtttttggaaaattaaataaaaaaaaatagggaaaatcctgatctaaatactgataaagctaaggaaaattctattagcaagtactgataaaactatataactattaagcttgaatgaccatgcgtgataaagcttcttttattcaaacagagaaaggctcaacctatctcttgactaaacaggtctaattgtatatatagctataaatatatcagatatatatataactacttatatatttataattggtgtgtgtagctttatatatgtatagatttacttttatatatactgtactgcctagctatacatgatatttattgcatttataatactacctttggttaatatactaatctgaatgacttaaaaatcatttgaattacacaatatgtattagtttcttaaaaagaatacatatgaagttgctgcataactttgaatataatagactaaattggtggttagatatatattcaacaatctgcagcccttgaaaagtcatttcatattttattttttctagctaatgtttgttcattcacatcgattatatatagctaaggccgggtcgtatattaggttggtacaattcaaagaaaatatgtaataattataagattaataattcaaagtactagctagttttaatcccatatactcgtgaaaacatggactactgtatatagtacaatacaatactattcatacattaatttaaactctagctccctatacagtgtgtattacaagctatcattttgcttcttattataagctctgtttgactcatagtacgcatagtacta

SEQ ID NO: 194168 - DNA, 1666 bp, Cannabis indica
gaaaattgggtgagtaataagtagtaaatgcacgcctccaatcctatccccgctccccatttatgccctctcattcccacctcgtccccctggaattcccatgcattgagtaatgaaaccccattaagtactcataaaaattaaaaaataatattaaataaaataatgtaaatgtaaatttgaaaatcaaaattaaaagaattcttgtatttgatatataaatattttatttaacaaatattatttatagttgatattttataaattataaaagataaataataagtcagaaacataatttactatatatattgacgctaagtttgtctttaataacaaattaaagaaaaatattaaagatcgaaattaatgaatgcaacactatattaaaaaataaattattatatataagaaatattttttttgggaaacatattataagacaaattattaatcaacattgtagtctttaattttaatacgattatacaaataaatatttagaaaattatacaaaaactataaactgaggctggatatagagtgagtggtatcacttatgattctactctaaactcgcttccagtatataaaattatttcctatccctacttcataaactactaaagtgagtatttactgccccattcagggtaggtaccggtacccgcagctaaattttttctctagttgtgagtgcaaacttgttaaaatttctttgggttttgttacatgtgttctccaatatatgttggcatataaatatatggaaatcattaattttaatctttatgatagatagagtgagtaaatgtctccctaattcagagaactttatgttttttattgagcaaaatatgaatatattatttgtaaacataaacccatcgtataattaagtattaattaattattcttcaaaaacaaagaaagtaagtattaattgattatatattgcgatcagtgagtgagtcttctcaagtcacttttagtggcttggaaaattgatatacagcatgccttaaagtgaaataaagcaaatctaccttctttttagtgtgtctactcatgccattgaccatccccacacagggatatttatactctagctaatacccctttccattttttttttatttaaatttttataataaagcatgcataaattttttacaatacaacgtaaaaactttactttcattaatttttaatagtttattcattttaaatatataatataacccacaaataaaaataaaattaataggatatataatgaatagttataagagtaattaagtactagatatatatataataaattacacatattatttttttaatctttaattgtgttgttgtagattaattatactattgtgtagatagtatgttgtgtcgtatatgtacgtagaacatgaattgtaattttaaagaaacttttatgtaaacaagcaatttagagtatacctatctgatgtagtatgtttctttgatatgatttcaattaaaagtttaaaaagattttctattataaatcatttgttatgatggtatataaatataattattgaatatcttttggttgggggctaagaaaatgaggtatgtgtgagtaaatagtctatattatttaattggtagagtattgttaccatatatataa

SEQ ID NO: 194169 - DNA, 1479 bp, Cannabis indica
tattatctatatatattttgttctgaaaataaaatccaagactaatatataattcatcaaaaaaaaaaaacgaaaaattgttattgttatatagtgtatagtattatcttaaggtgttacgattttactaatgcgattaaatatagaaaattatcttttaaaaaaaatatcaagtatcacatatattaattttataattattataaaaagttattaaacaattatctatatacagatcttaataataagataatattggacatgcactactgcctaatatatactaacaatacatgaattagtaaataatattgtatgtccaaaaaaaagaaataaaatagtattattacttattaaactcatgaagcatattatcaaccaatgatgtttcgtaaaactcaggtacagattaaccaataacatttcgatcgtgaaaaaaaaaagactaatttcatgaagtaatattccttactttcatgatttgaagtagactttacattctgtagttttggacttgattattgattaatatatgtttatagaatttcaagtcactagatattctttacatatattattagtaatattctatatagtggttggagaatctagtttggataaattaattaacttaattaattaagaatctaactctacttgtctttgaattgggttacaacacatctaaaacattattgaacgcatcataattaattaagtaccaaacaataatcttatatacagtatatataaacatatataaacatcaaatatttatattaagaaaaaggaccgaccaataacatcatgacaaaagctatatatatagtttggatataaaccgatcgaatcaataaacttatatatatacaaccaccactttatcactagtcatcaatttaaatatatttatagacctatgaatgatatcactttaatatatgctgcttctactagctatatagtagagattatcatgagtacgtattaattaaccataataaatattccataataatgtacaaatatatattaataataataacggcacctcacttcatcaagtgcttatagtttcttgtcttccccaccaaatcgtaaaggagattatagaaaacattggaagaattcatcatcaatccagcaaaaagttttatcttcccattaccataaaatagaaaggataaccatacctctattattattggttttccatctttcattgctttcttcagatcaccagccaaacctgtgaggcatgaaacacagaagacatgttactgaccagtaactttgaaagcatcacatgcttaaattttatgtgaataagcaatggtaatggtgaagaatcattgacttaatagcccaaaagaaaaagatgctacctttacgaactattctgcattcgcggcaaaattcagtaattaactcctcagaggagctgaagtctcgcgcccatactggagttgatgccaatgg

SEQ ID NO: 194170 - DNA, 1198 bp, Cannabis indica
aaaatacatatatattatatataggagttataatataaaaagatcgacactatcattatattattatttttctatcatgatcttaaaaattaattaattggttgatattgattatgaattggtacctaaatatctttattaattatagttacctttaaaacatattatatccttctattatcaaataaattataaatgacagaaataaggaagaagaaagaaatattaaaaaactttgttcaaaaaaaaaagaaatattaaaaaactgcaaaccaaatagaattataaatataacaacatatataaatgactagtataccaccattttatttattttataggagaacaaattacaaacataagaaaaaaaaaatatcttattattattattaaaacttaaaaatacataaatataattattatataacaaacaatatcattcaatgatttggattaagagctggaaaaaattgtagaccttgcttattgtctgcattccaaggataacaataatcataagcttgatgattagtgttaaaaagacaaggtccactaggatgaataatccatgagtttatatggaaaacaaatctatgttttgtcttgtaaatatcaaaccaatgaaactctttatcccaactaaacccgcaaaagaagagggtcgtgtcccaaatattgggttgaaacgagaattgaaaagactcgttatacttgagagttctgacaccaagatcatcgtctttcgatttacagtgaacagttaagattgtgtccagtataccattatttatgatgactacgtcgtcttcatgtattccaggtacaggaacaggaacatcgccttgttgactacattccgaaaatgatgaagaagaaatgaaaatgagcaaaagaaacaatggaatcatcattttggagaagaattactatagctagggttttcttatagcttgctgtttttggtacaaagagtagctcttttatagagtggtaaaaagatcgtttgtgaaaaatttaaataataagttttactaattaaggataaagggtagagatttttttattattattattaaatattttatttattttgggataaaactttctatattaattattcaatagcaatatttataatggtgcaatatttataatggttccaaagtaatacacatatggaacaatgtttgtatttttt

SEQ ID NO: 194171 - DNA, 1457 bp, Cannabis indica
tcttctcatttaaaattattacagtttttttttaatatcttttttaacaatgataataaaattaagattttgctcaaaaaagtcttgctactagcagcaaaggtagaaaaactccttcaaccaaccccacatcaatctaataaaaacatgaaattggaaattttttcatctttttctttgacatttttattgttatacatttaattttactatatgttatgtattttaatgtagaacaaaactttggaaaaagtcttttttttttatttaagcgtttatatattacattgcataacttgggactcgaacccaggacctccaacatacacgcaccctcttatggccacttgggctaacctcgagtaaattttgaaaaaagtcaattgtttatttttatttacaagtgataagcatcgccgagtatagcaatgccattatagttaggttgacacaaaaaaaaaagaatctaatcaaattaagtttagtgtctactctaaaagaatgaccatttgttgattttcttttgatggatgaacaacaaattttatagaaattaaaaacaaaaagtatgtgatgaagaggtggactaaagcagataacaatataatcaagataaatgttgatgagactatttttgaagttgagaattctcacttggcgaatttggtggtttggcaatctaatcgcatcataaacaaagcttttgttgtttattacttggagtgtgttcagctgttgttattgttgaaataatagcttgttgttattgttcagctcgttgttattgttgaaactgttgtaaagtcatctccaaatgccttctacatttaagtatgttttgtaatatttttttaatcagtttatattttttaaattagaaaagtgaaaatatttttcaaaatcatgtttaataaaactatttttattttttaatttttaattgagaattaaaattttgaagaaagacaattttttttcttaatcaatattttggactctaacccttcttagacctctgaactcggaccccgacccagaccccgacccaagacctaaaccctgacccgaaattggaaccaaaccccgggtcggacctagacatcgtgtaacgtccccgcttcaagcctccattgggcccttacacccacggactaatggctcttatacacgagtacgacactctggctgcttcatggactgatgactgaccctacagaccaacacgaatgtgacagtcagtagtcccgtgatttgtaaggggaaacaccgggtaagctgtacaatcccacaccgcctggggatggtcaagtgggatgattctgagactgtgtaggtatgggactgcacagttgaagagggcttaaatggattgattggtactacctatatcaacaaggtgcatctgttttcgtagccatctcgaaagactccacagttaagcgtgcttagcctggagc

SEQ ID NO: 194172 - DNA, 1353 bp, Cannabis indica
caatctcaaatagttacaaggtagaagtttttaacggaccaaaaaagttcaagggaacataatttaatatatagtaaaagtctaagggaaaaaaattactaattagccttacatttattataaattatatagatatatatagatatactttgagaatgtgagagatattcaattggagagaaagtagtttaggaaaataaaaaggagaaagatgttaattaatgtaaatggaatcttgttggaataattgatggtaaaactcttatattttaattttatatatatttaattttatttttttttgacaaaattcatatatgtttatttattattttttttttgaatttgatgcatacattaaatatatcattgttaaatatgattagtgtacatgtatatacataaaagtaaaatttcgaagtcaatataataataataatttaattagtatttaacggtaatattttaaactaacactttaaatttataaagaaaagtaaatataggagacactaaaacaaataagagagtcaaatatataaaaattattgaaatatgaaagaattttgccgcaaataagtcactgttattctgtgttatatatgtgttgccaatttgataaggtggaatgtagagacacatccacaatagaaaatatagacagtgtgtactatgtagttgttgggaatatttatcacgtttataatttaaactttatattgtttacgagatagttgaactagtttggattttacttgttgcatttggctgctttggtagattttttcttctcttttctttgtgaccatatatataatataattttttttgttttccgttaggattttatatatataattaataccacagccacaaagcgatgtatcaattgtttgtatatatacagatccagcatagataattagtttatgtcatcaacctatatattcaacaagtaaatagatctatctatcgaagcaaatggtatgacacacacacacacacatataattaataattaataattaatcattgaagaataattaattatgtctatctcaaataatattaatatattatacaggggtcgacgtcagaattagaaggagtgatttcgattggagcatggggaagtcgttcaggcggcgatccatggagctacaaacctaacactccctctccaataagagagatactcttccatgaaggtggtaatatcaagtctattttcttcagacaccaagatagatttatctctggggcattcggtggcagagatcctagggacaggggtacagagaggagggtaattaatctcttatatatacatttaattctttctctcatcatttt

SEQ ID NO: 194173 - DNA, 1333 bp, Cannabis indica
tgcagaaaaagaacaatgtttacataatcatatcaattcaagcatgggataacaaaaaactcacctagcaaagcgtccaaactcttggcaatggaaatatagttttgaatagtcacaagtggcaaccttcatgtaattctcataaccaatttgtttcaatatagtatctgcatatgaaagggaggatgtcaccaaaccattcacatcacatagccataaacttaagccctatggcaacacaactccattacaaagattactacagcgaggtcagaactcagaagagaaatttctcatttacaattttctttagtcgatatctaatttacactagtccgattaactttgacaaagacagaggaaaaaaactgccacgtggcatatcctagtacctactgaactatcatatgagttattgaatctttaagatgccatttaaatatcaaattctaccaacaactagaaatgctttttggaccaataaatcatcatttattcaagctatgacatttatcaaaacatgaaaaagcaaacattacatacctggaatctctatttcaccaagacatccatcaaataaagggagtaaagcaatctctgccgcttgatctaggcaactgttcttcccagtcaacaagaccaaataaaattgcacgaatcagatatcgttttccttaaattttcttaaaagggaaaatttgtaaaagagaataatagccgtatatacagtatttattccatcaaagagacaaacttttgtaaatgagtttcccaatatatctgcagccagtcgacatattcgttctgatcaacaagcttaggccaacgcaactcaaataaatacttccatgccttgtcccaacccgaaatcctgcaaaaacacatatatgttccataagcaagctaaattcttctcttcacttacacattccaaattttacaatgttttttcagaaaataaataataaacaaaaatcaaccttccatgttttcccccatttccatggccaacgtcgtcgtactcctgctcctccttgtcctcagaaccaaaatccctgcccaaaaaaatggagattttgctatctatcaatcaaaacaacaattcgttttccttctcaaatcattcctcaaattcccaaaacaattaacttttcctcacatacacattccaaattttacactgctttgtcttaaaataagaccaaccttcccgtttctccgattttcattgccagcatcaacatactcctgctcctccttgtcctcattactcaagttcctgctcaaaaaacgtgagatttgatttcaataaaaaaactatacattctttctc

SEQ ID NO: 194174 - DNA, 3907 bp, Cannabis indica
gtattgtagtgtatgtaatttaaattaaactattatttctaacaaaaacagaaatattacaactatatagtacaattattttttatataatatgatgttattattttaattatactaaatattatatatatatatttttatacttattaaaatagtattcatataatttaaataaaaaaaaaacaaacataacatattaaatataattttaaatattaaatattatataataaaatattaaataaaattttaaaggtgtgcatgtaaaattttccaatgttatattatataatattatacggtataataaaaagcgtacaaaactaagtaaatattatacggtataataaaaagcgtacaaaactaagtatggtatctcataaaatttaatttaataaatattataaaatataacataactaatcctaaaatatcacctcatacacatacattctttttacagtgcattaagtttttcttttcatacacatacattcttttttgctgtggcatacgcatacattcttacaactttggtagatgacattaaactattaattaggcaaacacttttaaagctaaaaaaacacaaaaataggcaaacactttatttaaaataatatctgtttttttgtaaggttatttaaaataatttaaaataatttataattttttttttcatgcaaaataatacttataaataatatttccatttgcagaaatttcacagggacctcccgccgactccagttttcgcctacggtgaatcaaagtcaaaggcaacagttccaggtccgacaatcgaggccgtacatggggtagccacgtatgtgacgtggcaaaatcatctcccttcaaagcacatactaccgtgggacccatctatcccgacagccaagccactcaacaagaagggcgtccccaccgtggtccacctccatggcgccatcgacgagccaagcagcgacggcaactccaacgcttggttcaccaacggattcaaggaagtgggtcccacctggacccaacggacctaccgctaccgaaaccttcagcacccgggaaatctctggtaccacgaccatgccatgggattgacacgcgtcaaccttctggccggtctaatcgggtcgtacattgttcgccaccccgaaatagaaaccccactcggccttccttcaggccctgagtttgaccggactttgatggtttttgaccgtagctttcgttccgacggttctatttacatgaactctactgggaataacccgtcgatccatccacagtggcaacccgagtatttcggcgacgccataatagtgaatggaaaagcttggccgagattgatcgtacgacgtcgtaagtaccggtttcggattattaacacgagtaatgctcggttcttccggttcaaattctctaacggtcttcagttcatccacgtcggatctgattcggcttacctcagtagaccggtattcaccaatgacattttactggggccatctgagatcactgatgtaattgttgatttttcaaagtcgaacagtagtagtgttattttaaccaacgacgcaccgtatccttacccttctggcgacccggtcaacgaatccaacaataaggttatgaagtttgttatcaaaagatatcgagatgttgacacgtggcgagtgcctaaaaagttgattgattatccgaagccggatttatccagtgctacgcgcacacggtacattgctatgtacgagtacactagcgaaacagacgagccggttcatctttatctgaatgggaagccgtacgaggctcctgctacggagacgcccaaggcagggacggctgagatttgggaggttatcaatctaacggaggacaatcacccgctgcacattcacctaggattgtttgctgcgatagaggaaagggagttagtggacttggacaaattcaagagctgcatgactaaacaaaatgacgccgttaagtgccagatcagcaaacatgcacgtggcaaaatttcacaggtgcaggctcacgagagtgggtggaagaatgtgtacaagatgaaacccggtgttgtaactaagattttggtgagattttcttacatacactccaatgcatcgtatccttttgatgcaactgaggaacctggttacgtctaccattgccacgtaagtacattatttaatcttttgtttaagcgtacgagaaaatatgagattttccttttcgattgttagtggtcaagtcaaaatttgtaaaagagaagtcctctttctgccggtttttttttttaaaagaaaaaagaaagaaatcttttgccagttcacattgagaaaattcgggttggaaattaagtagaggggaatgggaatccaaacaagaaaaagtgagagagagatgaactagttttcagtgattgatattcagaagaggtaaatgacaaatttatgatgataaaatcaagagcaaaaatacaaattgttcattccaataagtttaggaagtcacgggtgggaacgtacaaatggagtgtttataattttataattattgttttctttttctttttttttattgtcaatgttaaggggaagtgtttatagttaatatttgaaggctccccatatttgaatatgtaaagatttaatgatgtgtgcatgggcaactccaacctataattgatccatggccaggcattgtaaatagcttttaagctcaatcatatggttgagttcaaattattaatggccaattataaataaatggtttgctgaagtcactatttttattacgcaataaattaaatagtcactatcacacacactatataagtagcaatagcctataatttttcttctttctttttttttaaattatatatatatatgcttatacaacttttttttttttttgatagcttatataactattcttttattagtgtaatcaaaattacaaagtggtacaccttattttattttatttgatgtgtacatttgcagatattggatcatgaagacaatgccatgatgaggccattaaaaaatcatcaaatgaggagcttccaatggtagaagtagagacgagcaaaccattgctactcggttttaaatgtaacagtcttttcaaactttttagggcatgttaactttgtttactcataaaggaaaaaggaaaaaaaaaatggagatgtaaatgaagagaggaaaaaaggggtttggagaaaagaaggaataaaatatttagtttattattttcatccagtttaataataatataatatgtgtatgaccaataattctacttttattttagtaggatgatcaagaattcttattataagtctttttttttaaaaaaaaaaaagacaagaaagaaaaatcaaacctataataactgttttgaccaaaaataagtttactttgatcgaagaacggccttttgattttttggggttattttcttttgttcttcttagcaaaaaagagaaaaacaaaaagaaagctttttttcctgcatcttttctttatcccatttacataatctttttcctttcttttatttatttatttatttattttgatgaatcaactgagaaattcattaccaccaaatatgtttaatacaacttatgcgcaccttcagataggaaggcgtgagttatctatacagtagtataataaatcaattacatcaattataaaccatcaaaccaatctcgatccctccttgtaatgttccttaacattgcacaagtaactcggttcttaactaaccattttgtctactgcagtagttgttgcatgttaacatcatttaaattccaaattttgtcatttcgaacataccaaatttgatacattaaagttgccacagtagtagagaaaatttgtttctt

SEQ ID NO: 194175 - DNA, 1120 bp, Cannabis indica
aaaataaaaactacttttttaatgtaaattatgattaattatttaattaataaaattaatattttttaatatttattttttatctttcaatctcagccattggatttatttttatttatttatttatttattaaaatctaatatggaaaaatgaatatttaattaataaaaggaataaacaaacaaaagaattgggtgagtgaatgactgtgtctaaacacagtagagatgctcagtgagtcattcaggagagaagccacacacactctataactccgctcttttcaaacacattccctccatttcttccaaaattcaatctttgagaaaacccacaactcagatttattaaaccaggctcacaatcacaatcaccatctttttctctttttgggtgttaatgaactgaggaagcttttctggttcatgcaaaatgccaatggattctttgcttctgggctcctttaccactccttctatactaacgaaaggtttgttttttccacttcactccattttttgatgcatttctctatttgggtttagactctttatatttattattcttggatttaatttttatttgtggggtttggattgtgactctattacacacacattgttaatgtcagaaacttgaattagtttgtatgttttcatatgctattttttctctattattgagcatttgactaagggacattgaaattttagtctgttataatgcacgaatatgggcttttcagattaagattcaaaggtctgcttctttggtatggtatgttttagtataatgtaatattgtatatattcacaggtgggaataattggagaaggtgcaatctcaggaacgttgacttttcaggtagtattttcttagccttgtattttcattgcttataagtatgtaaagtcatttggctaaaagattatgaatgaaaattaggaattttcctattgaagattggtactgtctcgaagagtacaccgaatacaatgtttttgtgtagttagtttcttttataagagaatgtcatatatgtgtccttttgttccttttttctttaccctctttcttgtaaattttgatgagttcctctgtttactgctcatataggtt

SEQ ID NO: 194176 - DNA, 3501 bp, Cannabis indica
acaatccggtactaatccaattatctgtataaaatttggatatactagaagtaaaatatggaggattgaattatttgaagctcacacttacaattcgtgtctcttgttacaagcaatgatgtttgttgggcccacagtcctaacccaatccaacacagtagattcttcttcctgaccctgagtccatataatccatccaataaggtacgtacacgtcaccactgcatatatatgcagcaaaaataaaacaagaatggcgcgtggaaagtcacgtggtttttcccctcaccgaagtccccgagtttgtaaattgtctagtagagtcgtctctcacactcacatcacaggcttttaaactgaaccattaaaactcttaacgacactataaaagagaaagaaagagagagagagagttcttttctctctttttattgttttctttctttctctctccaactttttggcggctcctctggatttcgaagcttcagctcctcaacgaaaccctagtttcttccggaggacttgtttatacacctatatacatacatctgtatacgcgcgagtgaagtttcttcttgaatattgaatttggaaccgattctttggagaaggcggcaatggaggcttctgcggagaaaaagagtcacaaacagcaagagtttgctttggcttcagtctctgagctcgcttcttcttcttcttcttcttcttcttcttcttcctcctctgctctatcttcttcgcctattgttgctcggttcagcgttgatggtggaatccccgagcttcgtttttatcaagaatctcaatcgtttgccgttgtcaatgttgatcttcgagtggctcaggtcagttttcttttattgagtctggtattttcatttttcgtttggtttccgagaacgtgagagaaatgtattgaaagagtgaaaataacaggaggacgcggatcttttggaatcttagttacaaatgacttgtttagttttatagatttttttcttatcacaaaggattattgctgaggaatagagtgctagtccaatggtttagaatattataaaataggtttaacaatgtagaaaagggtaaagaaaagaagctgattcagagaacgaatttgtttttactgttaaagtatctgtttttaggtttttgaatattttttcgtggtttttaaattcgtgacttgttttacgctagtcctacacgtatatattaattattgcatattgtggcacaatacaaatgatcactttaaagattataatatgcttttgtgtgcttattttgttgctcagctattcaagttgggccctttgacctctgtttgtgtatccgaagcgtctgataccagcaaagaggtaatatttaattatttattactattaagattgataagagtttgtacttcaaagtttccaattccgatcagttaaagtttataagatagtgataagactaaatttcctaatagatattgattatttcttttacttccaaactagaagtattctaagggggtgactatccagtttagaaatgaggctgagaacagcgccttccactgtgcatttgagcaactgaaggaaaacttcattaatcaaggtgctattttagaattttggctctagagatttcttgtttctcatcgacgtcgataattaagttaacttaactagtttgaaacatgaaacagggtgccctttagctttaggaatttcgcgaaaaggatgctccctagctttagggagacttgaattgggagaaccttctcctttatgtcattagtgcttgtaactacttgatctgatatattgagattgaatggttgcgagtctcacatgtaaaatacaataatgctactgagactataatagataatatatagttgaaagagtgtctctttttcccccttccttctgcctaacttttatttattttatttttattgctggcatttgtgtatctgtttaacattcccgccttccttaatagataatatatagttgaaagagtgtctgtttcccccccttccttctgcctaacttttatttattttatttttattgatggcatttgtatacctgtttaacattcctgccttccttaatagatattatatagttgaaagagtgtctgttttctccccttccttctgcctaacttttatttattttatttttattgacggcatttgtgtacctgtttaacattcccgcctttattttgttcttgcaggaggacgattaccaaatggggaaacatcagtttctaaaagcaagttcgatgataaaatagaaccatcttctgctaaaatgtatttccattattatggacaactgcttcatcagcaaaacatgttacaagattatgttaggacaggtaatttgaatgagctgtcaaatttgctctcacgatcttcaattgtgaacgttctgtcatattgtgtgatttagaatttagagctgacttttatatgattcttgctgaattaatttttatatctgctgtttcttgctttgaatctgtagtagataagaatattgaatttctgtgaataacaatgatccatgaaatgaagatcattttaaatcttagtaacattttctcaggaacatattatgctgctgtcattgaaaaccgtggtgatttttatggtcgtgtggtggtcgatgttggtgctggtagtggtatcttatcactctttgctgctcaggtaccctttgctcatccccctactaagtttatgggattttccatccgtgagaaatgaacatggaaagacaaataatgacttcgtatgttttcttttctctattgcttttagggctaccttacttatctatattatttgatcttgataggctggtgcaaaacatgtttatgccgtggaagcttctgaaatggcagaatatgctcagaaactaattgctgggaatccagctttgagtcaacgaatcacggtgagaattttttgatactcaatcttttacttttgaggtcattgtgttctctattttgttctcttaggattatttttaactttctatctgtggatcagttatataaatttcaacgtgtataaatattaggtgatcaaaggaaaagttgaggatgttgaattaccagagaaagcagatattctcatctcagagccaatgggtatggcgtttcatccttgctttaaagggaagctgaagatttcttctaataatgttaatatgtagtgctttaccgttttttttatctatttatgttttttaatatgtttctcatgcttataaaacttctgacattgttttaaggggtttaattagaacatgtgcaataaggaaaaccagaaaaaggaaaatagaataaaaaattatcaacagtgttgatttaaagtgggttatgggtattgtaagctctatttttgctggagtgagttcatatataatttctctttgtgtctttaggaaccttattagtcaatgaaagaatgctggagtccta

SEQ ID NO: 194177 - DNA, 831 bp, Cannabis indica
ttgtccccttttatactttcattaatcaatgaaaagaatatagtttgtattagctaaacttaaattaattttgtcatgtataaataaacacaacataaatatggtacattttttttgtctcttttatgcaatgcaaaaacataaggttttttttttttattttgtccatagccaatatgccaatgtgttcaaataattagaaaatgatggtattggtaccgtgttgttgttgctattattattttgaacgatcctttggctttttatgcactgcacaactgataggtcgatattgaatattgataactatcaattttttgttttgttttggatgagaataaaaagttaatgcatatacttgtaaacaaaatatatagtcaaggatatgtttgatcaattatacctatatgcattattttgttcttcaaacttattatgcaagattatataatatataaaagttatggatggatttattgggtacaaagcatatatacaaatattttgtatttataggcaataaaatatatacatgcatgcattgaatcaaattaagggaagattataagagtttgtttagatattttgtcagttctatgtcttcactggattttttttttcttttttgaaaatttcactggattcttttgagaggtaaagataatgtcccccacttttttttttttgctcttgaaatgtgtatagttattagttataggttaaatgaccaccaactgaccaaagtacaatttggaaaatttaatgatttttgtcttttttatttgtttttcttaattgaaaaattaaggaattgatatttgttaatcttat

SEQ ID NO: 194178 - DNA, 664 bp, Cannabis indica
agagtacagaagctgatgagagagagctctacaaggacatctggcttctgcccagataacttggtattcttcccactaaaatattagggcagaaattaatttcatagtgggtaaaaaatagcagactaagttatatttattttcatgtttcaatttgaactaaactagatgcacttgatacccaatgacagacagataaagacacttttttttaacactaatctgattaattaatccaatcgcacaattaaatgctcatgcttctcttcaactacatctcaaaagtttcgagggtcacaaactcacaacaaaagctcaaaaagattaggcactcttctataatcaagctcgactatttcctactcaaatttcttggtaaccaagcaatttaacacaatttcatgcctcctattcatgacacgctaaatgggtcgattttcctcaatttcaataaccgtcactacagcacccaagtccaatccattctatacaatttattaaaagccctgttcagaacaaaccctagggtaaacgaaattcctaacttttaggtttttgatatagtgaaaagggcaataaacactaataagtttaaaaccccaggcttaatcccagaccagaaaaggggagagggggtcgaacactagcaattatattcagaggt

SEQ ID NO: 194179 - DNA, 1955 bp, Cannabis indica
atacccttgctgaggacataattgccagaagaggctgtaagtccattgaactgattgcaccgccgtctgcagcatattttggagccggctactcggcggtgcagccatttttgctctttaatttctatcttttcgagtccgatcacaaataataaaataaaaattcctttttatactaaaataagaaaaaaaaaatgtgctccaaaaatatggaaatttaggaaaggaatttaattgtggtacgaattctcatcataattagtaactgtagagggactctccagcatagtagaaggatatggtttgagatgttagagctaataatcaacagcttggaaaggatggtggagtaaaagtaataaataaggatatagataaatatcaattggaaaggaaaggaaaggaaaaaaagtaggtgagaatcaaagtaaggaaaaaatagttgcctaggatataaggatgatcagtttgaggaagatttttacgtatatgatgagatttttcctaaaacaaattttagtaaataatgaaagggatcataagatagaacgttgggtggagtcaaaatggagatatatatattttggagatagagagaaagaaagagaagtatttgttgaaagagatgttataggaatttattaagaaaaaaagaaaagaagaaaagaaaacgttttgttttgattttttgactggtcggtctaccggacggtacatagatagggtcatatatgtatatatgttggaattgtgaggagattttgttagatgtaaattgagttctctctcttctctaatatataatggatttgattggtgtttggaagctgcagagataagaagtagtatgaggaaaggagaggagagagagagtaggagagattaggtaatggaggagactgggagttggacttataaatataggaaagagaaaatagcagcatttcatttggagtcatccaagctaccaataattccacatccacttgtcaaacttaactcaacactaaaatcaactatttcattacaatgttaaatgctcactcatttaatattgaattttactgattttaatttaaaaggaatgctctattattaatttattattgttatttgaaatgaaggattctctttcctattcccaaagtaagatgagactacgtactagtttagtgttcccttgttctccaattaatgtcccatttatttttgttttgtttctcctaccattcttgtgtctgtttcataaaaggaaggctaccctttcattaatttcttttttcttttttgtcactataaccccccgaattcaatttaaatgatgaaggactccctcaaactcaaataattcttccttgccaaaaaaaaaaaaaaccttaaaattaattaaagaaaattgctaaaaaaaatattagttaaaaaataaaaagtaatcattttaatatataaattatatatactcaattttgaaatatactgtgattggcatgaaaatttcatgaaaattttgaattatataatatgtattttttgttagattttttaattggacttacattaaattttattgattttattaaaacttgagttgactggatagttcttttatgtgttaactcatattgttggtgatcaatagttaatgggtttattatctatgtgtaaaatctaggtgaagcaaaagtgtgtgattttctagttaattgaagcatttgatgagtaggtctagtccaactataattatgtagctaagttccctccttaactctataaatacatattatctcatttgaatctcttttgataatgagataaataaactatttctaatttagaaatctagagagaaagacttagttgatatatagtattgcactatcaaattgcggtaattactatggatcaattaagtacgcatatacctgattattgtatattgttatcgtattctatat

SEQ ID NO: 194180 - DNA, 1235 bp, Cannabis indica
tgatctatagagctaaaattcttcttgtttgacctcattgggttggtcttcacactataaaagtacaagatctcctttaggaaaggcacttccaagttgttcatcttataaaaaaacgtaccacccagccaaaagcatgtaagagaaggggatcatttgaaaaggttctatcccaatcttggccattagatttgcaaagtaagacctcaatgaaatatgcactccattagaaatatgggaccaactccacgcattgaatccctccatgctcgtggatgcaaagactcaattgcgaattctggcaccatcggcacattctgtcaacattccgtaggaatagaagaaatttaccttttgatccatcttcctgatggagtcattgaaaacttgtgcagcaagaggggtcttggccctcttttccctttagccttcacggagggttcatccttcatgatatgtttgtcctctaagatagttccaagaaccatctctggatgggatacttcagtaagaaccttggcttgggctccttccacgagcatgtcttctacgaggtcaggaggtgcaccttcgatgatttccacggtgcccaggtgaaaatccttgttcagatccatctataccaacacaaacacaaagggaaacaaagctacttgaagtaacaaactaagaacccagaataaaaacttgtcagagtttcattccaatcaaccaaccccaaagatctatataaatgcatagacctatgaaactcaaatagctagaaaaaattatatagacagttctaacctccctttcatagcgaatcatttctcagacaggtccatcccaaaattagaaaaaaaaaattcacacaacctacttcactgttcaacatgcaaacaggtctaaccctagcttgaacaaaaaatttctatcctaaacaaaaaataataaaaagttcaactaggaattagagtacttatgtgttgagtgaagaggagacggggtgttgttgcagaatcttgcttgaagtcttcaaacccagtcgattaaacggtcacaactggtctggaagtcaaaacctccatccggcagggggtttagtaggttgatttgaaggggtttgatatccagaaatagcctcaaatgaagatttaacaactattggattaaatgtttgaagtcttcttccatccatcggcgaaggaaaagcgaggaaggagaagtttgcagagggaatttggagtttggta

SEQ ID NO: 194181 - DNA, 1793 bp, Cannabis indica
aatgtttttctcatatatgtaattagaataaatatacacacgtaaactttgagcttattgctttagaaaatgcaattcttattttttataacaaaatttccaaaaagaaattaattaaaaattattgtgttgttattgtatagaattagatgaaagttaattaaaagagacagtaaaattgtaaccattgcttgtactaataaaattattaatatatatttaattagtgtacaaagtttttttaaaaaaaagtacaaaattttatagttggtttaatatttgtatatagagactgagatactaggtattaatttaagtgaaaaatacagcacagtgccgtgtaaataaaatgtttcttaaagcttaattaatttagaagcaaaaactgcagctaaacagaatctgtagccgaagtttaagctactgtacatgttaatatagctagattcgaatttcaataattatgtcccactagacttttaatatatatcagtcatatggcacagatatttaatcatcaactatatattaaataaaaacagttaagcatataacttagtaagtaaatatagggatagtttgtattaatacaattttatattcacagttattaattagttataatatttaattccgtattttggacctagctctctaccagtttatctatattattatatatgtttgggacccatcccataatttagataataatgatcgatcagtggatctaattaaattaatattaagattactgcaaattgtcagattagagttatttatatgatgggctagctagctcttaaacccaactaaagtattgtatatattatgatcaaagggatttaattattattatatataatatagctttgctattaatttgaagaaagaagaaaatatcattcatataatttaaaagaatgctaatttcaaaagactaagcaaacatacccctcatttgattaaaaatttatagtgtactcattatacataattagaatatatatatatatatatatgataacaataattcaataatatttaggatccacttgagaccaatggaagaatatttcggactaaagctctatcattaacaaagtgaaacacaaacttcacaattgggtaagtaggtacctatccttcccgagaagatcttaactcattcactcgatcttgcttggtattcgaagttatttgatgagtatattttttcttgctcaacgtgttgttaaagaaattgacaagttttgtcgtgatgtttgtagggtgagacactactataaaaaactcttttaatgtccaaaaaagttagaacatgacatgaaaaagttttggagagtttttatatccagtattgttgaacaaaaaaaaaaaaaaaaaaaaaaaaaaaaaaaaaataaaatacatgtccaacaatgttggacacaaaaagagtataaggacgtgaaaagttatattaaagtttattttatatttttctcgtgtccatttcacgtccaactttgctagacttaaaacatttcacgtccatttgttggatattaatctaattaaaaaaataaaataataaaattaatgatgagaagatgaaaacgtgtgacagttgttacgttaaaaaaatagttgtcagtcttaactattattattattattattattattattattattattattattattattattagtagtagtagtagtagtagtagtagtagtagtataaaatcaaagctacaaaaccctatatattatctttactcaccccctctcttcttcttcttctt

SEQ ID NO: 194182 - DNA, 1152 bp, Cannabis indica
tctctagaggagttatcatcaatttatactgcagctacttgcgaagctgaaggagtgttgtatactctttgatctaatcctacattagattgtatatggattgtgtagtttgtaagttaggaatgtttcttagacttcgaaaaaatgaagaataaggattcatatttatgatttctataagttgtgcaactattcttggattcatttttgatgatatgttgatttggttttctatttcatgctctgtatcatagaagtacaactgtaaaaaagatggtgggccttcatatggaagcaatgattaatataatgagaaacatgtccttgtactctaaatgtgtatattcctttctttcttttgcctaaagttttgtcatttttagccccaaaggaggtgaaagcaaaatgattattataagtgcgaacatactttctaatgtgtttattgagtaagagataagggtatatataactaaccaacttcaaatatggtacacctattttagtaactatcatcaattgttggtgttttatctgaaaaatgagattatcaatttagcaaaggtaactaaaacttatttttatttatattgattgtgtaatatgaattattccacaatataaactaacctatatggtaatgagtggcttctgtttgcttgagtttttttgttcggtatgcaattcgatttttcttatttatttctttttttaagcttccgatagatttgagcgccattttttagaagctaaatttgctcgtttcctcttttcttctttgtcgagtggcatatttatctattatttttaagcgtacaacaatagtataataagtttatgaatttaatattttccaaaagttgaatagtattttataatcacgaattacatatatatataggtatgtcagaaaaaacaaacattgttgaaataaaaatatagaacaacaagttaatcgatcatttatgtaagtaatttaaaaaacatatctttattgaagctgaaattgaagaaacagtgtagagtaaatatataggtgtttttttccttttaatatcttcaaaaaataatgaaatgtaatattgatttaaatatatacactaataaagaattacacaaatagaagagaattaaatatgtttttttaaaaaa

SEQ ID NO: 194183 - DNA, 1940 bp, Cannabis indica
tttgtgcatattcaaagaataaggggccaccaataatgtcaaaagaatttaagatgaagaatcatcttccatgctttaccaaattggtcagattctggagatttcttggtatcaaatatctaaacatgtaccaaattaaatatggtcactacatctatatatccccttttgccgacacttaaataattattacaacttaccataaccactcttttgtctgtcaatttttttttttttttagggtatccctcttattaacaattaagtatttcaacgtctacttgaggtttaattgatcatctttaggagtgaaaaatgggtccatcccaattattcttcttctgcctaccataacaaaaaataaaaaaataaaaaaataaaaaaagaagaagaagaatataggcacaattattaatacaatataaatatatagatcgatgccacaaacaaaagcatttattagtagcatacaatggggtacaattaattggattttatttttcttttcttgaattaattggtatattggcttttcctttaaatttttatcagccattcatgtagatggacaataaattgtgcgtcctcttttttgggagacaatcgatgtaaattttattcacacaagactcaatgtggtgccaactaatttataaccttccttcaatgctttgtaactgcatagaatttcttgtatatataaatactaaaaaaaaggggtaaaaaatctaaagtatagttaaaagattacgataaactaaaagactaagtagtacttgattttattgagtgagtggaggttatgatgttcataaaatagttgaatacaatctaattcaattcgcaaaatatgaattagattgaattagaaaattcaaaattcgtagatattagttgaaatataaaagtaaaaagactaagcaaacatatcagaattctttgatttattttacataatctcgttgacgaaaaaagaatgtttaataatgattttagctattagttttatgcagatggtgcgccaatttttaatgctaattagcgagaaggtaataaggactgtaattaatgataatggttttagagcaaaggttttaaatgccagttaattttaaacgaagtatgtatgttgtgataaatgtttgtataaagattgttctcgaggttcttgattgcctttggaaaatagtggattgatgattgcttaggaaaacttttacttatggatttcatatcctcattaaccgaattcttttgggctttagaacaaatctctgtttagtttagtacttggggtgatttatgatttatctaaatgcaagaccattttatgtatcttctaatggcatccagctagtatggcatgcttagctgaccacatttgactcaatgttttctaggatttcttagtgcactcaatacttaatgtagattgccaaatcaatttggtcgttttgttgtaagtcttgggagaaattctctgtgtgtagggggagaagtgtgtgaattcacttgatcaatgtattttgcaaattagctgtgccacttgtaattatttctggtctcttagaagtactttcttgcagtagaagatgccaagtagattcccatctctcttgttcagattcacatttggctattcttctctggctgtaatgagttggtgtagtttttcatggcatgtatcttgttttcaccctaaattgaatgatatggcgtagctccaaaaattaaaccaattgataatttcagtcactcttttctagacatgattaaagtacatcctgaggagcagggttttctctgttatttgcatatctaattggcaatgcatccaagcgtgtgttattattttgactgcatacattttctctctggtcagtattgtgtaaaatgatgtcttacttcttctaaatcactgcagcaaaatctgatgtaga

SEQ ID NO: 194184 - DNA, 1576 bp, Cannabis indica
ttttccttattcttcttctatataagttgtaacattaattaagtagacatttcaataaagactgattattgccaatataaaacaagtcatgactcgtgaacattaaatgaacaatcaaataatagataaattatgttattagttttatgtagaagaggataacattataaaagaaaggtttatctgtggttagcacatgggaaaggcatgagggcagatgggcatgtgcatgagtggtgggaaaacaaggtctttctttcatctgtattactgacaaagatgatagcgatagatgaaaatctcctgtgtgttatgtgcttcgtcttttaggtagatttcttctcttgtgggaatttattaaatcttactggaaacatgccttttgatatatttatttatttatttatatgatatcagaacgaaaatttaaaaatgtgacgagggcttaaattagggaaatgaaagggtacttgagatatttcaattattaaagattatcaaaaagagataggtctcaatggcatgactcatcatcttaacaatgcagagcaacaaagataatttaatgaatgaagaaaaagaaagaaaaaggtggacttaaggacttcttatgatagtgatacgaggcaggctgtccgtgatgtaaaccagagatggaaccggcaaccccacatgtttcattttaccatgttatttatttttgagtttgggaatttattttctttttaagtttctcaacaacttaatatatatattgctttaaaaatattaaaaggaaaaatatactataaaatatttaacaagacaaattctaagatgttaatataagtagtgtacatgacaattcactgaattgcacaattgcacactaaagaattaggagagtggaggagatcaaggattctcctagttttatgtatgttatgtgtgaaattttataattcttacatgggagctaatagagttgttcatgctatttctaaatttggttgttctttactagggctagtaggtgattatgtacatctgttattgaatgtcatccatgttaagggagttaaattagttataactgttatgtaattaacttctgttttagttgattagtggaggtgttagttacctcttgtaactgttttcttagctggctttttgctttagttcatgtataattatcaaagccctttagctaatcaatacataagaattcattttttgattcgttcagttcatttccctttacatggtatcaaagccttttttttctttgaagcttgaagctttctcgttcatagatgggaatagaggttcatctcactcggccactttcaatccgagtaatgtcaatctcccgaagtcttctccaattactttttctcattctctctatgtttgtttggatgaacacaactatctcccatggtattatcaagcgtttactgtgatcaaaggaaatcggctccaaaaacatcttgatctagggattactctaccaaaatttataaccaacaaagattggctagctaatcggatgtgttttgaatatgaagattgggaccaacaagataacattctt

SEQ ID NO: 194185 - DNA, 1417 bp, Cannabis indica
ggcaccatagttgagagacagagagagaaggaagtcagtgggaaattaggtggtgaagaacccaacagtggagttgtgggcttcggtggctgtcgtcatggcttgggctttgccttgggaggatgacgtcatggatcgaaatctcagaaaccttagaggaagacaaagagaggaaatcatttgaagccatagagtgatagagggagacgaagggaaaataacgaccctgatatggaagcattgttgtattttttttctgttgatcttttttcaagcattgcttatcacctgtggcgcctcgtccccgtggggaatctttccaatgtctgacactatatttagagtatgggattgggttatgttcatctggaatctttagcacataggtgtaaccctgacgaggtgttcctatatgcttttgttgttgtggacggagagttcagaatgataaggtacataattataaaatagataatgtgaagcaatgtattgactcagtttctcactcttttgcagattatagatttttctttatccagcctcctcaagattggctcaaactgaactgtgacatcaaagtaggctcacaacacatgtgcattgtagttgttgctagaaatcacctaagtgaggtgatttgggtgacctcagcaaaattggattactctgacgctctttgcggtgaggcggcgacagtttgcttggctttagaggtgactttggaacaagaatgtaaatttattatgacgagagtgactccaaggaagtagtaaattccatcactagggtggactctaggtgggaaattaaaaactactcctctttttatattagagtcatgtcctcttttactagttgtctgttttgtaatatttctagaacatgtaattttatgcggcccataatatgactaagtgggcgtttactcataaccggtttggtcgactttctactctgccattcctaaaaacatattatgtaatgaccgtgaagtctaaattttctttctaatgaacattttcttttttttaaaaaagagagttatgtactcattttaaatatatttaattagtaaaaatataattattacttttttaaatatagataacaataattattatttaaaagactaaaatctcatttttaaacatattattgtacaataaaacatattaaaattaaattaattaattaaagcaaagtaagaaaaaataaaattaacaaagcatgttttcatcttcttccattcgtagtcatcttctatttatatagattcattctcgcaatctcaaataacaaatcagttccattaaaatacaaaataactaggtttcaaaatttgttcccttcccttcccaaaagaaaaaaagaaaaatcaaatcccgatttattttgaatgtgatggagatgtgaaatt

SEQ ID NO: 194186 - DNA, 1159 bp, Cannabis indica
cggctatttctgtagggttttccgaatagggatcactaaccgtggcagagggagcctgcagactgtcttgcttgcttcaggaaattgccattctgtgatggggctgggaagtagcacctctatccatcttgtttgtagtccgagaaggtttgggggacagagtactgatgtcagaatcaccatgcaacgtagctggaagttcagaattgtggttggaagatgtagcctgagaagtcgccgtcttctccaaaggccggtaagggatcaccttctcgataacgccctctgccgtgttttcgaacggagtaacctctcctgtccctggaatgtagacagccggaaaacgattgagaaccatttctcccgtttccaccctgttttcaatcacaacttccacttgtcttcgttttccaggtagttgtctgcgaagctcccggcattcagatgcctctgctgccatcttattatttgttgggaataggtgctttattatttccatatattttcttaaccacaagattatggatatatataatggatggcttagatttgtgggcggtacaacttccgcttccgtactgggcgtgaccaaatcggtgctcagagaaattaaaggagaataaaattattgagaaggaatttatttagatagatgaagcttctagctgccaataatggattctactgatatataatatatatattcacttagactatcaaaatatctcactaaagtcgtaataatatacattgagactatcaaaatatgagagttataatatatatatatatatatatctacacgttttggaataacatacactattcagtttcacattctccacgtacgtacgttttgtcaaaactaacctgacataatgaattaaagatacttaatgtatatgatgaggatgtgaagagttatgacgaagaagatagaacaaacacatcataaattctttcttttagttttggaaagtgaaatagacatcaattctatatttgtataataactaagtatgtagttatttcaagacttttcaatatttgaagatgtctagattacctattttacttcactataaatatcaaaacaaataatataaatgtaataacctatttaaatgtttattaaatatgttgaagacagttaagtctg

SEQ ID NO: 194187 - DNA, 3147 bp, Cannabis indica
aaaaaaaaaaataaaaaatgaacatgactatgatcatcccaaaatgcaatctcaagccgccgcgtctgcccactcaactccaagtagactcatacatatatttattttttaaaattacaaaaaagtacttttagtgcttaacccaacatccctcctttcctttccttttcttctttttttctctgtagagctttttaatgagaaagctaagaaaatggtctctatgccttatatatgaaaagaaacaaggacatcaaaaaaaaaaaaaaaaaaaagtaaggattagtattattagagttagaggtctcatcatggggtattcgatcatcttagtcacgtgatcttgaagatgccttgtgctggccaatcacactatgacactatatagcacacatttttttttcaagagttttctacacaaaaaaagaagaaaaaactctctaatttcattatgctttgcgtccaagtacattgaagtatttttaaatacaatatagtactattccttggcatggaattataaaaaagtgtttaattctatatttttctttaatttgctgctaattatgtatgagataagataaaaccactactatgtttaaaatataagaagcattatttccctgaaaaatacactaaatttgttcctttattcctaaagacacgattttgtttaaactataaaatatatacgtcagagagagaaattcctttagcttatatacacacaccttaattacttaattaatacaaaatcttttcattaaaaaagtgaatcaatttgcaattaatattgtaatgctatgatctccacataataagacatattatgtttacgatcacaacgcagaagccagcaagaaatctataccacatatatatatacataaatataggaaataattgtgtagtgtttaaatgatgatatatatctcgattcctcggaacatttataacataagaaaggtacaactcattatatataaatatatactgcactatatattctctatatctcgggcgagatgatgatttgacgcaagaataagaaccaaattaaaaccaaaaaagctaagagaaaagacataacaaaactgcctcatttggaacaaaattttgaagatcaaaacgacatgtcgtttaatatcatccatacgaccaaaaactaatcataagattaatcaaacatgtgattggggagcttggccatgatcatcatcatcatcaccatcacgatcagctgatgagcaagtgcaaggtggaagaacagcgagtagtgaaggagttgccaagtaagttggggcttcgtctccggccattatgaccacaatcttggggccatcatcttcatcatcaccattaacgttcttattatgattagtactagacttgttctcatcattttcgtcaacagaagaagaatagcgtttgcggtaggagcaaatgaggaggagtaaagccaaactgatgagtaacaacatgatagctaagcttccaaacaagtatgggattggagatttccatacatttgttgtcgttttaatcactactgctgatgttggtgatgtcgtttcttcactacctcccattacctttaaatctctcatggttataaaaatatatatattatgattttttatggaggatgagaggaattaagggtagttggttaaatatatgtttatggggttttatgttttttatttttggtgtttgggatatgaaactcaaggttggtgatagtttgaatttataggaaaagttggatgagaatgaaatgcttagctaattgtgattgaattggatatttgaccatattgtccttggagggtttaagaggaagattctttttttttttttttaatatggtgatgtgcctaagtgactttttattggttatatataaaaattaaagtggtggggttcttcgaatttctgtgcaacataatgaagtgtactgttgattcaggggagcaatactgtgtagatctatctaccaaacaaaatgagtttcgctctaatttgtagtttacttctttcctcaataataatcaatagattattatcattagttttaactttatgaaagatatatgatataatatgtaattaatgatatattccaggctcatctggacagaaactatttgtcctactagatgcacacttgaatgtattaaaaaatatatatttacaaaaagttacatatatattattatatttacatattgctattagccattatactactttacatacataacactactaatttggtgattttttggggaatagttaattgtttctataataattattaaatttaaaatatgtaatatttaatatttaattttctactaatatatatatgtatttatttaaaaaaaaaattaaacatttaattgtccttaaagagattgtaatggtattacatataactgttactctcataagaagagcacacaaacgtttaccgtgtgaaaattaatgttttttttttttttttcaaacaatcctagtttttcttttgtttttttttttttttatgaaacaaacgatcctagttgaaactctactttcttccagaaaaacctctaagaagaaggaaggggacacaaaagttgtactcattcattaattgcatcatgcaaaataagaaactgaatacaaagaggatatagtcggaccatcaaatcttactaacaatagccaataaaacatacttaaccaaaatgtgagctgctatattaatagttctaggacaatgcacaagattcaccatattaaagtttctaaataacgaaccacattcatccaaaataagttttaaagaagactccaacaatacatgattattaaacttagacattaaattaagacaatcattctaaaaaataacattatgaaagccatgtaaacaacactgagagcctgcattagccttgttacataatttttatattatatggacacttccaaaataattaaaaactttattgaattagtacaataaatataaattaataataaaccacaccaactcataaacgtgcgagtgttttcttatttcttcacggggtagaggaaaaaggaggcacgtagcttgatattgagatcttagtttttatggtcactgacactggatct

SEQ ID NO: 194188 - DNA, 3548 bp, Cannabis indica
aggactttagagtccatgaacatactcaagggcctcaaaaacgcaaggcttctgatggtcttcttttcaacccatccccaagtaaaggctctttctctcacgatcactccaaaccgtcttccccattgaaggatagccaagtcactgcagaaagtgtggagaagccgattgaccatgggtttgccaaagtggaaaaaggagtggaggtggaattagattttctccctccatcaaataatttctaacctggtttgattgttgaacaaggctctaccagtagcaagggaagcaggggtcgcagtaaaggtaaggctgtggttacttctgaggagtctagcgagaaaaaacgcaggggcaggcctccgaagaaacacccaaatatatcagctaccccgaaatccttcaagggacgaaaacaatcaaaaattaactttggaaaccagacggtgaaatataacccgttggagggtagaagctttgacatgaaagtggacttgaacaaccatttcattgcaactgagaagacgccaaagccaagaaccggttgcaccattacagaggtggacgaatctgtacaagcgggagttgggagatcaaccaaacaatgaaaggcgggattttcactttggggctatggagacttgcctggaaaagtctccaacgtcgccatgaaaatcttagcttggaactgtcgtggtctcgggaataccacgacagttcgccaattggcagagttggttcgctaacacaaacccgagatgctgcttttgtcagaaactcgtctaccacaagataagttctctagaatttgtactaatctacattttgaaggctctcattatttcactcctgttggtctttccgaggggcttggaatatgttggatgaaaggggtgacctgcaatgtcaaagttgcaagcaaatttgtcatcataggagagattagttcggaccctccgggttgtctcaggcagctctttggcacgtatggaccccccgcagagatcataaggaggccttctggcgccatttaggtgaagtagcaatcaatgctactaatccaattctattactgggtgatatgaatggtactcttcgagacgctgaatgttttaaggacacaaggaacggcaactcctctcgttatgcatttgactttcgcaggatggttctgcgtgttggtttgatagatttgggatttcaagggccgagttttacttgggttaaagggggtagaagctctaaccatggaggagccatgaagagagctcgtcttgacattggtcttgcttcgccggattggcgcatcttgtttcctaatgcaattattaaccacctctctgcttctggtttggaccacatgccactacttcttgacacagcaggaggaaccaactgcaagaggaggccttttaagtatgagaatatgtgggctagggatcctagaagcttttgggttgtgaaagaagtctcagtaaccccatgctaaatttcttcagaaaagccaaagccacttgccgaaaactccaacattggaaaaaagttcagtttcaggatgttcatcgtcaagtacaaaacactcagctacatcttcaagaaattgaatccaaggaccctgacgattacgaagctgtggaacaagctaatcgacagctcacggaggccctaaaagaaaagagatacataggaaacaaaaattaagaggccaatggcttcaagagggcgatatgtgctcaaaatttttcattgcctccactatagtccgaagacggaggaattacattcagtgcatcaagaaaaatcctggggaagactggattagagaacacaatgagatagtcaagtgcttcattgataagtttggggagatctttaagaagcaacactgtattcgcctcgatttccatcaggactcgtttagcccagtagtcacaatgcaagacaattcctctctaaaatgcaatcccgtgtgtggaggaagtgactgccgcccttttcgaaatgggaaaggataaagcgtcgggaccaaatggcctccccccgagcttctatgcgcaccattgggacactgtacaaggagaccttgtcgaaatggttacccattttttcactcaccttgaactcccgaagtacattaacgacactgcaatcattctggtgccgaagaaagactccccagcgtttgtcaatgactacagacccattgcactttgcaatgtggcatataaagtgatctcaaaaataatggccactcgaatgagaagtttgctccacaaaatcatctccctaaatcaagcggcttttgtgaaagggagacatattgcggaaaacacaatgatcgctcgtgaggtcatccactcaatgaagaggaaaagaggcaagagggggttcatgcttatcaaacttgatctagaaaaggcctatgagaagatggactgggagtttatcattaaagtcctactccaatttggctttacgagccctttcacggactggattaagacttgtacatcggtggaggagatcaagttgcttctgaatggatccatagtggggaaattttacccgaaaaggggcctaagacaaggtgacccactctcaccctcgctattcattattgttgctgaaactttatctagacttcttttgagaaagaaaggatgggcaactgaaaggctttaaactcgcaagaaatggaactgctattaaccatctcatgttcgcttaagacattatactttttggagaagcttttatcccagaggctaaggccttcttggaatgtctcaatatctattgcaactggtcggggcaatcggtcagcgcccagaaatcagcagtttacttctcccgtggagtttctaataggaaagcacaagctatttcacaactgcttggtatgcggaaaatgggtagaaatgctacctacctaggactcccgctatttagttcggttaagaggacgaatgacacccagcatatcattgaaaagactcttaaacgggtgtaaggttggaaggctaggctcctatctagtgctgggaaaacatgccttggtaaatcagtgggatcaacactctcaaactatgtggcttcttctgatgctatcccggtgtttgtggccaataagattgataaactcctaagggatttctggtggggggacacggatgagaaaagaagactccatacggtggcttgggaaaaactttgttgcccaaaggtggtgggaggtctgagattccgatctactgaagctatgaacaaagctttcctaatgaaatgggcttggaagatcttatctggtgaggactgcctgtggggacaggttataaaagacaagtatatcaaaaatgagaacttcatggacatggaagccaaatccacagactcagtactctggaaagctatattaagaacccgacctcttctgttgagaaggatctatcggaagattggggatgggaactccacatccacctggttcgacccttggctccctggggacaacccccaaacggccccatctcggaatgcctctgatggta

SEQ ID NO: 194189 - DNA, 739 bp, Cannabis indica
ataaatattcacacaaatatatcataaagattcaaaaagggtacattaagtgagctgagagatgtgtatatgtatatatgtgcacttgttcattgtattacaacaacagtagactacacaatctctctaaataatattggggattaatgaagttacactgataaacactacctgaaatttgaaggagacccagatgctcaaatggtcaaatcaagatgatatttgtcttgtctacaacctcaggtttttctccctctgaaaacaatgatgtttttcttgaattgacatacactgatgtaatttttgttctgatggaatgatattttcccaaataaagaatttgtaaaagataacaagagaacaagaattctttgagttattgttacttcttggtcaatgaaacatcgaccagagaaagaatgtggtgagtaatatctgcagaggcattaggctttgcagctttaagagccctctcagacatgtctgccatttttctctcatcccctataaaccaaaagttgaaccataaataaaacaaccaaactttgtaaaaatgaaaatggcaaatacttaggggacaaatctaattaaatatactttctaaatctcttactataatactaagacttcacaacatgcaaaatgtctaataaatttaacaatggacctaatcatgttgatgatattatagtcatcaactaataaatagcaagcatacaagccttatatttatatatat

SEQ ID NO: 194190 - DNA, 1273 bp, Cannabis indica
attaacactgcttaaagaaccagtgtttgaatgttcaaatacaaatattggaaaaatctatagtacaccttctaaaagaccatttcgttacacccctgttcgtttcggcactcaagacattatagttttttagatcacttgtaatttttaagaaatttcaaatagtttacagtgccgaaaataaagttcaaacagttgctaaacacgtgtataagaaagaacagtcacgcgtgcaacaaaatatttgaaccttacttttgtcactgtaaactattcggaattttttaaaaatttacaagtgagtttacactaaatatttcttttgaatgtcgaaaaaaataggggtataccaaaacgacatatttaggggtgtactgtagatttgcctagaaatatttaccatcttccacaatgtatttcttggacatgtctttgaatttttcatatgcagcaaggtcgatcccagcataagggataatacccagaagagaaggaacaagacctctgtagaatgcccttgttccttcatgtacccaaatatctcttgatagagttgtcaacctaggaacttttccagcttcacccacaaaagtttgaagcctagttttgacaaggtccatgggatatatagcagtctgagcaacagcaccagcaacacccccagcgaaaaggcggtccacagtgcttaactgagctttgtcctcttcacccccatgagctttagctataatgcctttaatggtctcataagtgtagaacttgatagcactttcaggagcaaccttaagaacattaagaccattccctctaaagaatcccaagaacttaccattcttccatatctcattaatggcaggcataatacgagcctgagttgtttgaacttgtaaaacaaccttaagtctatctaaaggagctgtagcagtacgtgaagtagcaccagcaacagctccagctacaagatatctagtagcatgaacatgtttacttataccttctggaataactgtatgttcaccaatatcaacaagacaaaccctttcccaatgatgatatatattctcaatagttgcttcatgaggataaagcaagagaaaatccctccattcctcaaatgtaataaccccattgttatccttatccatacgctccacaaacctagctagttcatcctcatcaatttctatccctataacaacaaaacaaagacatgatttttaattataaaggaagcatttcgagaaatgggtaactatgcaaattcccaatacca

SEQ ID NO: 194191 - DNA, 4183 bp, Cannabis indica
atggtccttcgcctcactttagatctttcttagactcttttactcttttactcttcatcccatttctagacatggaagtccctacaattggaccaacaggcattctcagcgtactcatatctaggagtgtttaaattggagcatctcaaacttcacttgggactcattgttccctcgggctcctctttaacacagagattactttggctgtgatcattgtgctctaatcctttctccttatgggcgcagagcgaagaactgtcgtcgaccctctcgattctattttgacaaaactttgattagtgaagtagcctttgaagattgtatttgtaatgcctagtgctatgttcccactgagcattacactgatctaattgccaatatcactcacaagctctctcagtgagaattcaatcttcaatcttggaagaaaatcttaggctcgccaattactcaacaaatctgcgaggcccaaacttagctacgtctagttcagagcattccctaacccaatgatcaatgccttagttcttgtcgtcaattgcaaagttctcttgatcatcttctctacaaggagtactcattacttagtgataagaatacccgttactttcattatgtggcttcttctcgatggttgacgaataaaatatgctcctttgtccatgttgatgaatctgttgcctccagtaatcaagccattgtggacactgttgaagaatacttctcttagcttttcactagccatcttccaaatccctctctcatggacaaagttatctctgaaattactctaattatcacccatgatgattataaccttctgaatgccccctacacagttgacaaagtcaagaaagctacctttttagctaatgataaggctttgggtattgatggctttaatggctcttttcataagtctaattggcacattattgggggacgtgactgccgctgctcttagcttcctaaatggcacaacaaacattactttgatcaacaaaaccattattgtgcttattctgaagaaatctcatcctaacactctccttgattatcgtccaataagcctatgtaccaccttgtataaaatcatctctccaactcttatcaacaggctcaaacctatcctttccaaaatcattctcccactctgagtgctttcttacctgacaaactaatctctgataacatcattattggtcaggaggtaactcacaccctagcctcgtagaacctcaggtaaagttgattggatgactcttaaaccttatatggtaaaagcttttgactgagttgaatggacttttctttgcaaagtgatggaaaagtttacttttcctgttaatttcattgagttcataatgtcttgtgtatcctcgacctacttttctttctctgtcaacaaccaagtccatgagaatctccttcccactcttggtattcttcagggtgaccctctatcaccatatctttttcttctatgctctgagggattatcctcaatcattgctcaggcaaccagtcgaagaattcctcgaaagcatgcacttggcatcaagatcactcgcactgctccccttatctctcatctcatattcgatgatggaaatcttctttttcagtgctacttctcctattgtggccaccaccatcaaggatttactgcatgattatagtctggcgtttggaaaacttgttaactttccaaatcctcactctatttctctcctactactgacgagaatatcaaaatgtccattaccaatatccttaacgtccccatccgtgctaaaatagagaagtacctgggacttcctcaatcttttaagagatctaaaaaggaggccttcaattacctctatgatcgtgtttgggctcatttgaataggtggaactccaccttcttctcaaaagggggaaaggaaatatactcaaatcggaggttcaagcaatctcgtcttatgccatgtcttgcttcaagcttcccttttctttcactctaaacttgagtccatgatggctaatttttagtggggtggaaccaatcaaaaatagaaaactcattgggtagcttggtcttctctttacaaatccaagttccatggtggccttagttttgggtctatgaaagccttcacccaagctatgcttgccaagcaagcttggcgccttactcaatcacctcattctttggtggcctctctactcaaggctcgccatttttctcattctacttttctaaatactggtaagggtcatcatccctagctggtttggactagaatttcatggggcaaggagcttctcatgtctggaattaggaaaaaagttggagacagtacatccatttcaatttatactgatacctggatttcggggtgtggtaagctggcatatcttagtaatccttcctatcggaactgttctgtttctagtctaattgcttccaatggtgcatgggatgtcatcaagcttcatacactatttcccaataatatttgctaggccatactctctatccctctcccaaatacccaatcacctgattcctttttatggccttttacatctcatggacactacacaataaactcatgatatcaccatgctcataccttagctacacaaaatgaaccttctccttcagattcctttgagcaacaaaaatggtagaaatccttttggctcctccctattccgtcaaagatcaaatactttgcttggcgagcttacaacgatgttctcccaactagatcgaagcttcatcacaagcgaatcattcccaactcagtttgctgctgctgccattgcactaaatagaccctagtacatgctctttttggttgctctactgtctagaaggtatggaaactaacccacttttatgtttttctttcaaaatactagttgttgtctattgttgatacattgcatcttatttaaactaacttttccacaagagatttctagttttttctttgtttgttgtggaaaatatggcactgcaagaacgaaacattacatcataggcatgtcaccaatcctagcttggttctataaggggcagagcagtacctgcattagtatcagctgcataatgagccttcctacacttccttggcctatgcaactcgctcatccgcttccaattgggtacccccacctgctggccttttgaaattgaacattgatgtagctcaagacactaacagatgcaagatgggccttggctttgtaatatgcaactgcaaaggagatatcatcgcggtagcctccataccttggcttgttgtcttttcacctttgttaatggaagctctctctctctttagcagtctctaaagtggtgtcttaaaaatttatttgttgtctctaacattgaatcggattgtcaagtccttgtggaccgtgtccaccatatatccaccaccaatctttgtttacatgattttatttgtaatattaatagcttattttctttatttcctcaagttactgttaactatgttgttagggaggtaaatattgttgctcatcaactagctaagtatactttaaacttagataaggaaaatatttgaacacaataaaatacctatgcacttgattgtatcctaaacatttgatttctattatacaggttttttttaatttattttttcgagaataatcttttaagttattgaagccttctatcaagaaaaaaaaaagtagttgaagccatttgacctaagaactatacctaggcaacatgtggaggtagagcccaccaaacatgacaaccagaaataggcagcaacaaaattcgaagactttttggcccctcattatttattgctgaattattaagcctactttagcctaaaaagtagaaactcaattttgaacaacaaaacaaaaaccatgtatacttcctcatcatctgtctcgatttcttcatcaaatctcaaaattggcatagtgggatttggttccttcgcccaatttctggcacagactatgatcaaacagggccataagttaacagcaacttctcggacagattacactgatctctgtcactctttgggtgtctcattcttcaggtacaaatttttgcatacaaaatgtacaaagggaaagacagaggtatgtctttaactattctttttttctaaaagaaaaaaaaaattccttg

SEQ ID NO: 194192 - DNA, 2180 bp, Cannabis indica
gccttcaatagtcacactctccccacattgcaagttctgtagacaaagcaacagatcagatacaatgaaacatgaaaaacaacctagcagagatatcatgtttatatgttcccaaactcacaacttaagttggacctaccaatccccattaatgaaccaaacagaataatgttgacaacattgacagatcattgaaaattgtttggactaacttattttttttctctggatgagaattttttgcagggaaaatcaaagtattcatacaaggccaccacatccacacacatgtattgaatcaatcaaataaaaagtacataatcataaaagaaatataagataaaatcatgaattgtcacaatgatttgctcatattttcagggtcggccatcaatctgaaatgtacacttgtcctagtatcatcttctcttctccatgatttaggtttagggtgaattgaatgatgtcaatggcatcttttatttactaaaataggaaatccattcatgtcaaaaattatcttgaagtcattcaccatagatgatcttccttaaagcagagagaagtatcaaacccaatcaaagagcttgcaaaacaaaaccattgagtatgattatgataccaaccccattttcatttctcctttttcaattcatattcttataaaaatttatataaagttctaaactttattaacttgaagtcaatctacatttgcatgtcatgatcttaaaaagctatatagtcacaactcacattatttttgtacattggttgtcccacacaataggctgtaaacagctccacccattatccactgatatagcctcactcattactcatttcatcaattttattatatgcactcattttcatcatttcaatcacaaaaaggcagaaatcccaatacacaaaaaaaaggaagcttttttatttaatttttttaaggaaatatttaacaacaaatggggaacattggcagcaaaataagcctttaaataaaatatgaaaaaggggggaaaagcgagggacttacaggaggaaagcaacggacgccaaggtgtttagggggaggtgtaatttcgattactttataagggtggaaattctctctgtttttctccttttttctgcaataaacatggatttttggagtctgcaatggaagattattaaaacaattttctctgaaattcatgaaattaaatacaaataaagtattgtcttggtaaaaagcaagcacctttgggcatgaacctaaacccaggctcgaacacgccattgctaacccttatcctccctcaatctctgtggtgggatttggagatttcactggttcgccctgagaaaatgcttaccagaaaaatatttctttattttttttaatttaattattttgggaaaaaagaaaaacgcactgcgctgatgggaagaaaaagaaaagaaacggttaataggaaaaaaaagtatccattttcgtttaaattgaaaatgggctggttaatgaatgccaatatggacctgagcttgtgggagtgggctggcccaggcccaggcccagccccgctgttctatgaataccaaggctccaaaaaaaaaaaaaaaaaaaaataattaaatcaaaaaggcaaaaaattacagaaataaattcttatatatttttacgtacagttattcaaaagagaaatatatttttgcgtacagactataatttttttaactaaaatacgaactattgattgacattgttgtattttcatgttgtttttatattgtttgtatgtttattttttctttgttgttttttgttttttttttatggaactcaataatagagtaagtaaagaaataaaaaaaaattgtaaaattgaaaagatttcgtagaaatgtaaaaagttattttaactgtataaaatgtcgaaatttgtgccaaaaatgacatttgtgtaaaagtccaaaacaaagaaaacgacaactacgtcaccataaaagaggagaaattgaaaatgggttggtctgatgatgtagatgttgcaaatacgggcctgtgattgtgggctggcccaggccctccttctaatgaatctcttatatgcagtcactctcctaacacagataataaatgaatgggtatagatggaaaaataaaagtgatctacaaatatgtatttttttttttt

SEQ ID NO: 194193 - DNA, 1647 bp, Cannabis indica
tacaatatagtcaattattaatttgttacgtgggatggaaagagcatatcacacgtagatattttgatttagcaactttaatctaaaaagaaagttttttttttttttttggtaaaagtttgagaagtgagaggctaaagtggttttgatatttctgaagattatgatgagtttttttcataaggatgttcttctcacagtggccactcctttatgaatctaaacattcatcatgaattttttgactataaattctcttttggtataattaaagttcatgtgtttacagtacgctaataacaataacatgggtttacagtgaaaggccaataatgttactattttaaaaggttttatctcaaaattaattagtataataaataaaataaattatgttttatgtatagtttaattttttttatatttattattatcatgtagaacaatattgtttaatcctacatatttatttatttatttttcaaataaagagtgctcgagtttaaaagaaatctagctatgaaaaggatattaacaatcaaatatactacattaattaacaaaagaacaagatgataataataaaacttaatacattttaagtgtggtataaaatgaacattttatacatagaattcaaatctttacttttctttcttaatttaatactatacataggatatgggaaggtatataattctaattaataaaataataaataaatgtctttttgtaacttttgaattaattgaatatattttatgaggcgtttacaccgacaatattatatgatatagtacagctaatttatttgaaaaaacaaaaagttgaggttataactaaatagatagactgtttaacaactttaaaaagttattggaaagtttgtttggaagatatatgaacttttgatatatatatcttacctaatatataaaatgtctatctaaccatttttgttgtgcacttaacagaatataccaaaaaatttaacagaatataccataaaaagttaactttaacaaacacctattcgaatagttgtatccattcatcttataaaaataaaactctgaaaaattacatccaatacctttgaatttgaataggtatatctcattaatttcactataaattgagagaggggcgaaaacaaaataaatgcaaagaaatcaatatcacagtttgtttcctccttcgagcacaccaccatcaccattaacggcacaccaccatcactattaacgacaccaccgaccattaacggcaccaccatcgaccaccacaacagttaccacaatttattttaatcaatctcaaagtcatattcaaacacaaactaaaaaatgaaactgaaaaatattatcaaatagaaaactaagacgaaaaacaaacccccaatccaaaatctgaaaaaaaaaatcactaaacctaaatctgaaccgctctactctctcccgcctccatcaacctgtacgatgaccttcatcacaaatctctattattgtcggcgacaaaatggaggccaccaatggccgagaacctgtctcacacaatttctctcacgcaatcatatttcaagatgaccagagtatcattgatcggccgtcttccgactccgtcgtcttgtgcctatgacttggtaag

SEQ ID NO: 194194 - DNA, 1198 bp, Cannabis indica
ttctccttagcttctgcttgcttctgcagtagctatgttctctaaaaaaaaaaaaaaaagattagagaaggttggttacattggacattctaaatcaaaattattaaatgacacttgatggagtatttagattttttttttttttaaaaaaaaagagtacacttaagatactttataaattactccttaaactataaaataataaataatattaatttgtggttcattcaaataagtaagtgtttaaaagaataattgagataaaaaaaataaatcattatgactcttcatagtgtaaaataaaaggacttgctgccaacaaaaataattgcatacacaaattataaattataaagtgggtgattgcttgaaaattagtgacacacattgattgctgcataaataaatatatataaaaaaaaaactttggtttgagaaagttatggttggatgtaagacttgaaatgtcgaaaatgtccctgaaacaagttggagtaagtgatttcttttttctttttttggttctcattgtaacaacgtgaatattggtgatttctgtcttttgttagaaagttgttgagagttgatacggctgtttggctgatatttttttggcttttattgcccttatggttagtaatattcaacttattctatttttttaacattacatgttacaaatggggagtacaattttcagcacataacaaactaataatctctaattttatttacaatctttaacctaatacaacctactaggtgtaccaattaaaaacaaaatgttaggccactcccattagtgtctattttatttttcaaaataccttaccataattttttttgttttaccctcaaatttttataaagcttatttattttgttcctcatctacatcatttaaatataataaataaacttttttgttaattattataataaaaaaattcacattaaaaaaaaaagaaaaaaataataactattaaattaattttgaagaaggtttatcctattcctatctctatgtgtaagtaagaaatttaaaggatcttcaaaatgaagaacctttcaaagtagctgatgagtgtcattttaagctcgttagctatcttttcatatcaccacacaatcacttccgctacataactaaggccggttttgaaattagttgaactttaagaaaaaaaaaaataaattt

SEQ ID NO: 194195 - DNA, 1251 bp, Cannabis indica
ttgttctgctttgtgaattgtaatgctttctttctttttaatttagcctttaacgagccgtttattgattaaattgaagctcttactaattttcttgaaataaagaacaaaagcaacaatattggctatggtgttcttaactttcaaatggcttgtgtttgttgttgtagttgcaatctgtaaaatcataaaactacttttaatatatgtacagagtttgacatcaagaaagaaggtacaaacataaatgtgtttacaaaattagacctaaattatgaagaaaataaactataattaatgtggcatttataaatgaaaatttgaagtggggggaaaggttttaatcattgttaattattaaatgaaattttcaattatttcattgttataaaataactactaataatgaaactaattaaatgaacctgcttaggtggttactccctggctggtggtatggggtaaagtaacagagtatctttctcaactataaattaaattatataggtaggctgttctatgctatatgatatgctgtgatacaggtcactgtacagtactactactactactccacatagagtagtaggagtaggtctaggaccaagattgattgaaaaaacaatttactagtttaaaattctcaatttgataatcaaaacaaaaaacacagccatttttgttaagtttttgattcgctcaacattattttatgacaatttctgaaagaagcaatagtgtctaatcaatggtatgttgataatattaatataattaatttaagactattatgatttttctatttcgaactttgatatgtactaaattgagattattagattttaaggatttttgtctaatttttgtcttgacaaataatctgttactaggttctcaatacatttcttgtctctaatttctagatcaaactcttggaggagaaggacccatcggatcagtcttggcttagcgtccttcatggtcataaggtatttgattgttgaatgatcagtgtacactatcaacttattcctaataggtacaacctgaacttgtcacaaacaaaaagtatagccagcatcttattttcagtaatagcatcgttcaactgagcatcatttaaagtcatactagcatagtagatggtgcaaaaaaccttgttaacttgtttacccaacacggccctaacaacatagtcacttgcatcacacatcaactcgaacggaagctcccaatttgatccaatgacta

SEQ ID NO: 194196 - DNA, 957 bp, Cannabis indica
tactcattcaatgtatcttttagaagttatattttctcatattaaagttttaaattgttgattttttttttggcgtaaccttttctcacattagttgcaactttaatgttatgaaatatggatattagtttaacatatgctttgaaatatatgatacagacagtaatctcgtgatctgtaagaaaaaatatcaggtaagttatgcaattgtatattaaatgtcaaatgtgatgactctgagactatgtaaatatggaactgcacaatttaagagcttaatggattgatgggatcgcttaagaactccaaaattaagtgtgtttgacttggaataatcttaagatgggtgacctcttaaaatgtgcgagtgaagaaaaaatatgttgaaaacactttgtcctcactcattggaggatcatattcgttattcaagaaagcaactagtgatatacctatatgtataagtcattagtccgtgagaatatacaatatggccaataaatttgaagcgggagcgttacaaaatagatgatgaatattcttagatgaaagaaccctccatcgcaaaacattactatactttattttataactttttgatgattaaaaagaaataaataaaattatgagtaacaaaaaggggaaagtaggaggaaactcatgataataatcaaattcctttttggaattaattaaagtgttaattaacaaggaatttataatattaattaggttaatttgaatatgtcaaaatcatgaaatatcaatttaggtagtccgatgatatatccatttgccttgattttctgtgagtggtttaaactttaacacaagtccaactttttcagtcttaatttcctttataatatataaataaattaattaataatttcttcaataatgttggtggtattccaactaattaaactgccatctagatcttttacattatgtaaa

SEQ ID NO: 194197 - DNA, 1607 bp, Cannabis indica
tctctctctctctctctccaagttaatgtttttcaagccttccggagaaatgtttgcatatgtaaatctgaatgatctctttcgtgtccctgcaggtatgttatcccaaagctaatttcggattcgccatctgtaaattcattgtatgcttctactattttagattggaaatatgataatatatataccaggaaaatcatgttcaggacaaagtaattatttttgcttacatcaattggaaaatgtaatctggttatggaatttttcttttaattttattgtggggttgagaatggtggtggttaagatcttccttctcttcgtcaccttgttgtaacatttaactcattttcaaactaaagtggaatcatagctttcattccaagatagctagaatcatattggaacaacactgctcataacaagatttacactcaagggagacggcttaaggcatgccgtacgtgctaaactaaaacaaagaagaaaaaaaactacttaaaattgacagtagaaaactagagctaaatagttgacaagcctcggccataacccccagaattccatgagaacaacacaatcataatgatgacagccttatagtggtggcttcagatcaaagttctttacaagttctccttccagctaggcattttttttacggagtctggtcacaaaagaagaaacatctaacgatgctagagaaaccattgatttgatgtggtttcatttttttacctttccttcaaggaaccattgtttgaccttttcaattcccacggaggtaaacaacctcttaagggtgactgcagaaacagtgaggaagttgataattgcttctgccgcattgatatcgatgacaaacaactgaaggcactacttctcaggctccttttctcactgtcgatgtcgaatggttcgcaattagggtcgtgttgcaccgcaggtatcttaagggcttcaggcagtatgcagttgcagattgaaccttccacagatcagaataaagttactttttagaaatcttttccaaaattctacaaacaatcgtcataattcaaattacagtgtttttatcatgctgttgctgcgtagactcgttttacaaaaaccttgacaacagtgggtgacacattctaacaaaatttatggacctactctcacctaaattaatcacatcatcatacacatcttattggtataattccctttttgaagtttttgcatatactatggattaatcagtactaaaccggatggaatttcaaaagggcaggtcgtaaacaactataggacaaacaagaaaaaacaaaaaactagcagggtttaattattatagaagcaaaactgtggaaacagtaatacagaacagacaaactactatagtactatgtgaaatagggaaaagatggaaaaggtaacatacctatttttgccagccgatttacccatttgggaatcgttttcccagttagcttgtaacaaatgtctttgcagaaatggttacagtttttgataatcaggtgatatgtatcaccattatatcttgtagactggcgctccatgaactcctaacctgaattggatccaagcaaagtagtaccaat

SEQ ID NO: 194198 - DNA, 1631 bp, Cannabis indica
ttatatatatatatatatatatatatatatatataataaatttaccttactattttcaataagacaattacaaacgaccatttagttagttaggacgaaaacgactagcgttggttttgagtgacccaaccgagttagtttaggaatagttagactaaattttcgtattatttaattaaaattaattagttaagtttttttattttactaactttaaaataatttctttttttgttatttttacagaattctatataagaaatcttttattgcaactagtgctgcaacctaaattgacaaacaaaaaaacgtatacgaaacccctattgcaaccagcactacaaccaataatttaagaaacacaaactagtaaatttagaaaaaaaaaaaaatttaaaaaatagtatatagaataataatttataggatccaatattaaaattcaacaataataattgttatggtagtttgataccttaaaatgtcctgctaataattaactttcaaaataaaagagaatagtataaatttataggaatagtgaacgtatagcaattattaactcccctcccatacttatatgacaaaattaattagattgaaaaatatatgtacataatacgtacttacatgcatgtaccctttggtcatgattgtataatatatatcatgcaatacgtaagtacagaagtataaaatgtactatagtaccatgtatgtatatatatatatatatattataacatatattcttgaatgaattttaagagcactattcatcaagtagtgagctccattaatataaatagaagaggtgttaaaaaatggcttcattaagtgaactaaaataattcaaattttacatataaatagtgtttattgtttcttaacaagcactaaatggaatattactgatttattttgaacaataaaataaagaaactgatagtgctttcaattaatctgatgtttttaactagtgggaacatatatatattgatcatatatattagtggcatagaaaattagtaatatatatgtatatatataggtagtaaaatataatgatagatacgcataaataaattataaaagcattgtacgtacaccaagtgatacttagaattactgtatatggtgctttattaggttggtcttatttttacagtttttaaggtataggtttagtaaaaatatggtttttactaaaaaaaaataatattttatggaaaaattttaatactatagaaaaagtgtataaagtaactgggtttttaattttttttcaatttttctcataaaatctttatttttttagaaaaaaaaaaaaaatatagctttacacagaaaatataaaaacccataaaatttgtagctttctctatattttaagaatatttgcagcatatttattacaaaaaaaaaaagaatatttgtaacataaatatttttttttaatttcatttatatacctcatatttttttttttcgatagaataaatactatatgttatttttttaccaattaaatattatatgttatgtttttgttgcaacttgcaacttctaatccagattgttaaatcttattaaatttgattaaactataacacatgtcaatcaattaatta

SEQ ID NO: 194199 - DNA, 2182 bp, Cannabis indica
aaaggttaggcatgagtatgtgctgtaatctgcattcacatatttcatttttggaggcattctgaactttcactcttctattttgtaaaggctttcaacagcatgtttttggagaggagttggagcaaaactgtgtagacaagtctgattatggagagatggctgtgattgggcttgacgcaatgcagcgggcaaattcaacccttgaagattttgtaagtagttctgtttcttctgaagaaaggatgtattctaaaattcagacttgattgaaatttatggattttgcagtgcagatcttattttatgtttcatgggatggaagtaaatgaaccgcaggcactattcaaatacttacctgtgctttcttttacagaaagttatatatatcaggtaaccccaaaccgaagcagtgtataataaattctattcttgtatcattgagtggaaatcctaaattaagtacctttgttttcatgcaaatttgttttctaaacagcttttctgaaatttgtaagatcgtgaaaagctatccatattgatcttgaaagcatgattgagcttgatatctttttggacttcggattttgtttttgcagctggatagtttgaacgagaagatactgccttcaccacacaagtggggtgaaggtttcagaaaaaggtatacgaggtgattacagtaacaactttaggttagtaaactgtaacttgagatatgtttattctactttctttctgatgatattattatgcatttttataggaaacagacccagggttgattgccaaattcataaaagttttaagacgatccatttagaccactagctgttctacttggttgtcatggacttttgactgagaggtattataggttttttttttcctcacaatattttatattaacaagtggggaagagggtaaagtatcactttggtgtattttactgtatttttctgtttgattttgttaagaatacaagaagaattcaagcatggagaagagtattggactcttgaaaagaatgctttgtcgtgctttggttgacggaaaggaggtatgcttattcaaaggttttagctgttaccgtaatcagttcatcctttaattttatgtaattggttttcatagcatcctctccccgtttcgtttctgataagtatctgctgcttgtcagatatctgttaaagatgtgataagggcgattcatctcaaatctttcgactatagagtgctgaaccttcttctataccaattgagaggaatgcaggtaacttgcttgagtgaaacttgtgtatgtaaagcaattcccgacatttctaaacagtttattgacatcatttgtctttcttttaacaattttgaacctgatttcaaagttttcaaatttgttcctacaagttccatttaattttattttcttcgaagctatcatgaaggttaatgaggtgcatatggatttcctttcaatctccgagttcctagtggaagtagcagatgatctgtgagcctttttcttttcctttttattgtttatgctttggccatttattgtttatacttctaatttgtttttgcaaaatcattagaaggtctggatccaggtatatttactgctaacttagatactattgtattgcaggtttgactatgaggtggttcgactactagactacatatctatccattatagttttttgctttttcgattttgaaacatggatcgtttcaacatgcaggatgatgttttagagaataatttcaatattctgcgtatgtttgtcagaatttatggaacttctgctcctgctatgttggtaagtgtgccaactagataattattatctgtctcttttttttttttttttttttcgggggggtgtattaagaaaaattaaacagcatagcctatccgaagacatgcatggtattttgtgaactttggtatgtggctcatttcgaaatattccgagtgatttagacaataaatttttagtttaatctagttcctgattatgcattttcttctttaggcaaaatacatagccgaagctgaagaaaagtacaacatattattgaagactttggattcccaattgtccttggattaccatagaagatgtgaagaagccactcaagaaggtaatgtaaaaaaaaaaaaggattatttcttatgag

SEQ ID NO: 194200 - DNA, 2553 bp, Cannabis indica
ctttcctaactataattgagttattagttttaaaatataaaataatattttaaaaaatatatcttaaaaaaaatgatagttgttgtagatattcttggatagctttgagggcacgtgactagcacaaaagtacttctttacgtagtatgagtcactaggtcttcagggatagcccctacaagttgatcgtattggtcacgttggtcatattggtggatcatgttaattacgttttgatcatattggtcatgttaggttggtcatattggtcacgttgaagcagtgacaaagtagctttggtcagggaccgacgtggtggtgccaaggtggtgccaaggtggtgtggtgtggtgcggtgccaaggtggttcatgtacatgatccatgtgctctaacacttttagcattatatgcatgcactttgtttgacttagagacaaatagtcacataaacatatttaaccatatagtacatgacttgagtgatccattttaatgaaagtaacattttaactttcaatatatattaatcatccatgcatatacatggccgaccctgaggtgagacgaaggaggcaggcgccttagccctctcaccgctcagagcctccattttgaaaaatatatatatataattagcaataaaataaataacaatactcttaatactaaatatgtattggagcctagtggtaatttgattagcttaacaactaagagatttaaagttcaaatcccaacaacctcacttttttactgagcccaaattaacatagggttggccctgcatgcatatataactatccgtgtattgatggctacttgtcggaagtgtgcctcacatcctcttctttaaaaatatgattgaatattctttttgcgaaatcaaagtatagcatcgatctgtccctcaaaagtatgcttgcaagtaaacaagtattacttttaatcttcttttgagatttgcaaaatggacttagagacttagaatactttcttcaattttgacatcataaatttggagaaaatatgatgagaaattcttgaaatttctcactttaatcttcaatttctgaatctttaaatcaaaccatgcctttttcttcctctttttttgggtgaacccgatcgggtcttgacgcttggttgtgggcatggagctgagcagatcggttggtgttggaggtcaaggggccttgggccctctggaggttgacgcgtggagcaggccggcatgctcatgaagctcgatcggggagcatgtgaggctccagcaccatagtggctcagtagctagagaggagcaagcgcctgagcaggtcaggcgatatgggagaccataaggccttggtagctggcgaggtttaggagttgggcgccttagtctctcttaaagactaagtgcatacaagcagttgttggggcctccatgagcatgaggctcgggcctcttagagctcctcaagcctcgtgcatataggcttggaaactgatggaatttgaggcactttgatccctagttaccttggtctttctcaaactcaacatactcatggaccatgtgacacttagtcacatatgctctttctattttaccaatatataatatctttcttaaaaaacctttgaaacttacccctttttccataaataattagaaattctcaacattcttaataagaaaactttgatattcctttttcttgaaaataaatcctttaaataataaaatataaaatattctcttcaataaaattaatttagctagttaatcaaattagatttttcctaatttaatttaataaaattagatttttccaatttgatttaatcaaatatagtttttatctaatatatgcaattaaattagtttttattcaatttaatttaattaatttagcctaaaaaaattatcaagtgaattgaatttattttcatatttattatttatttttaacacgatgacgacgcacctcgacatggatgggggactgacgggatgcgaccagacagcggtcaaggtgattggatgaggtggtttgcgtaaagtggcttagctcatgtcatgtggtgttgaggtgatgtggttgacgccatgacgaagcccctcaaccatgaatgagataaagcgtcttagtgtgatggagcaggtaggccacaaacaaagtagagtggtgtcgtggtggagtggacgaggtgatgacgtctcgagatgatgtggctcatggtcgtgcggtgactgagcacctagacatgcatgggcccaacgtgatgaggtgatcgggaagccactcgctcgcaaccaacatgaagatgttgttgctgatgacgtgaactgacgtcccctagcagacgtttaggcggacgttgtgggatacaacgaagcattagaagtgcatagtcgcacgcctcgcgaaggtcctcaactagaagaaaactttgacaaaacttcccctaccaaggatgaccgagagggccttgacgagaatgagaaggacgactaatagcaggggtaatattatgaggaagaccccgaggtggtgaggttaagaca

SEQ ID NO: 194201 - DNA, 2279 bp, Cannabis indica
cctcatatttctgtgtgcaaatgaacaagtaatagcagctgcagctatgaataaatcacagccattttcgtgggctcgtctccttctcaaccaatctcttaagaagctaccaaagccgggattcccattttcccgagattcttccactttccgacgttttcctcactcccagacccccaaattttcatttcctgggaagacccattactccactgcatcgtccagggctgccgaggaccttttggctgaggttgaaaaggagaggcagagagagagggagcagaggaagagagctggtcttgacactaaagacattgacgaagaagataatgaagattacattggtgtgatgccttcgattgtaaaactcgagaaggagaagctcaagaacgagggagacttgaacaggttcgaagagaacaccgattccgatagtgaagaagacgatgagaggttcactcccgacgccatgcagaagaagtcggatgagtttcagaggaagttcaagcgtcacaaggagttgctcaagtgcttcactcaggctggtatctgatgccccttttgcatatctttcttgctcttggtttttcgatttcaggtcaaagaacattacatttcagatcatatgacacttttaggcaatttagaaaatttgggagaaaaattgaagcagcatttggttcttagtatagcatttgattctctctataatatatttttgcaatgcgaattaaatggattttggtaagattctctctataaaatatgttttttgattatgtgtattgttccctttgcatttcctgacagagacccttgatgaggcttttaagtggatgaataaaattgacaagtttgagcaaaaacatttcccacttcgccctgaatatagggtcattggcgagttgatgaaccgtctcaaagttgcagagggcaaggataagttcattcttcagcataaattaaacagggctatgaggttagttgattggaaggaagcttatgatccaaatactcctgccaattatggtataattcagcatcaacaaggtggggtctatgctgacttggaaaaggaggaacagcagaaggagcaaaacttggaaacggttgccgctgatgatgatagtgatgatgaagaggagttcgatgacatgaaggagaaagatgacattttgttagagaaactgaatgatgttgataagaagcttgaagagaagcttgcagagttggaccatacatttgggaagaaaggtaaacgtttggaggaagaaattagaaatcttgcagaagaaagaaatgctttgacagagaagaagagaaaacctctctacaggaaggtaaataattatattattacattggaaataatgttgcaaatgcaatcatgtctgaaatttattgcactagtaatcatttttgtattcattgtttggggaaatgtttgttgaaatgtgattaaaatagttgttcaactatttagtattctttagtgtttcttaatttaattgttttatagaattttcagctatttttgtaattagtttttgctataatcaaaaactggcagggttttgatgtgaagttgattgacgtgaaccgaacctgcaaggttaccaaggtattcgccagacacacacatacatgtatatgtattatatttctttggtagcaaagagtgttattacaactttaatatgttctgatctctgtggtttagggtggccaagtaattaagtatgctgctattttagcttgtggaaactatcatggtgttgttggttacgctaaagccaaaggccctgcaattcctattgctctccagaaggtattagtttgtgcattgaattgttcagggttatatttgcttataactttttggtagcttaatgcttttttgtttctttttgtttattcttttagctcaagtaatccatagatatgattgtttcttctcatagggccttgctattaacaaagtaggctcgttctctttaatatcagttcaaataagggtgtatttttcctttgatgtcctacataattatgtcgaagcatttaagtttggcctctttaatacttgtggcgtgccgtagttgtacaagatttttggttccacagggatggaatgagttatactaggcttagtggtatcccatgtcttgcagttcctgtgttaagtgtctggatagaaggcatgtgaaacaaccataatatcataacttattttatttggtgtcagcattgtttctttcattttagacttaattagagattgg

SEQ ID NO: 194202 - DNA, 2472 bp, Cannabis indica
agtaaaaatgaattctttccaagttaacatactcttctaccggagtgtagtcagcaacataagagttatcattgctagcagcttcctcagaatgatgctgcacatacaaatataatgacatttcggcatgtcttccatggaaatttaacaaaagaacaaaaaaaacagacgcacaaatgttctaagatatgtatagcttaagaaaaacaaatgcttgatgacataccatgtctaaagcatattgtctgatgtcgaaattgtccaatatgccatctgtttcataccgaaccaaattaaggaaaataacaaaagtagaagagagagtatttcaactgccaaattttaatacctttaagtgttatcttttcttgggggagcacgttacctctagcaaatacaagaaagacatacataagcaacatcattaaacaaaaacatacaatattcatttttcacataatttataagcctcaaaacttacccaacactagtatcatcaaggatttcaatatcaaaagcatcaagtgcaaaactttctggtagtgtaattgagaaacaaggcgtacgctcctgcacgttctcaggcatacgtgtttttgtacgaaccacgaagtcattgattctgataagcacctcttggcaatcatcaaacaagtattcaactttctttgagtatattctaacaacaccaagaagaaggtaccccaacactctatatgtaacaagttgaaattcgtcttgcaaaatccaatctacatcaggaacaagatgattaaacaaagcaagccagaagaaaacaataacaacatctgaaaggtgtaaagcaaaccgtacaaccaaataagttagtgcaattctctgcaactattatagtcatacacataacaactgggtcaacaacaaaattcagagagcaaaacattctcaacaaatgtactttcacttttcatttcccaaaccctcttagctcaaatgattagacatgtggtttgttcccaaaatgtttgaggttcgaggttcgagtccctcttaggtaacctacatagcaattgctatagtttcatggttcccaaatttcgtagggttaggcgggatcctagtttcaaaaaaaaaaaaaacttttacatttcccattgtaaaatattgttttctcaatagcatcaactgtcccactcaacagaaaaacaccttccaaaaaggtattgtcgttctccaacaacacttctcataagtcataacctagttctaactaagataaagaggctaaagagaataacaagttagtggttgttccataaattaacaaaatcagatgtagtttgaaagaaaaagaactaataatagtaaatgaaattgttggcaaccttcgggtataagctagttccaccattatagagaacacccagatagataaacgacctatttaataatttgcatcaagaaaaacccatattgggggtaacaaaatggagagaaaaaaacaggaagaaatttctcaaaccaagtaacaacattcattcaaaatgaatcaataaacaaaaacaaataccaaaacaccaaacccaaaacatttccaataatgggttccaagaattaagggcagaagaaacaaatccatgttagaaataaaaaaaaaaaaacaaaattgttggaattttcgcgcattctttcaaaaacacaaccaaaagcaataaagtctaatagaactccacaaatgtaagcttagtttagaaaatgagaaatagtgaagagaaaaaggagaccaaccaacagaagaggggatatcagttcgttggattagaggttttttgagccttttgtaacaataagcggcaacccttatggcagctgaaggtcctgactttgagagaagggtttgtgagctgaacatagctggcttcttcttcttcttcttctccagattggccaaagttggttcttttgagtgcagagaactctactaagcattctgcttaagaagaaacggtcggctagtgtacccaataagactcggacccaaaatgggaaacaaaacaaaaaataaatacgaagtaaatcagttaccaataacagcaacaattataaagaaatgtttttttttaattactatttattaaaaaaaggttcgatttttaaaattatattctagaaaagtttataaaggtaacacctttataattataaattattaatattaattaatttttagtttttagttttgtcaaaattaatatagataaggactattttctcgatatttgaaggtatactttgagagatgagaacttttgttagcatgattttccattaaaaaaacaaatgggttttgattttttttttccttaaaacaaagacattattgcttgagaaaattataataaataatttttctttttttgaaatggaatagtaaataaattttatgcaagtaagagttaagacatcacacttttttgggtctttgcttgtgat

SEQ ID NO: 194203 - DNA, 2084 bp, Cannabis indica
tccaatttgactaactatacagcagcaaccaagaaggtctgcaccactcttaaagcggtaacaacacacaaccgtggtcgtagttttaatcgtggaagaggaggtcgtaactcaaataattgaggaggaaataggcctatctatcaagtttgtggtcgatctgatcacacagctctcaagtgttatcatcggttcgacttaagctaccaaggagaaggtacctcgaaccaacctgagcaaaatactaaaggacctcaggctatgcttgccacaacaactactgttgcagatccacagtggtacttagacagtggagcctctcatcatgttgtctctgatgatactgctctcacagataaggtggattataaaggcaagggaaaattgacagtaggtaatggatattctcttcctattcttgttattggtcaatgctttatttcctgctctaaaacacttctcttaaatcgtgtgttacatgtccctacaattcataaaaatctcattagcatctctcaattctccattgacaacaatgtgtacattgttttttatgctaatatctgttttgtcattgataagacaatgaagcaggtccttctgtagggaacccctagtcaaggtctgtaaaaaatctccaaacctctctcaagtctatctgcagtttctttctttcaggatcatccacttgtgtatcagccaaatgtgaattcaccatgtctagaatttgtaataaagttgattgtaatctttcctctgtcaataatgatttgtgtaaggattctaattatattgttgcactttggcacaataaattcatctataattcttgcgaaggttttacatttcgatgaatacaaaattttctaataaagatctatctttttgtgatgcttgtcaatttggtaaaaattatctaatgcatttcagcagctcctccattaaaactactacacctctttaattaatccatgcaaatgtttgggcccctcttcatatcccacaactaaaggatataagtattacattctctttgttaatgattttacaaaatatagttggatatatccaatgaaaataaaaccagatgcctaccctatatttcaaacttttaaaacctttgttgaatatcaatttgaccacaaaataaaaggtctacaaattgattgagtggggaatgtagaaagttacagcgacttctacagaaactagacattctttttagacatctttgtccacacactcaccaacaacaaggtagagtggaaagaaaatacatacatgttattgaaatgggcttaaccttgctggctcaagccaaaaagccattgcattttcggtgtgatgcatttgtttctactgtttacttgattaatagactcccaaccattatcaatgcttatatgtcaccctttgagtgtctttacaccagcaaaccatattataccttcttaaaacatttggttgtgcttgtttcccctttctcatgccatataatcaacataagtttcagttcaaaacatccaagtgtatgttttttgggtacaatccctttcctaaaaggtaatgatgtttgcattcctcaggttaaatttacattgcaagaagtgtaaatttcaatgaaaaagagtttccttatacctcattgtttccccaacagatcactcaaacatttcacaataatttgcttgctccaacattcattataccaactatatcctctcatgatcacattcctccgaaactttggctctataaatattaatcaagatgaaacagcttaatcttcaccaacatcaccttcctcaaaccaaagtgctcatcttgctactcaatctacttcaccaactcctacaatatccctaatttctaataccgactccacttctggtactgacagtattgaagaagttgttatacctgttgttcatatatccccatctcctctaccattacctataggtcatcccatgcaaaccagattgaaatctggcatctcaaaaccataagtgtttcttgtcaaagcttcccaacaacaattgtatgaggaccaaaaactgttcagcaagcccttagtgtaccac

SEQ ID NO: 194204 - DNA, 887 bp, Cannabis indica
tttgtataatctgtaaaattgatcactactcatctcaattcacgaatccctctagcagaaggtctctgtatgcaattgtaattattatatatttctctggggctggatggaaaataaaatattagacttacaattgctttcttttgcttaggatccatgtttcaagaaataccttcgacaaggcaagtgatttttattttggatccattcttgatttgaatggtgttgatgttgctatttcattgtcctgttttgatttctgattatatttgtcacttatgtgatctcaccacacacacacactaaagaattgggttccactctagggatccacctaattattcattgttctattctttctctgtttacattttatttttggaatgatttattggtctttagttgatgcctcaagtacaatcattgatggataaatattgtattagaatatataatcaagttcagctagagaaagcatgacatttctattcagaaaattcgggaaaagcattagaataatgaggaaatgaaaaaccgtgccagctagtattgaccgcatttatttagtccttgtcatttggaatctccaattgaaccacattatatagtcatcttcttctcatcattttttttattatattttagaaaaattattagaactttgttaagacaacatataatgggattatttttccttttttttattttttttatgggttataaggtataaatttgtaaaaaattattttatgggagttaaaaaaataaggggaaaatagtataaggtaattggttatggatacttaattactcttctggataccttaatatagttctttttacttggttttttttctttttttttttttattttttttttcttcata

SEQ ID NO: 194205 - DNA, 1395 bp, Cannabis indica
ttttaaattaatataatatatatttctgtaaattaacctaataaatagggagaaaaagttaattgtcaagggttgggggtttgtggatctcttgcagcggctgctgtttatgttgtgttggctaaaggaatcgtcacctttttgcctcatggcgatggtggtgggctggtggctattgttagttagtattgggtggcgtttggttgtaactttgtgcagtggagacctctcccttcctcaaccttgtttagagacattctgcgaggttctacaagtaggtgtttctgactctggccactatatgaagggaggatgcgggcttgcccccaagtatagtgcacgctcgtgttgttctatctcatttgttggtgaatcatatagaatagcgtgctctattttttattttacttggaagagtggctcttcttagtgatggtcgggtttagattatggtggtggattttgtattttattttttcattatcactatgtttgttgtgatgttggctttgtgtctctatttgctggagatgtgtgttttcttggtgttttgattttctttgtaattgttgtgttgttgtttggttaatttcttgcaagtttgtgtagttttacttttgattgattttgagtactttgtccattttctctttaaatgatattcacatttcaaaaaaaatttcttatgtttctttaagtcatgtacttagtcttgagcatttgaacttgcaaattttgcagcatttgtcctcaattctattgtccttcttggtcatgcaatgtactcttagctaacgttggcttataaataaaaatggaatagagatgataataagaatcgaactacaaaggaatggaatttttatttttttggtcagtaaatactatacaatcaattattattattaattatatataataattatggttagtaaataattataataattttgcaaaaataacaattttctatttaaaaataatggttttctattcaaatcaaatcttcctattttcatgaaaacgattcagtttgttaatcaattttaagtaataacttatttatttttttattaaaaaaaaaacaaaaaaactaaaatatattattatatttacgtgacagaccaacgtaggaacaaacttactgatgaaagcctcatacgctacattcaggaggtacatctctattacccttttctttcttttcttcttttctttttcacatactatacattcatatattatatatgtgtggaatttggaatgtatttttatacctggtcatattaatttgttgtagttagagttgatgtttgaaacttgcttctcatcgttgcaatttagtttaactcctttaaattttttgtatccaaatagttataacttataattcaa

SEQ ID NO: 194206 - DNA, 1352 bp, Cannabis indica
tcgacagttagtttgttagcagttaggtagttgtttagtttctattcagtggtattagtatactcaataaaacagttcttatatattctttttcagttgtgtgtttatgtattcaattggcattggagtttgtttgagctttgaggattaattgttcttagatgttcattgaatcatcttggtgtgtgagattgtcactgtcatctctaacaacttgttaccagctgtagcctgtagctataaaatactactctttataattaatagaaaacttctcatttcattcttgtttctctttatcattaatagaaaacttcttttataattattttatccaacttttataacaatggaaggaagaagtaaaggaattagggtttactttctttccactcaatcaatgacttaaaaacagagtttagcttcggatacctttgtggccttctctgtttcttgtccacggtacagatgagttttttgtctaaatctacatttgttttttttattattaaatactttttacagaaacttccaaataaaatattacgaacaaattattctaaatagaaaaatatagttttctaaagactaggtctcataagtagatgtgaaacttgaccacaacaagatatgttaaaataactaagataaagaatttctttttttacttcattagtacattttgttacagtcacatgattaattagtatgagttttcatcccaaagtaccccaaaaaaacagttaatatgaccaaaatgaccctcgtattgtgcaagaacaagaccccaaataaaagatacaagcatttatagctaaattttgcaaacaacgagaacatcagattccataatagctcacttctagctaaaagggcagttagagaaagatgtcatatgtattgatgaactaatataagaactgtggccgtaatttcattgttttctttttcaaagtctttttctgcttaccttgtacccagttgtttgtttgtttagatccaaattgttttcatgctcttatcattatgtgcatgcttcagtactaattaaactttctatatgtcccaagattttgatcaaacaaattgtttgtttattcttcttgactttcctaaccccccaagggaattggatatatataaatttaaatacataaagaataaaataagaaagaaaccagtaaaaatgcctttaattatatattgttgttcaccaatcaccatgatggacaaacactagaaagtaaaaaagcttggtcagtagtagtaccaaatatttcaatattcagaggtaatattaaaaaaaaaaaaaaatcttaccctatattattgcataacaattatttttttcc

SEQ ID NO: 194207 - DNA, 709 bp, Cannabis indica
tgataattacctgaagaatgtcaaggcatatgtttccaaactgatctacattagggtgaaagcacattgtctcaaacttgactataggtggcttgaaaggatagtccacaggaaaacgcaatgaaagcttgtatgataaaccttcgtacattgttccttttccaccttcaattgtgccaatccatgagaaaatgctctctccttcaggaaaagctgataccccaagatcacctccactcatctgcacatacaagaaacattaacaaagattaaaagaaaccctacaacacttacaagggaaatttgatcctgagttagaaatctcagtctcaactcaatgacagaattcatgttacgagttcaaaaaagtttagatttcagtaataatcagatactatagaatactaacaaaaccccattgaattgaaaacactttcgtgaatgagtaaaatcagtaacgtaaatcgagggttttgtattgtcgaatatataagaatacccatttcaagaaaacataccataagagacatcaactccttctgcaacctacaaaaaagaacgaacgaaccaaaatcataaccacattaacaaattacaactttcctttcttgcgttttcccagggaaaaagatcaacgcatagaaaagattgagagagtgactgacctctgggagacggaggtgacgtcgatcgggttggaagaaacggc

SEQ ID NO: 194208 - DNA, 1992 bp, Cannabis indica
gatcatcttgcctttaaaataagacaaaatagttccacattgaatcaaaaatatagaatacattcacaactacaattaaaatatagaaaataaataagaagcttgctctatagaatgctctcactccaaactgatcttcagtcaaggaggagaaaaaatatggaacatcttttcatttgcaagcaatttttttcagttagataagcacaatatcaaaaaaatttgcttatcttccaacatcacagagaatatttgatttgtagctttaaaaacaacaatggcctccttacaatcctaataactactagtgaacctttttcgatttcctaaactgtcccggagggaaggaaaaatcgcaatgtaacctacaatgagctttgccaagaaggaaaatcattatcaacaaagacatgatgatcaaacaggcctctgtatgcaataggaaaaaagaataaccacttcaaaatgatacagtaaaagcttgcctttcagcttgtgtcggcttatcttatctgtcgtttgaagattcttcgacacaaagatcacaacctgtctctgtgggcatttgggaatcgataaaaatgtagctaagaccactcttgacagtagcatagtttctcgccgccatcccaagatgatgcctctgttggagttaaacaatgcctatgtgtccaaaacccgcaaatctgacaagaaagatcaggggacggttctgattgcatacaaacattacattttccaggaggttttacaagcggtacggtctttgattcatcgtttgaagtggttgttccgtactgttcagagacatagttggaagaattagtgccaacagtttttccctgacctggttcatccacagaaccatcaactcccagcaactctgagaaagtgaatagtgtttggggttcgaaatctagattcccataatctaaatcatcaaacaatatttcctcttcaatattttccaattctacagaagcattccattccgaaggagggatcgacataacatctgtggcttccatggggttttccatttgataaggagggtaggcttcaacatcagaaaaattaccatctggataaatgtcgacatctccttcatgcttcatttgcctcctgactggtaatttatgtggcactgccttacctgtatccatttctaaattaggctctgttattaactgagcatcagtcgtgagaggaagaagaagaggatcattaggttgggacactagttccgacggaaacattggagtaataggttcactttgtttagaattagaaatggttacagggttggagcccactccagaactttctcgctctcgctgcttcaacgtgaagcgtatttttggaactcgaggtgcaggtgtagcagcttcacttagtttagaataaagaatatttcggtctttttttttgctcccaggtttaggatctgcataaggacatacaggggattttatcctcctacacttgcaacatttgaagcccaccatatcaaagagtcttgtctcgtcgaattcaagagcatcggcgtgataccattctgaaaaagaacacaatcattctcaatgttaaatgtgaaatcagagaatggaagagctttcactacataaaaaagaaaacaataaggcagtaataatatatacgtactctggcatgtttcacagcacaaatacgttaaatctggcctatatggcttacaacagagattgcacaagggatcctttctatgcacacccgaaccaccctttaaaagaatgttattatgcctgaaattaacactggtctcacatgactctaaattacccttcttccatataataccccaagaacctgacttcggccgactttttgccacagaagtagatctagaagaatcctttcttgcagtggaagtagacttgaaagaagcttttttcgctgcagaagatgatttcggagcttttttcgctgttgaagtaggttcagaggcaatttgtt

SEQ ID NO: 194209 - DNA, 1767 bp, Cannabis indica
atgactatcgaaagagatgtagtgagatgaggagatgatttttcttttgatgttgcttgagagaaaggaaaaacattttcatcaaagagtacatctcagaaatgtagagcctaccatctttagctaaccatttatatcatttgtgtgatgagctgtatccaagaaatacacaaggcatagacctctattggagtttcaaacaattttattgcttaaaatttagatagcaaagacacccaaaatccctaagcatattataatctagttttgaatgatagagaacttcaagtgaagacttgaattgaagctgtggggttggcatcttgttgcttaagaacactacagttctgtaagcttcatctcagtacttgagaggtaaagaggcttgaacaagtaaggcaagacaactctcaataatgtgcctgtgcttacactcagcaactcgattttgttcatgggtatatgaggacaagataccctaggaatgattccacattcttgaagaagtgtggtgaaggcttgatattcactccaatcatactgaatttgcttgatcttgaaacctagctcaagttcaacctggttttttaagcttataaaggtgggaagagcttcatttttggttcttaacatgtagatccaagtatgcctcgagtaggcattgataaagctgatgtagtacttgtatccacttgaagaggtaattggagcagctccccataggttagagtgtagaagctacaaaggagtataaaaaacagtttatgaaataggaaaatggagtttatgatgtttaccaaggcaacatgcacacatagattagaacaaccactttcaattttattgctaactttgatattacaattgtttaaggcattatggacaatcttaccaaaaggatgtctaagcctattgtgccataaggaatacaaaagattcattacacgaatcttagtaggattatacttatgtaaagacacattagtacgaactggagtgactggagtggttgatgtgagctgaaactttgaggagggaaattgagcagcttgaagagagtaaaatttgtagagacattgatcaagcttcccaaccagcaaggtcttccaagtatcttgctacttaacacaacaatggaaggggtgaagctcaagaagcacattattttctgtgaaaattgagaaacactaattacgtaagttcttagtaatggaaggaacatgaagaaggttttgcaaaaaccaaatgatgattagtgttagaagagtgaataaaggtgtgatcgatattcttgatttttaaacatgtaccatcttccatttgaatatgttgatcaccattgtattcatttgagtatgttaggttttgagcattgggtgtgagatggtgtgttgttctagagtctgggtactaagcagaccacaagggtttcaggtgatcattttacgattgaggcatctcttcatggttggcactacctgtaaaggttttaaaggtttttgaacctaaaaaagacttgttgaagtgatagtaccaagctttaacagtatgtcccagcttatgacatagttaacattaaggattttggccccatatcctgagtattggccacggctatgagggggaccacctctaaatcctattttttgaccacgacatggagcaactccatacgattgtgtttgatttgtaaaaggaacaaagcaaagggtagtgattagcagagtacggtctagggcatgcagcaggaccactcgatgaagaagc

SEQ ID NO: 194210 - DNA, 3633 bp, Cannabis indica
caaaatacactcaagtttgttccagaaaagtttagtttttacaaaaaattaaatttttaatatctaaatgaattttctaataaaacataaataatttttatatcacttaattaattttaaaattttaatttattttttaattttcttaatcattcaaaataatttttttcttaaattattaatttttatttattaaaaaaaaaaatgttgaatctttcttattttgattttgaaggggtgtgatttgatagttgtcaaaagtttagggacaaggttgctaatttataaagacacgtcatcatttaaacgaaataataggacgaaacctggaatctaatagaaggactaaaatttctataaatgttaaagttctggggggattcttaacaagccgtatattttagggaccaaaattagtattgttgaaagtccaggaggcaaaattggtaattatttataaaatcgagataaaataaaccttgtattttttaaaatggtacaaataggaccctgaactaatttttggtcaaataaaatttattataacctaatctagaggtattatgacaaaactagttacatttttgtgtatctattcgtgttaggaattctcttcaagttgggttatattaaaagaaaaagttatcgaaaattgagctcatggtcatatttgtgctattttggaaaatatatggtccattttgttatttagcaaaacagagagtccaatcggtaacttttacaaaacacaagatctaaaatagaatttaccctaaaataaatttagacaaaaggtaaacttaacttcataagaaaatatggtgagctaaaatagagcactcgtttagctcatttgatggaggccttttttattatcattttgacctaaattttataacttaaactattatagcttacttgttgtaagtgctcttagacatgacttgcttgtactgatcaaagaaaataaacgtatgataataggataaatttttcacctagaaatatgagtacagtctcatatatgattgacatgtgaacctaattctcaattggaaaaggatgacatgtcaataataaccctagtagggttatcgtcgcgtgatcgaaacttacgagaagatacaaccgagacagggtctaccgcacactatgcataacataataaagtaaaaagcaagacatagagagaagttaacatagtcgcatatatatatatcgattatatgcaatgactaaatatttctctcctgtgctctacataaagattgcgtctttgcaagcgtctactccaaatgactaatgtccacgatttagaacttgcaagtcttatgttgtcagtacatgaatacccaatacgcaattggtatagtcacaagcgttctattttatgaagaacccctagatgttcatggatcgataaagactctaagaggttttttatatgtttctgaatggccctaacacctcatatgtgagtaacactagagagcctacaagtttatatgctacttagaatgtggacgactgatgtgcaacttcattagtcgcacccatttgaatattaaataataaaggtcaaaattgttatatcatttatttataaatgtttttttatcttaattgaatgtaattaatattataacggtcctatctgactggttatgtaaactgaaggagcacttgctttttatataaaggagtgatctaatatgaataatactaatcacaatatcctttcaaaagtagactaagtagaccaagctttggctaaagcactataattctttatgttgtttatttgtttgatgtttatattctattaatcgtgtttttattttgagtattcaccaatctaggtcagtactcccaattatgtacgtggatgttcttgcttagctcgaatactcgtggttttttggtattgtctaattttctccaacaatatttggcgctagaaggagggtatttcaagcaagatttttgcgattcttaaggaaaatcacaatggacacggaccaaaatgttaacagcagcattaatgtcaatgaaacttctaccaatggaggagtaaccaatgctctacccaacaacggcggaacttcgagtttgaacccaactattgataaaatttttggaggagtgagccgaacaaacaccgtcccactgaacttgctcccttagtttactagagtcgtaggagacatgaagacccctatggcaattgatgagtccatatttgtcttataaatatggtaaattttttgtgttaatattttaaaattaattccttaaactgtctattaatgtaactttatttgtgaggagaattgatggttaatcatatgttttgagttgtttgatgttattttgacacattttgatggtaaatggtggaggtgggagagctcagtttggctaaatagaacataattgtgattttgatgactttaaacgcagtattggaattggagttaaacatgaaagttgtagatcttgttcttagttttttaagacatcttgaatcgtctaattctgacaaaaattgaagaagttatgggaaaaatactgatataagcacgtgacagtgaaaacccaagaagtagcgccctggcgccacttaaactctgcccaggcactcaggtccataggccttcgtacgatttgaaaaaagaaatagtttttaagcttaaattagatttatttttgaggtttcataagtaagacttttagagtttattttttagcaagttttgattacgcttttgaagaagagaactcaagagaagaggaaaatctacatctacatctagttttcttcttaaactctttaattttcatttatattatgcttatgattatgtttgagattatggaatagtcatcttttaggttaagggttatttcaaaccccgagacatgatttcttgaatattttgattaatattaatattttggtccttcatattgaattgtttatattcttctatgcttaattttatgattaatgttttgatcttgtttagacgaccactaaattagattttacattattctactatcattcttaaaatttctattcacctagtagtctaagattctaggtttaagtgataaattgcttgtaataatattgtgaccggtattgttctttatgatgaagaatataaattaagttaaatgaattctatgctaaattgaattgtttctgttagatccttttttgacattcagttgtcaatttaaattatttttattacattaattttgtccctctaattactcttttcttataatgaaagattctttctcaactagtcgcttttggtttaggaaacttcttgtaagagaaggaattcccttatagaaagttgtctaactttggaaaaacttgactttctctttttctaattgatgatttcagttttgctatgattagaacagatcaaataaactatatttggcaagtttgaagtccaaattcgtgatcttggtccattttagaaagttttctttctagtcccgatctattgttgcagagcccgattctgatgctgcaaattaggaaattttttaaaaaagttttgtacacttgggaaatcatttttgatgctgtctctagggttgctatgt

SEQ ID NO: 194211 - DNA, 1667 bp, Cannabis indica
tatatgattagccttttttgtatatattattttgttaatataaatgaatcttatttgtatttattattttattggtaagttatatgattagccttttttgtatttattatattgataattaatgcgggaaacaatattattaataaataatctattgaatataatgaagaattaaatagaaataaatttttttacgtagttttatagttaaatctacatagtctacgactcaagttacttttatttctatgagtgttttgagtacaaattttgacaggggttttgcatgcagaatttggttgttcttttttcattatattcaccactatttataggaatatgatagaagttatttaatcttatggtgggttttcctatgttttacttgttttactaataatataataaccacttgctttttgaaagtataaatgaaccggtgcttaaacttagtcaaaaacatgttgtagtcgagcataacttttctattgtctttttctcaaaaaagcttatcgaaagaaccatagatcaagtcaagcttctttgaagcagacttgatgggcaaatcaatactaaccatctttttcaaaaaagtgtgaagaaacaaatgtggtattgaaatagaaaaaatattattttatggtaaaattaagaatgtattgttttgggctataaagtttctcacaaagacattgaggtgtgttaatacaaaaccaaattaggaattttattatgtatattctgtcactgttgcataacagaatttagtttagtttgttattttcctttccttggttttagtctttctgtaataatgagagtatttgtacctctataaatacctctgtaatgttctattaataataatgtgagctttattttttgcttctctcttcttctcaccctaaaattcatctatgaattctacatggtatcagattgccattgactctcgtcatcaatggagtctacctctaccgatcctacaaccagagctcctactggtctaactcagactaatgatccacctggaatcctttttttcactccctacagtcaaccttgactctgcaacaatatacagtactggtgctgaagggcatgttgtaggcaatggtaagaagttacaaatttgtaatataggttaaacatttctctccaccactaacttttatcccattaagttgaattcgatcttacatgtcccctctatacaaaagagttttatggagaacaacccttaacacactactatcctcacccatttttaacccactattaaacatatatatataaataaatatatgttctactctaagaagtagaattaggttattgggcatctatctttaatgatagtggattatggtttcatggactaacctagagtcattagagtgctaccatttgcccaaatacaattaataaactgaccatatcctagctattatgatcctaattgcataatcaacattatatcattcatatagttattcacatgtactaatatcgatattgtgtgagtagtactcaattatgtaagtccatataaatattctaacattgtactcatcatctttttatttgaagaagagtatcttgaactgtgaacctgatattatcccttaaatagaagatgtttttgataaacagaccctattaaagtt

SEQ ID NO: 194212 - DNA, 2521 bp, Cannabis indica
tacacacacttgcaatattgagaatgaaagaataggattagcagttgcagttgtagattttggtataagtttgtacttggtaaggtctgaaggaatcaaaattctatcaaaatgaagtagcttgtcaatggccgtttcatgatcatttcttcagagaaagtgagtgtcacacagatatgccaaaattaaactttatctctcttgacaacaactataatattttcatatttgatctgcaattgagccatttctttggatttactcaatttttgtttgccaatcagcatttcctgctttctataatttaaaatggcatcagtattcagctggaaccgtagtttaactctaacatatgcatgctttttatggctaatttcggtacattgttacttctttcagattgatttgctagaaatcttgcgggtatccaagtactggaagagatatggaggcagagaccatgtcattcctatgactcaccccaatgctttcagatttcttcgtacagaagtgaatgcatccattcagattgtcgtagatttcgggcgctatcctagaatcatgtcaaacttgagcaaagatgcagtggccccatatgtacatgttgttgaatcctttacaaatgataatctttcagatccatttgagtctcgcccaacgcttctcttctttagggggaggacattccgaaaagatgtatgtatttgtgttttccctcaatacttctggtcctaaaacagtagaatttttattttatgcagaatttaactggttatcttgtactctgcactgtgcaggaaggtattgttcgtgtaaagctggcaaaggtactggctggttatgatgatgttcactatgagaggagtgttgctactggagaaaatataaaagcggtatgtgttggatggagttttgtagatggttcattgtcgatgttgttaaatacataatttttcccctatttgatccaagaatgagattcttatttgctcaccttggtacagcagagggactaggataaattattcatacaaatcattcactctgtccttcaagtgatttttgattgtcatttttgggatagttcttatgtgaaattacttacactacatcatagttaaactcgagatcctcataaccttgtatgatagccttattttgatactacaattttttgggttaaatgtttactgttgaattagtcattgttggtttccattcacgacaggaatattttaatctgttcttatagactattgtctattaaatgtcctcaaaataaagaattgatcttcactttgcggctgcattggaaacctgaataatcatctgcagattatatcctctgtttaaaaaaccaatgcagtttgcttaaatgtttgtactcggccatctctaattttctaaattgtgtttcctataattataattattatacttctgacattcatctcctttctgttaatcttattgtgttacagtcttcattaggaatgcgttcatcaaagttctgtcttcatcctgctggagacactccatcatcatgtcgtttatttgatgctattgtgagtcattgtattcctgtcatagtgagtgatcaaattgagctcccattcgaggatgaaattgactacagccagttctcattattcttctcatttaaagaggctctggaacctggttacatggttactaagctccgtgaatttcccaaggaaaaatgggttgaaatgtggagacaacttaagaacatttcgcatcattttgaattccagtacccaccgaaaaaggaagatgcagttgatatgttatggagacaggtgaaacataagcttcctggggttaaacttgctgtacatagaaaccaaaggctaaaaattccagactggtggaggcgaagatgatctcaagattttaatctctcattgtacattcagaatctttttacggccacagttgaaattcttaaagcggggaagagaataactactggtaattgcaaaccccagattcagttagtgcattttccagtttgtgtagagtagtgttgttttcttcatcttatacttgtctattctctggtctactcttcctagtatataaagatgagtggcatgtttcatggtttcgtttcttcattgtgatctgatagctttgttgtcaccccttgcttgacaattttggtgacttttctgatttttacacggaaaatatttatttgatattgtagttagtaacatacagggatgtacatcagacatttttgtagttggttatgattgattgcaattgtatttttgggtattttttttatgttaatcagtgcaaagtgttagttgtaacttgtatctactttcaagatggtactttgtcgttgaattttgtaagttactactgttgaactgttttttttttttgttcttctttattaaaataaagtaaaatgttaataaataaaaggactcgttcaaaaagacaatgagaaaaaagatatatattattaaattaataatatatatat

SEQ ID NO: 194213 - DNA, 869 bp, Cannabis indica
cttagtctcaatttcactagcaatttttacacatgtagtatggtagagtgctttggaacaaatacttcatgcatctgaagtttttcagtttcccgtacatccacctgtcatttaattatacatatatataaatatatatatatatattaataacacattcatgtataaaaataataagtgaattaatgaagtagagatcattgttacctatcaacggcattggtgaagtgtctgagctcttccaatgagccataaacatcataaacatcatcaacaatgagtatgaaattgaccactttggtaagacattttctcagacttttgtattcaggctgaaaagccagtcccacagtacacatgaagctctcgaccagcctatctctcgcaaaatccaacttctctgaaaggcccacattcttccaccaactaaacgaaatagagaaaaagaatcatgggcaacaattcgttactctcatttaatattgaaaaaaaaaaaaaacaaagcccaaaacatttcagtcttttgttctaataaaaattgagaaattagatttttattaaaaaaaaacaaataagtccaagaaaatatatatatggttggtcttgagctaaggcacactaaagggcgcccgtgccttgccgccaaagtcctaaccccaaaattatgattaaaattatgaaatttaacatgattaaatataaattaataatttttttttttgaaaaaaaatgacctttatatatatatataaaggatttttacattacatatagaaatttttaattttttacctttttattgtaaggcgaatttttttaaaaaatgttagtgtaagttttatactgtgtattgtgttaagttttcacgg

SEQ ID NO: 194214 - DNA, 1149 bp, Cannabis indica
gttaatcaaatagatcaataccttcttagtatataacactttatatatattggtagacaagaaccaaccattatatacaaaattataatatatattcatatttttctcaaaaatatacatacacatatatacatttaaaaggagaacaactttttctcttggtcatatttggaaagtacgtagcgaaattggactgcactaaataatataacagaaaagagtatgtagtaatttgccaacgacaaataatagataaaaaaaaaaaaacaatgatataaagatgaaatatttaatagatttgaaaaggacaaaattaattagttataagttttctaatgagattaaattatcatactatgtggattaacagaaaagacaacaagagataatatccaaataatttcaagttgaaaatatacatagatgaatatcacaatgtggaaaaggcaatatacatacatacatacatacatacatgcattatgcatagatacatacttgtatagacatggagagagaagattattaattattagttgaaaagaacattcaatttcagagtatggagaaggaaaaatatgaaagctgaatcctgaatggacacagagactgaaaccgtcatatttttcagactttgactactatggcagctcagagataaatcattattttttactacttacactaattaagtatcggttaatgaatatcaaactgagccagcagtgatttaaattcctgataactgaaaatataattgagtactaattaattaaacctttgtttgatcaacatctccaaattcccacgtctcttaatttgtttcattctacttttatccaatcccatattttatatttcaaacacatattttgaagaaattaaggtaacaatatattcccaaaactactgagctctagactaccacgtcccatttgagtatatgtataggatttgccatgtacatacataatattatatatacacgcatctttttggagagattatgtaataaaatggcagaataaatagataaatgaaattaattagagcaaaaatatgaattggtaagatccaaatcatatcatgagtgagtgtttgcagctttgatgtgagagagagagagagagagagagagagagagacgta

SEQ ID NO: 194215 - DNA, 1502 bp, Cannabis indica
gtcaacatacattgattagcacctgcactttgttcattgatccaattcaaaaatcggattagcaaatgataatccacaatcagtttaattaaattaaattattattttatttgtctaatatatgaggtgacctagcttctattcttccaaaatcttatttttttttaatggccaaaatcttagtttaaactaaatctatataggggaaatgtttttttaaggggaaatgttattatttaatattaatagaatcaaaaagggaagtagaatttatcacacaggtaccattattatctttcatttcttgtgagaatattgttttcataattagtttacttaattttctatatagactaaatcctcaagcaatgaatatgaatatatgtatatcactttatagatgtaagattcattaaaagcaaaaagcattaaacatacattaataaatccaaattaaattaaaaataaatttgaacaaagatgaacaaaataattaaataaaaggtaaatatattattgttcagcttagctaagtatgttttattttgacatagttaactctatttggtggtgtagtttcgtaatttaattattctcatcacaataaaaataatagtaattattataaaattacatgtttttttagttattagtaatcagtgcatgtcgttttcttatgatacagaattatttatctaataatgtataaagtatgatcacatgttaatacgttttgagcaaaaaaaaaaaaacgggtgttaatttgttaaactagagcatgacgacagctatcttttaagtatattattgttatagataacaaattctcgcgagatattgacgttaacggcgagaaagaaaaaactcaattattattattcacataaataataatatcttataaaaaaaaaaataaacaactatgcccccacgaaactagctggatccgagggaatcccaattcaagattccaccagttaagcaaattccattgacttcgttatattttttcatgaactttgatagtcagaccaaaatattctgaaatataaaactttataaaggaaataataacaataataattaagagtagattaaaggaagcaaacctcttacagccggagccggtggttgttctccaagtacacaacacagtaaaagcttttctttttggaaaatccagtgagtgcatagctcaccacacacatatcttctcttctgttgtgtttcatgatattttttttaaagttaccgtaccttagagctattgaatattgattgttatgcatgacaggacaagtttgaccaccaataattgggctccaacatatattgggtgggtgacttgtaggctgttctttctatcttcctatcttttgatttttttattatcatttaataacatgtgtggcctgtttacttcatttcataggttacttttgtttctgtttttgttttgacttggagaatagtagttgagtatctaaaagtttgttcttttt

SEQ ID NO: 194216 - DNA, 4846 bp, Cannabis indica
taaaaaatatagagtgatcaattaggttttagttttcttgtgatgatctcttgttgttcatagaataagttcaagagaagctttgaacaagtgtggctcttcgggagaagacttttcaaagtctcatatcgagaagagtgagcatgcatcaataactgaagggagttcactacttgttgtgtttcagagattatattagcgaggtggattaccaagggttgcaacaaatcattagagagagtctaattttattttaagtcaattacttttgtaatctttgatactttactaattgatttgattctatgggtgtggcctcatggactagtagtgtttgaaagaacactaatacctcgtataattctcttgtgtcaaattttaaattttgcataatttatttatgtttctattctgttacagcaagtctatgttctatagtaacaagtttttaatctgttacaacaagtcgttacagtcgcattttaattataatatttaaagtaataaatcagtatatgcaaaaatatagtttttcaattggtattatagcaggaccttaaactcttagtgtggtcttttaacgtttccttctatttttacaatatgtttccactacagttggtctacattgctaaataattttactacccttattggaaggccaggatgaagactctcatcaaaccccaaaatgaaaagcttggaaatatattctaactagttggtctctaccagttgaagaagatgatgaaggtaataccaaggtaaaatcttaattagaatggtcaaatgaggaagatatattttcaagtaataataataaagctatgcatgctatatttaattatgttggtgaaggttttattaaattaatcttcttgtgtgaatctgcaagaaaagcttggttaattcttgaaactcaagttgaaggaaatatagatgtaaggcattctcggttcattatattacaaagtagatttgatgatcttagaatgtctgattttgaaattctttttgaattttatgaaaaattgtctgacattgctaatggattttttgccttgagtgaaaaacttgatgaatttgttttagttacgaaaatagtttaagttcttcctgacaggtttaatgcaaagattttggtgatggaggaggctaatgactttagcacaatgaaagttgaggagctaatgggatcacttcagacatttgaggttaatcaataaacccaataaaaagagaaacacaataagataaaagaaaagaaaaatcaattgccttaaaaaattttgagaatattgattctgatgatgaggaatgcaacgccctatccaatagggacgccacatgtgtgtgcttttataaaattctcttttataatttatataattataacaaatgtgtgggtgatttaaaattttatagataaaataaacactttattgttataagagttaggtactaatctttatggggacccctcgtaacaaaatatttacatttggttccaaaatacttttacaacataaactttatatgtcaaaatacaatcaaaagaaacatcttatcgaccgggtcgtgataccgcgactgatatgtatattgttgctccgacctcagactcatggctgctcaaccttagcctttcctttacctgcactatttagcacctgtgagtcatagagactcagcaagaaagtgaataaatcaatataacattcatttaaataatcatatagtaacatactcaatcatatacacatcattaaaatcatacaatcttagtacttcataaagtacccataccacttgttaaccacgagctgtatatgtcactatcgatgcccgatacagcaaatgataagtaagaaacctatctgtagtttctggagtaattactcaatatggtaatgatcgtttccaatccctcggttataaccgaggcttagcacatactatctaagttctcgaccataatcgagactataaccatacaattattaatcacttaaccctaagtgatgtataacactttccttacctcagtctagaactttccaagtgtgcgagccaacctgagtggaaaataagctgggcgatcctggccctatgtcacaacaaacaaatttgaataaatacctcaaaccaaagtttcggaataaaaccctaattcgaaaccttataaaaatctaactttcaccaactccaaattaggctagacaacacataaacaacctaaaacagatgctacgcatcaccccgagccaaaacagaatagaaagaaaactcgagaatttcccctgcagggcatccggtcgactgaatctggtgcaccagaaccaaccggtcgaccggttctggcagacgaggaattcaagggttctcttcttcaatttcgacccaaacctcctccaaacctaatcaaactttccagaacagtataatatgacaaatataatataaccaattcaccataattcatcaatttgctcaaaatcacattctcaaatgaaaattaagctcaatttacttcactaaacatattcaatccaaacaacccttatatctaacctccataagcttaaacaaattcataaactaacctaaaaatatactctaatcctatcttaacatcacagccccaaaaattccaaaaaccctaacctatagtaatctaaaacttcaagaaaaataagagaaagtgttgaatgcttaccttaatgtacaattgactccaacacacaactaatccagccaagaagatgaagaattgcaagaaaatccttaggctgcaactctcctagggttcagccaagaagaagaagcaaaaccaaaaatgcttctatcaaaactaataatcccttttacttaatttctaatttccttttttttttaaaaaaaaataatgtagccactaacttaaattcagccaaaatatatataatatccattaatcacaataaccattataccattaatcttaaaattaaacctatgggcattttaataattctagctaatctgttaaatcgacattctaaaattctagactagtccgaaatacttccaaaataatccatccttattgtcgtgacatctctgaccacaccgtcatgtttccctagtcgtcggacccgaaaatattttatctcaaaaatggtatccatgatacccccatattctaataaaacctccgtaattaataaattatgcttcattaaatcatttactaaattcacactaattaatctaagtaagttcataatcttacttcattaccggaagaatttacatatttaataaaataagcctaattaaatatcataatattttctggcatattacaaggaagataatgaattgaccatattaataagaagtttttttcaattattgaaagcaatgggaccaaaaagaattttttttttaattctcagaaaataattcatcttcaaaaaaatttatgcataacaataaaagagttgttcaatgtaaaaaatgtgatggttttggtcacatacaatctgaatgtactattttttaaaaaagaataataattgttttaatgaaactttgagtgacaatgattatgaaactagggttgatgaattagttgttttaacctctgttctttctagaatgtctcattttttgcagaaaaagagaaactttgtttggctaaacaacaatgttttagataataaaatttgtcattgtgctatagaatctgaatctcatgactccgaactagatgaagattatgtggttgattcctacaaggttatgtatgaaaagtgaatacaaatttgttctgaaaatagattcatgacagaaatgaataaaaatcagtctcaagaaattttttatcttaaattaaaaattaagaattatgagacttatttatgtttaaaaattgatgaaattaatcttttgaagaaagaacttgataatcttaagagaaatattaagatgcttaactgtgattcatctaatttttgaggaagtacaaaatgcaggttaaagagggttggctggtctaggctcaaatggtgctaaaatttatggaataccaaaattcatgtgatccagtgtcctaacaaattttcctgctactgcaaattcgttgtctgctgctgcaaattcatcttatgcagaagcaagttctccaaaaaaacttgaaaaaggtaagttcttaagtaagaaaatttattccaacttatcatttctgtggcgttaaaggtcacattcgacctaaatatttcacattacaaaatatatttaggtcaaactatttcgaaaaaataaataagttgaaaaagaaacatgtttcacaaaaacaaatatggattacaatgtcttgttggcatttttgataaaactattgcttaaaaaatatggtattttgacaatggttgttctagacatatgacaagtgacaaggagtttattatcaacatcaggcctatacaatgtggtgaggtaacatttggtattggtttagcataaaatgttattggtatgaaaactctcaattttgaaagtctaccaatgttgaaaatattcttttggttgatgaacttaaggctgatttaattagtataagtcaacttcatgagcaaggcttgtctgtaaatttttctcataatgattgttctgtgcttgaccaaagtagtaattatgtgatgaaatgttttagatgtgttgataattattatactctcacttcttttcttatcatactgcatgtgataataccagtactacacatatatctaaaaattatgttcaacattctcgtacaaaatacatttatataagatattattttgtaatatcccgataagcc

SEQ ID NO: 194217 - DNA, 992 bp, Cannabis indica
taagtatataaaatcaaaattccatatctgttatcatttgttgtaaaaaagtaatagttactcaattgtaactttaataaatggagagttttgatctttaagttttttattggcaaagtttaaaaatatgatttttttccttacaaaaaaaaaatatggctttctgttatgaaaaagttattttgtgggaaaattaaaaatatgaaataaacagtttaagatatccactcatatcttagtaaccccttctgactaaatattattttatagtcataaatattatttttgctataatatcactaaatacttaccagtaaaaaataattttgttgtgtactgaagttctcccatcctctcctcaactaaaattaattatttaacaagagctagcctcaatttaatttaacatctatcattattttatactcaattattgttatttttatttttttatttttttctaaaaggtgatctacttttatgtatatatgtgtggttggaaaaagctacatgatacatcaatgttatatgtaaataaaagggagtagaaattactgtagagagtacctttgctatggtcccaatgttgctacatttggttggaattatattcatatattaaaaatgtataacattgaatttgggagaggtggtgggggtggaagaattaaaagttgtcaactactttcagaagagtcagcaaatattgatgttcaagtttaataagcctattcattaaacagttgtcattttcctaaaaaaaatactcatcaacaattttaaaatttgaaaagttatccactatagtcccatattataatcaagttcggtcctgagcataagtgaactaaacctgtacctagagcccacctaacttagaagcctaaaaaacttttcccctttgaaattacataattttttttattgattttaaaaaatacaacatttcctttaaataaagacctaagaatatttttggaataattacataa

SEQ ID NO: 194218 - DNA, 1387 bp, Cannabis indica
ttttttttttttcaattttgaaaataccattttttcaatttttatcaaaaatgccattttcttattttttgttcaggaagcaacagcaaccacaagtggaaagaggtgatttttcaccatgtggtactccaactggacttgattctagagacccttttgatctccaacttggtaagtaaaaaaaaagtttgtcttttttaattttctagtgtgataataataattaatgataattgtgatttattttgtgtatattttaggagcaagaatgttttataattctcaagatatgttatggagaagaaaattagaagaacaagctgagttacaacaagctattgaacttcaaagtagaagaattatgggtttgcaacttcttgatgtgaaaaaacatcatcaccatagagcattatcttctggtagcccaattcaatcaccaactcaatctccaaatttgtacactcaaaatcttgtcttttcttcaattcaaaacaacaacaacaacaactcatcatcagaagtctcacaatatggtataaaactctctatcttaactatcaacacttaactttttttctataaaagcttcattctttgtatgttatttgttagaatttagaataagatgaatggggttctttctggtaacgagagtagtagcccattccttttatatattttattagcgacgtgagactatctaatatttgttacacttagagatttttttaacattttggttttgtgttagaaaatggctctggtactccaactccgaattcttcttcggatctgccaattgggaaagaatcaaactccaatgacgaaaacagcaacgatagagaaagcccccgtgatgaaatcggcgatttgttagataggttagcaacatttttcgagtacatattttgcgtgcacatatttttcgagtttcggggattagacaaaagtgtagtttaatcaagattattaactaactaattaattgcagtttggagcataatcttcctgatagtccatttgcatcaccaacaaaaggagcaggagaatacaacatggctgctggcttctcagccaatattgccactgaaatcaatgacttagattcttcttcaattcttccaactgctacaacattggacatgggatctttcaagtctttcaattgtcaaatgccaaggaaaaaaaaaaaaaaaaaaaaaaaactaaaataacttccttttttaccctttactacacttaaaatttaactactagtagtcccctttaaaaccccctaaaacctaagtaaatattaaatttaaagttcatgtcactatactactaaataacttactactttttagttttttgtttttgtttttcgttagttcgttcttcttacttc

SEQ ID NO: 194219 - DNA, 1668 bp, Cannabis indica
atgtggtccaatgaacacctctaattatagttattatataatttttataaatttttaaaatttttcgaatagtttacaatattaaaaataaaaatcttgatattttaatttatcacacacatttaaaaaaaattcaaacttattttcgacactctaaactattcaaatttttctaaaaatttataaaaatgatgttgtaagtataaagaacacctctataaaaaaaattaaaataaaatattttagtatatattttctaacacagaaattgactaaaatgtttataataggaggttggggcactattttataactaatattcgatcactcatttttacgctacatctacctacgagtcatgcctgtcactaggattgaacattttagttagatttgactcggacctcacccagccaacccatttgtttgggaaatcctgttccttgcgagcgggtcggctccaacccggtcaactctttcaagcaaattcaggtctaatttttgctaatgtgggggctcaggttggacatgtacctgcttgcgaaccaggccattttttttttaatttttataccacatactgaaatttctaacttttttacttatttactatggggaggaatttttttcaaaaatactgtatgttttatactatgtattgtgttaaatttttacggttactccacggttattttttagttgttccactgttgttttaattgttctgttttattgttttacaactattttataaaaagacattttttttataaaatttttcgtataacagcaaaattgtaaacttttacccaaaattcagtattttggaaaaatcatttgttttctgtttaatggtattatcaattattggccactactagcaaaccctagtaaatttatccttcaattattgggccactactattacaggcccactattacaatttgggcttaaaacctatgttaccaaaacaactagttgttttatgatataattacagtactattttaaatggtgtttcattctgaaattttgacaatttgaaaatgttattttaacattaaaattatgtgttttttaaaaaagaaaaaaaattaataatttagtttttaaattaaaaaaaaaacaaatatcggtgaggattttgataagttaataatatgttgttataaaaatttatgaaagttttaattgtgttttctttctaagtgaattttttttgttagtatatattgaaacaagtcataaaataaacatttcagccaaaaaaaaataataaatattttattatattagatattttgtgattacaaattacaatataaatagtttttagacaatatatgtttatataaaaatataatttttatataaaaaaataataataataaaggcaaatgagtggccctcccagatggtgatgaagaagtccacaaatggtcagaaagatcacaagacctcatgccaatgctcacatttatgtacaaaaggttccaaccatttggtgggaattattaattattgtaactagttgtcgataactttcttatatggatactccacaacttccatcattttatctaaattttttatgattaatttacatggaaacaagtgaaatgaatacatatcaattgaagaatacatttagttgtgattaaattaaa

SEQ ID NO: 194220 - DNA, 830 bp, Cannabis indica
tatattatattgacacaagaacagctaataaggcatagtaattaacaaaactacactataaatagctagcctcattagttctctttccattaactcacactcccaaatctcttcaaagaaattaaactcataataacaattatgaagttaaacattcttatactttttttctcactattctctctttatgttttctctgctacaagtgtaagtattcgtgggccatactttcctcctatgagcccaccatgtccaagcccaatacctcctccaggcccagaaagaccagatcatagatgtgggccttcttttgaagacattccatgtaatccaggaaggtgttgtagcatatttgaatattgtggtagcacacctgaatattgccaaggagaaacttgtaggtctcaatgttgggctcccactccttcacctacctatccacctagctagggtttttgccctaatataatatgataatgatgatgatggtgattaagacaatgataataatattgttattgttggaattaaataaaataaaatatttgtgttatgttatgcaatctagttaagagagtactttataatattgtgatgcaatttactatataatttatgtgtgtacttgtctttatattatgatgaaataaatgagctacttaatttaattaattttgtgttattcttaatgttttatttcttagcaatttttaaataattgatgaaatttagattttgtgatcttttgaatttgatcagactggctttaacattttatgaagtaaagcaaaatattagagtctttaaaaattttgtcaaatttagtaaag

SEQ ID NO: 194221 - DNA, 1467 bp, Cannabis indica
tatcaactataattccagttgaatctagtaaacttacaccctacagggttgtgataatcatgcggttgatcatcttaattctctttttccattatcgagtaacacatcctgttgacagtgcctatgggctatggatgacatcagttatctgcgagatttggtttgctgtttcttgggttttggatcaatttcctaaatggtctccaattaaccgggagacctatattgatgtcctatctgcaaggttcatatctttatcttgaatgttgagttttggctagagctagacaaaatgttaaaattttgggtgtaacatgaagtcatattgtattcattttcatgttatgataggtatgaaagagagggtgaaccatctgggcttgctgctgtagattttttcgtgagtacagtcgatccactcaaagaaccgccactaatcacagccaacactgttctttccattctggctgttgactatccagttgataaggtttcctgttatgtgtctgatgatggtgcagccatgcttacctttgaatctctagctgaaacagctgactttgcaagaaaatgggttccctgcaagaaatttcaatagaacctcgagctcccgagtttacttctctcaaaaaattgattacttgaaagataaagtgcaaccttcttttgtaaaagaacgtcgagcaatgaaagtaagattcccgaagcatgggttaattatcattcatattacatattttttctttataacatgctaatgatttctttatgactttgtagagagattatgaagagtacaaagtgagaattaatgccttagtagcaaaagctcaaaagacaccagatgatggctggactatgcaagatggaacgccatggcctgggaacaactcacgtgatcatcctggcatgattcaggttgaattgtctattcttttgtccaatttatcaatgaaccatatgcttaggcattgagctcgaatttgatcatacttgcacttttatcattttcttttaggtgtttcttggcaatacaggtgcccaagacatcgagggaaatgaactccctaggttagtttatgtctctagagaaaagagacccggttaccaacaccacaagaaagctggtgctgaaaatgctctggtaatatttgcacttgtattaagatacaataaattttcatgttttttcttaaaaaaaacagtttgactaagagattatttaatttttgactgataccaggttcgagtctcggcagttctaactaatgctccatatattcttaaccttgattgtgatcattatgttaacaatagtaaggctgttcgtgaagcaatgtgtttcatgatggaccctgaggttggaccaggtgtatgctttgtgcagttccctcaacggtttgatggtattgatcgcagtgatcgatatgccaatagaaacaccgttttctttgacgtaagtttaac

SEQ ID NO: 194222 - DNA, 2027 bp, Cannabis indica
ccacttaggttcaaaatttgttttgcaaaaaattgatggttctcttaaattttgatgtgtgtactcatgatatgttttcattgcctcaaataattttaataaatttattatgataaaaattatttaaaataaaaattaaatagaaaaacatctttttttctcatttctatttacttattagatttttttaatctttaaataaataaatatgaaaatagaaaacataatatttttatttatttttaaatttaaaataatttttataatgtttaaattttaaaaaaaaaaatagcactaataaaagcatgacatatgtacaaagtgggtgacccaattgagacttaataaccaaatataagacaaacttcaaatttacaaacaaaattcaactaaatggagtattatcacaaaaaaaaaaatgtttaagggttaaggtataataagtaaaacatactggggtttcataaaaaaaaatttaattctataaaaaataaatttatgtttactttataaattgataaatgtaggcctatacgaaatactttgtttgcttactagcttctcaatttaagcttaaaaaaaaattagaagcacttaaattgaaaagcttaatgtttggagtatttggtttcaaaattaattgttatttttaatcataatgatctatttccaggtgcttagatagagcagctattgtaaccccaggcgacgagactaagaacacaacaacccctccaaatctatggagactatccaccatccaccgagtagaggaggtaaaatgcatcattagaatgcttcccatttgggcctctgcaatcctacttgtcactgcccaatcccaccaacacagctttgtcatccaacaagcccgaaccatgaatcgccacgtggttgtcaattcctcttttgaaatccctccagcaagcctctccatctttggcactatcactgtccttgttggccttattttctatgaacgcctcttcgtacctctagcccgccgtataacaaaaaaccccgttggcatcacgtgcctccagaggatgggagtaggatttgcggccaacatcttctccactattgtatgcgcctttgtagaaatgaagcgaaaatcggtggcagccaaccatggtttgctcgatgaccctaaagccattgtccccattagtgttttctggttgatccctcaatttttcctgcacggggtggctgaggtcttcatgtctgtcggccacattgagtttctctatgatcaatcaccagagagcatgcgaagcacagcggctgcattgtattggattacgatttctataggaaattatgttggaacgttagtggttactctggttcatcattatactgggagtggtgacgacaattgggtgcctgatagaaatcttaataggggaaagttagaaaattactacttcctcgtaagtggaattcaagttgttaatttagtgtactatgttgcatgtgcatcgttttattcatacaaaccattagaggaggtaattattaaagaagaagacgttgaattaaagaatgatgaagagacacccaaggaggttagaatgtgacaatatgtaatactggttggaaagttaaaatatatttttataccacatataagtaaattatttatcaacaatgagatagaatttattttgtgtctcgtaatgatcaatcgtacaaaatcataatggtgatacctcagacaatattgaatgcaagatgtaaagataatgtttaatttgttagaaagaataaataaataaatgttagatttgttacaatatttattattattataccaattataaagtataactcagagctctactagagttaagcacgactttaacacacattagagtcatggtaggtcgaaggagatctcacaatatctatcaccagtctcaatctaaggaatgtaagtgtgcaacagggaaggtatagtttcagagcaagagtgtgaatagatataatcagaaaaagggaccaagctcgtcgaataagccttt

SEQ ID NO: 194223 - DNA, 1605 bp, Cannabis indica
taagtgaccctgccttcaattatttttgtcaatgagttcttatctaatactgagatataattatacacttgtatcaattacataaaaattgaattaatacaatatggtaactgaaaatattgtatataccaaatttacccgcaccgacgagaaagctttttttttttaagcaaccccatttatctaaactaaaacctactgttttcaaaagcagtgtcacaccgctgaatgtaataatttagtgcatattaagtgcaattatcattactctttatttacctcacatttgccccttcatcttaaacgtaactgataaaggtctcttaaatctttaaaaaaaaaaaaataaccgtcaattttatactaaacccaaaatgcattcagagatatatgcttttgtcctttcaaaaaaaaaaaaaaggaacatatcttttacgttttatcccatgttggtgttggtaaatcaaagaaagaggatcaaattagggaggattcacttttatttttaactaaaaagactcaatgcgctattctttttcctctaaattaaacattactaaacaatattaagtagtccttttgtttaggtctctattgctagctctatgtgtgttatttaagaatattatatcctgtttttaaatttaacaagtttgggtccctcagtccccatctgaacagattgatagtacaccagatggtaataactatcaaaaatagttagttttgtagaactacttccactcttacacacaagatcaccagaaaacagaggctaaatttagctagctacttgatattactcttaatctctctctcacacacatattaacttttgcttctgtgtgtgttcctaattcaacccgtgacttaaaaatatgtacaaatttatagccaatgaaaaatataatgcaccccacaaatccaatataaggagactatagtagtgtttgttggtccctcttgggtggggctggagctgaataaaggagtcaaaagcaaaggaaagcaaagctaatcaaaacaaatcatatatagtattgtgggccatgcaaaagagaagttgaccatctaccacatgcaaacaactagtactattactcaattgaaaatacattataacaatacctcaaatgagtaggaaattattgtttctttacctattcccttgtcttcatatggaattaaaaagcacaattgcaagttttattatagtttttttaaaaacaaattggtacttcacattccctaaccccactccatgcactatctgtccctcgattttctttcccaaaaccaaacaatgaagtcgctgagctcacttgtctctgaattatgtcttcactactataaatatatatataaatatattatatatgtagtaagaagtacttgatcataatgcagaaaaactagctcagtcatgatatcatcttcatccatggagatggagtttcataataataattaagaatgaatatttctctgtctctctctccaaaggggaccaatgtcttggtcgaagttaaagacattattgtaaatcattgcaaaccaaaatatataattttaagataccttattttattttattttttattttgt

SEQ ID NO: 194224 - DNA, 1202 bp, Cannabis indica
tttcaaacttggtatcagagctccgtacttcaccggtggtgttgtaatctgtcatggctgaacaaactcctcgtggtggtggagacgaatcagcaacaaggactgcttcgaatgtcattgctcaagcttcatcggtcacctctgcagctcctgtgcagcatgttgctagcacgctaacttagccctttgcgttgaagttagatcgaaacaattacactctgtggaaaactatggtctctgccatagttcgtggacatcgtcttgatggatatttaaatggtgcaaaggtcaagccaatcgagttccttcctccagatgaaactgcagaagggaacactgttatttttaatcctgaatttgaaacttggattgttcatgaccagcttctccttggctggttatatggctctatgaccgaaagtattgcaacagaagtgatgggatgcgagtcctcttcctgtctatggcaggctttggaaaccttgtttggtgcacactctcgcgtgaagatggatgagtatcgtacgaagatccaaacatccaggaaaggtgctatgtcgatggctgactatcttcgacaaaaacgacaatgggctgatgtgttggccctcgcaggtgacccgtatccagaaaaacaacttgtatctaatgttttatctggtcttgacattgaatatttacccattgttgttcaaatagaggccaggtcctctacatcctgacaagagctacaggatattctataaagttatgacagtaaggttgaaaggcttagttctttaactggtgctaacaaaaatgttgctctcacttctgctggtcctagtgcaaatgttgcaacaaccaaaccaggtggatattcaaataacaaaggcgactcaagcaacttcagcactggtggaaaccgtggaggaaatactggacagcatggtggaagaggaacaaggggttctggtggacgatttcgaggtcgaggtggtggaagaaacaataacaactccaagccaacgtgtcaagtgtgagggcgttatggtcactctgcagcttattgctacaatcgctatgacgagacttacatgggaatggatcctaacactgtcaacaacagcagcaacaacaaaggaggaccaagtggagcgactgctttcatagctacccctgaaatggtggatgatacagcttggtatgcggacagcggagcc

SEQ ID NO: 194225 - DNA, 740 bp, Cannabis indica
tcttgctgctcttactggaagttttacaatggtatcatcattcatcgtcttccaacgtaagtttacactactagacaaagcggcagttaacaataaagggatgacggccattcaaatctattcttatcatcttgaatcacattcacaccaagtaagttttatataatatatgagatattattagcggcaaaatcacttatactttatattttttttaacaataacaattattaattacataaattgattttttagtggcagaagtacctaaatcttccttctattagctatttatattctttccatccaaaaatctcaatcaattgccacggtagattacttaattacgtgtacacaagtgtacgcgtgacacgtttttatttcttctttctttttcttcttcgaaccttaattaatcgatctcttggcacagataatacttgattacatattgtgtagttaactaaacataatttgatattcttgatttaaatagtttatgacaaagtctacttttaacacactttgcagatgtttgtttggctattgatgccagtttataccaaacatttccaatggtttaaaacgagcttggaaagtgtacacgatgtgaatggtgataagcctaaagaggaagagactaggattgtttcacttgaacctaaacaacccaatggtgaaagaggatcatataattatttgagcactgaatttattaatgtcaacttaattgtggcaac

SEQ ID NO: 194226 - DNA, 1119 bp, Cannabis indica
ctagttcataaaccaaggtaaaaaagatgggtacacaagaggggtccctccctccctttggattacaccaagcatcctggcagattttctagctctttttgctagaatccaagtccagaacatagaaaagcgggatgcccatgatgttgattttttcattagccattccccaatagatttacctgcaataatacctacagcttctctcaatttgaggaggtcgacatgagtagggctctgatcataacataattggtagatttgaaaaattatgaatggattaaaacgattgacaagttcaataccaatatcttgatttcgaatggtaatgcaccgtggtcctctgctacactgttatctaaacgattaatgaaaacaaaattacagaaatcaaagttcataataacatttaaaactaaaactgaaacattcaaacaaccctagttaggaagcctctgaatattagagaaagcattgacccccaccttaccacctgagcataagaacaagcaacaattctattgatctggttatccaaagcccattgaagagccaaaatctgggtgtgggcttctgcttcaagagcagaaccagcttgaattgaaactttgaagtgttagtacaccactgactggtattccgagagatccagacgacagctacaccagccacaccatccttccaagctgcgtcaaccatgaagatatcattacaaacaatgcggggttctgtaaaatttgaagcacttgaggggaagaagaacccgcttgcctaggatctggaacttctctgctgtggctaaacctctggtttctatgggaccaaatctccaagcaagcacaacttgcaaaagacaagaggtttactttctcactaggcaagaccaactcacaaaagttctctagaaattcaaggaaagatgtacctggaacattgtttatatgaagggaaacacaccattaaaccagactgctctaacaagaaggcagtaagatgcacagattcataggggtgattacacaaagagcactatctttggtagggatagtgtcttgacaagctctccaaagcatcaaagctaattataggttgcaagcccggcttccatatccatttcca

SEQ ID NO: 194227 - DNA, 1549 bp, Cannabis indica
acatatattttttcattttactattttactatctattttaatggcggttttttttttttactttaaattaatattaatcctttttcaaaatatggaaaacaaacaacataatttaactaaattgaaaaatagagggtaaatttggccatatgaaaagattattgaccaaaatcgtgtgtaaggtactttttttttactaaattttacaaattagagggtacctgataaacatttttcatattagagggtaccaaagttatatttaagtataatacagggtaccaaataagtatattccctagaaagaaagaaaaaaagtagtgcaccgtacatgaaatatactcgaagctttagaatgaagataacggtgactctcctatggaagaaatattactctactttcatctcgtacaaagttagtaaaaaggtactctttcacccctaatcaatttatattgtctagatttgctctgctacaagtgtgtatttaagcgatagtactcgctaatcaaaagctcaatttaaactagtttcaattatattgtctaagtgtgtatccaagcgatagtactctctaatcaaaagccgtgatttcatcaataattattttagttgatacacaactaattgagtaattaatcaatcacaaataaattaaaattaatatcaggttacattaaaataaaaaaataagaattttatttataaactacatgagcaacacttaaactatttttaaacaatgtgggatattttactaaattagtaaaaatggatatgatatttttctttagtttgaagctctcaaagaaattataaaattacattgaaaaaaaatatgaaataccacctcatcaatcataaattctcctttatataaatctatagatagataaattacttaggattaataagtaataactgtcataaagtataataattttaactataaaattaaatataactaaattaaatagatattattttacgcaaaaaaaaatgtttataagtgtgtgtaacattatttataatacattagtcatcttaaagtgttgagaggcttaaagcaaaatttgaaatgagatattatttttttttatatatataaaagttaaaataaatattatttaaattttgacataatttcaattttataactcttttatctcatataacaaataatttttcttaccatgtaagctaacttaaaataatatttgattataatagaatatctattgaagtgttatatattttatcacttttaaaaaaaaaaaaaaaagacacaatactattttgaaatatttgatttatttattattattgtgataatttcttttttacataattatatataatcatttattaaaatatatatgtataaccttgaattaaaaaaaaaaaaaaaacaaaagtggttgcaaggggatcaaaccttgcaccatatcaccaatatacattccaattaactaattgtgctacaattttttatggaatatattatatattgatctaagatttatacattatattttattttcatatatat

SEQ ID NO: 194228 - DNA, 6083 bp, Cannabis indica
ccagttaggaattgtattgatgagcatctctttcatggcatcaggaagcccttgacctgcgtcatctatggatcctcgacaccctgagcatacttcagcaacaccttccgctgccactccaccaccacctgcaactctacatcaatggaatcctttccaaaattcactcaattcgtcccttactgttcgcctcgatcgcacgaactatcttgcatggaaatctcaggtgattcccacggtcattaggcatggtcttgatgacatacttctcactagtgtggctcatgttcagcgcctcatcaatggagaaatcaacccagaattcacggcatggaaacgaaaggatcaattccttctcagttggctccgctcctcaatgacagaaaccattcttggttccctcacccagcatgaatcatcttttgatgtctggcgtgccctggcttaaagattttcaagtcagtccaaggctcgtcttcttcaaattaaatctcagttatcaacaatccaaaagggtaatctctctatatctgattactatgataaagtcaagttgttagctgattctttatccactgttggccatccaatggatgaaactgatttgataatgcacttactaaatggtttgggtcttgaatatgaccctgtagtagttcatgttacaagtctagtagataatctttcctttgaatcaattcagtcgttactactaacccatgagagcaggattgaaaggcactttaatgtcaatgatctttcctccaagatcactgccaatctcagcattaacaatccaagaaatgcttctggtgcaccacatcggttctataattcccaaccaagaggagcctatggtaacatgaaccgtgtccctgcaagaaatcaaagaagtggtcatccttcaattccacgactgttgtgtcaagtgtgtcacaagcctggacacacagcagccgtctgccattacagattcgacaaaggttttatcactcctttgatgggagactcgaaggcctttctgactgaaattgatgaacatgacaatcctcaggcttactcctcgaacagtgtacctgaattccttgatgattacgattggtatgccgatactggggctacaaatcatattacatggaacaattagattctgaaatggcatactcgggacctgatgctctcaccgttggcaatggcaagaaacttgccgtttcccatgttggtaacacttctctaccctcctctcgtcttcctttaaaattacaatctgttttaaaagtccctcatattaccaaaaatcttatcagtgttcttcaactcactaaagataaccatgtctttcttgaatttcattctacctgttgttttgtcaaggacaaggtcacagggactgtttttctcaaggggagagttaaaaacggcttatacacattgtctcatcgatcctttgtcacaccagaagtcaatcttcactgtcatcttgctacatccgcacctaggccttcaatagaatccgctcttagctctagctcaggaaaagaatcagattgtaataataatatagctgctacatcagctatcacctcatgtaatgactcttctatcaataaagagaataatttttcatctttcaatctccctgttcaggcttttactttacaaaaatctaatataaatttgtggcatatgaaactagggcactctgccccaagaactcttgccaagattctccaccagttacatatatcaccaaatttgaaagccttacaattttgtgaggcatgtaaacaaggaaagagttataggttaccatactctctctttgagtctagagcatcccaaccattagaattggtacacacggacttatggggtccctctcacatcccatccaaagaagggtataggtattatatccattttctagatgactatagtaggtattacatggatctttccccttaccctaaagtctcaagcctatcctacctttcttcagttcaaaacacttgctgaaaaacagtttaattttcccattgaaagtgtccaatctgattggggaggtgaatatcggtccttggccaaatttctataccaacatggggttcactttcaacacccttgcccacatgatcatgaacaaaatgggcgtgctgaaagaaagcatcaccacatcactgaaactgggttgacattacttgctcaaaccaaacttgacttgtcttactggtggaacgcatttcagacagcaacttatgtgattaatctgctgcctacatctatcataggagatatatctccctttgagtgcttatttcataaagcacctgactacacattcctcaaaccgttcggttgtgcaagcttcccttatctcagaccatataatgctcataagttgaatttcaggtctgataagtgcatatttcttggctactctctggctcacaagggatatctatgtcaacataaaagtggcagactctatgttgctcgcaatgttgaatttaatgaggaggaatttcctggacttcgatctgccatttcacatcaggtacagccttctcataattcacctatgcctactgcaacttttacaacacctatactgcctactaattcaattttcacatctggtgaggtacaaaatacaccatattctagtgtgttacaagactcagctgctgctactggtgtctcacaagacccttctgctggtgtgccataagtatcagatattggtcctggtgtggctgctacttctgcaactcatcatatgaacccactagttgttgttactggtttgcctactgcctcttaccatcacatacatcccacaccatctaccaaaaatgaatccgacccaaacactgccccaaatcccaacagcagccaaaacactcactccatgcaaacacgatccaagtctggaatcaccaagccaaaagcttttcatgccacctcctaccctttacccgaatctctattacctcgagaaccatcaaatctaaagcatgctctggccgatcccaagtggtttgcatcaatgcaaactgaaaatcgtgccttaatcaagaataatacttggaccttggtcccataccatccttccatgacactagtaggcaacaaatgggttcataaaattaaactcaatgcagatggatcacttgacaaatacaagtctcgtcttgttgcaaaagtttggtactctcaaactcctggaattgatttcaaagagacatttcgtccagtggtcaaaccagccacagttcaaattttgataactcttgcagcctcctttaattggccgatcaaacaacttgatgtttccaatgcctttctttatggcactcttgaagaaactgtgtatatgccgcagccaccgggttttgttgatcctgaaaaatccactcatgtttgcaagttgaacaaggcattgtatggtctcaagcaagctccaagagcctggaatcaaaagctcaaatctaccatttacagcaagggatttcaactgtcaaaattagttgaaaaacccactcatgtttgcaagttgaacaaggcagtgtatgttctttaaaggctctggacacagtctactagtgttgttagtgtatgtagatgacatactaataaccggtcccaaccccaatgctatatctgatgttataacagccctcaatcatgagtttgatataaaagatttgggttcattacactactttctcagggtagaagtacatagaactacatctggtatctatctctctcaatctaagtacattgcagattttaactaagctcaaaatggatggcaccaaaccatgtcccagccccacaagttcatctcatgttttgtctctcactaatggagaaccttttgatgatcatacgctctatcgaagcacattaggggccttacaataccttaccttaacccgacccgatgttgctttcattgtgaataaattgagtcaatttattcatgcccctacaactgtccactgggatgcttgcaagagattattgagatatctcaaaggtacaatacatgaaggcctcctcattcgaccagctccaagagtctgtttacaagcctactcagatgtcgatgacgagttgcccggatgatcgaagattaacaggaggctatgctatttttctaggtgggaacctcatctcttggtcagcaaagaagcaacaagtagttgctcgatctagcaccgaaagcaagtttcgtgccttagccaatactgcagctgagatcaagtggctacattctgttttgagtgaacttcaagtgcatcttcctactgccccaatcatatgggttgacaaccaaggggctgcctctcttgctgccaacccagtgtttcacgctagatcgaagcacatagagattgatctccactttgtgagagatcaaattctggccaaagaagttgaggttcggtatgtgccatcaattgaccaaacagctgatatcttaacaatagctctctccacggatcgctttctctatctcaaatccaagctcaaagtgtgctccactccctttcgcttgaggggggatgataaataacaaacttttccaatacttttctgttgttcagacttagtttgtttttttccacttgtactctgtcataacagagtttgttacgttctgttatcatcagcctctttccatgtaatctttccctatataaataaaaaggtttagctcataatgtcttagagcttttacaattctttgtatctaattctatattgttccagttaggaattgtattgatgaacatctcttttaataagaaaaaatataaaaataaaattaaaataattactgaagttaagaaaaaattaaaaaatgttaagacagatttttaaaataattttttttttaaatattaagatatacttataaatttatggaatataaatagaacttctgattagtattccctaatctattttaactgaaaaaattagtagtaggtcttaaaaaaaattgtttcgatcaatatattacttatatccgtttcgatatgtagaaatattttatgtttgatgttgtatatataaatgtgcttgtctatttttacaaatattagtctctcaatattgttttagcaataaaaacaaagggttgtgtctcctcatgtctatcgattacattatatataatgttataaaaaatacgcaaatctaaatgtttgaacctttgagtatcttccaaaagataatgttgacttatcagttgaataggttcaaaggataatgtatttcgaactaatcaaattaatctgaaaattgtattcacactactactacatataggaagtgagtgagtgatcgtgaatcaaagacaatcatttatacttttccatcaggtatatttttctttatacatatatatatatatatatttgagatacatatatataaattaaacactatacataaaatatatgaattattatatgtattgataattaattttataaatttggaactccatatatacactaacatatttttattttctcaactatatactttgcattctaacatacaaaaatccgtagaggctttgtgagagaatgttagagagtccacattcataatacataaaaactaaaatactatatatataatacatgaactactctttttattactaattagtttaaaaatggaactctatacgtacactcacctatttatattttctctaccatagactttccattttaataatatatatactttcttttaattgattttatcataacttaattagcagaatatattcattaaccatagtaatttataaaaaatccaataaagagttatctttatctagctgagtttttagagagtaaaatacctaatacaaaatgttgtacctttttacatatttttttgtattttacctttatacttttttttttttgctaaatatttaccttcatacttgattattttaattaatatacctaatatttttacaatatttcacttttacagacctttttgtcattataaatactaaatatatacaatgtctaaaaaaaagtaag

SEQ ID NO: 194229 - DNA, 4254 bp, Cannabis indica
tccttgccaagaaaaatcctcctcatgtggcccatgttatgtggtctctttctttttttttttttttttacttttcaactagtaaagtaaaggcccaacaaacatagccaattagtgaataaagtgtagaatatttgagtttaagtctattctactttacacaaaatattggtggtcattagtgagtccatccatgaacattaatgttctccattttgatacatgtgacaagtccaaaatgcgcatttaaacattctataaaatatacaacattgagactaacacttataaaatgagaaactaaataaaattgataaaatattacaaaattaattaccattaatctaaaaatactaaaattaatattttgtaaaactaaataaaactaagtaaaagtaattttaataagctaaaaatacttgagaacaaagctaatttaatgcacaaaagagctaaataactctattttcatagagttatcatcatcctcttccgcaaaggtaataggttgattcataagtcggggcctttgcgtcgggagttagtcaacttctcatatttcttcatcatgatctagagctttagcataacactttaactcattctgtgtagttcctccaatatgtggccctccaaaaataatggccaccctcccatttggtctaataggttgtctgggcactggatgatgtggagggaggactcctggaaggactggcttatccgagacttgggctggtactttgggaggcgctggtgctccaacttgtccattcatgtgtggtaacctatctttgatctattcgtacaagtgacctaactttattaggctctcaatttcatctttcgaattctagcactcattggtggtgtggtcaatatcagtatgatattcacatcttttgttaaggtctcttcgcgagctatcccgatataaaggaggcgatctccgatagtgggtgttttgccttgtggctaagtacatgcgttcgtgggtgtccactaaatcaatatactgggtatactgagaggtgtaacctttcttttgcctcttgttcgttgtccgcgtgcttccttttaaatatctcttgctttgggaggtctcaggagcatctactgcacttgccgcgggaggtgcgaattaagagggatattgcgaacttactccaggagtcaggttaccccctagtgctccaaaactggattgaactgggataagagcaaggttgtgggtgtaccccagtgttgctgagaatttcaaactaggcattccactggcatgtgatgcaactagaagggtaatttccaaaaactgcattccgggaacataccacggtctgccaaaaagggtaattcccggataataccctccaaaagcagttatttgcgcttcctctaggttgatgtattttttagcctttttcttaaaagtcttgaagactagcagctccttcctactagagctcattccaaaaaaaggttcccgttcaaattcccgcttgaagcaatgccaattgctgtccatcatccacccttttagtcttggaagcttcttccttaaatctttttataaaaatttttagagtttcaactggtagttacttgatgttggtcaaaatactgacttcaaggtttatttttttggccgccacgaactgcctttgaaagctaacttgcaacttgttccaacagtccacaaacccaggttctagcttcttaaaccactcctcaacggaccctcctaatgttagcgggaaacacaaacacttcgtgtcattgctgactctcatgactatcatcacgcggttaaaccgggataagtggttaatagggtctgagtctcctacatacaaagtcatttcaggcattttaaaattctttaggagcttcgcttcaaagatgtttctagcgcagggttctcggtcctcacaatcagattctgaatcatctcccctttgtcttcgggagactttagaaatatctttatgaaggatagcgagttcgaccaagattccctcgttcaaggcacttttcgagactattattgcttgttttttttgctccaagcgagcctaagatcaccatgtttggcgttgagtttttgtctcgaatcaacatgagggtctttgcggtttttcccccttctctcccccgactcttggtgcatggatacgctttttcggtatccccggtcttgagggatcattttcctttgggaacctgcccctctgtggaccttttcccttagggagatcagagtaaactttccgcgaatcctgagcctttttgttcttttcaggaatggttgtggggtccacttttggggaagccttctgaagggtaccaaatagggcttggctctcaactttgtgtgccttggattatttggtggtggagactcctctcttgttttttctgacccaatgggtccagcatttggatgcctgctatttccatagctttttgcatggtgaccattatatcttgtatcctcatattctactccttttgctctgccaactcggcttcatggttaatggctttctgtcttaacgccatgagttcgatgcaactaccatcatcatacacgttgtactcctcttagttttggtcgtattccatatcattagttttgtcttgttcttttgcttctgtgtctacttgcgaagccatttcttctttgtctggccccttagggccttgagatggacatggttgacgcgcaaagtttctagtttccaccattgtaatgagaatttacttttgatattcttcttacgtaaggtcttctacaactctcaatgaaagcaccaaaatgttgatcgagaattttgaaaactaattaatgaaagttattttaatgattagaagagattagatgcaaatttttttacatggttggggtataaatgagccttagtccacaagtcactggtatttaatgtagtagtttttcttacaaggatgtgttacaccatttttctaacccctttctcagaatatggttggggtatttatagcttcatatagaaagtcaaaagatctctattgtcgcaagtgtttgaagcatggattgcacaagtttctaggttcgaataatagagtatatatgtctgcacagtaggttacataggttttagctaggtgtcaggtaagataaacccttaaccttccttgattgatgtgataattcattatgcagctgtcataaatctcatagattagagtgtaatcgctaaaggttgggtttaattaatgcctctgacacgtcttttcagatccattcgcaaacgcttcctctataccgcatttaatgcactcatataagtcatgtccgagacttaatgaccgaccatggaggccttgcatagctcgtgaagatgaacaaaataccttggcatcaggatgcagttgaagctctctaagggacctcccagagatgaccatccaatctagataagttatcttaatatttatcttaagtgcttcctaaattgcttatgtgtacactcttgtacacatgtcacatttatattggtatacctaatatgattatttcaaaattataaaaaatattttccaattaataaaaattaaaaataattatttttcttttattctttgttttttttttctatttcatcaactttttttttcagtttctatattacttaattcttcatcttcttcacactactccaccaccaatcactattgaaaccaccatccaccacccatctcaatcatatacagcaagaaaaaaaagttaaacaaaatttgaatttttcacaaaaatcaaacccaaatatcacaaatctgaaacacaaatatcaacatccacaaatttaagctccccctttttagatttgagtttttcatgcaccatcatgtttgtatcaaaacgataagaggagttggctccatcaaccattaaaatcgacgagcaaggtcacccaccgagctgcacttagagcccaccaaccagagattccagatctgtaactcgacccacaccatcgagcacaaatacttcccctcatggatcagacacacactagcaaccaccgtgtattcaacggacaacaaagatctcaaatctgagatctccataaccctaaatacaaagaccgtttgagggagaccatctatgagttgcacatttcgacagactcaaatgcacggccaaacttcgatgacgaccatggatgccagacgcacggccaaatgctgaacgcgattcctagtcgtacagct

SEQ ID NO: 194230 - DNA, 1819 bp, Cannabis indica
atcatatatttagattaattattatacaaatataagtgatgatatgtaaatatgtaaatatatataaatatatattatatttggaggtatagtatagttggaaacttttaatgtttggcacctcatctaaattatttaaagttgtttaccttatatatattcttttactttgtcttcgcacattccacctgctacccactaccatattcactacttaactatatttatatatatatatatataaatattcatgagcatgcacaaatttaattattttttttttaaaaaatattctatatatataaggtagtcgaagattatatatatataaaaccaagtcgcctttgttctatacaaaaaaaaaaagaaaaaaagtaacgcttaagcttgacgtttatatagtgcatttacatatacatctaatattaattttctatatatacaaaattatatatattagtgtttatatgccaatgtttatcaaaataaataatatatatcatatatatatgtaaatatttatgacaatgccagataatatatatgctagcacagcatgtatatatctatattactatccaatcaacaagtatatcattatataggaataggaccttatctctgttatataattatgcaatatatacatgtatatatataagcatactactatataagtaataagtagcaatatatatcatcatatggactacatattaaggatcaagtatgaaattaatgtacacaaatatgtatgactatataatatacactatatatgatcatgatcttatgtatatcgaaatatctgcagtaaatattaactatatgttatatatatacatgtatatatgccataaactaaatatatagagaaaatagtgaattaattaaaaggaaatgaacaggatatttataaagaagaaaagaaagaaagatttggaaaagatatctctttttgtaaagatgaaaaataaaaataaagagtgacaaaaatagaatcaacttcatcacaagggaatataatttaagatcaaatctaattctttctctccacaattaacacatattcatatccatacatatatgtcttccactacaagtttatgtgtgtatatatatatatcatatattcatcagtgtaggtataataaacatctaataaattaaaattattattaaagaatatttggtaaagctgatgatcagagaaatgcagatttacagcttttgcacatggtttcccactatatatatacatgcttaattataataaatatttaattaattggaagaagagaagataatatatatatgaattagtagaaaacaaaaaacaaatccctatcataattaaaataatatatctaattgtttttacagttatagttttaccatattgaagatcgaattaatatatagccctagctatatatacctatatatatatttataacatgagaagaaagtactatagaatatatatatttataggtatatatataccagtactgcaaaaaaacagcaatatatttgccctatatatatggtgaagatcatgatcatcatatatatatgattacagaaatatcttcagtgatatatatatagatagaaatagaatataatccttcacaaaagggctaatataacctattagctagagctatttatatataaatatatatataagggttttgttttgttaatttcttcctaaataacaatagtagctatatggatcagttatataaataaagaaataaaattaataaattttcatatatatataatcatcaacatcgatctaagtatctca

SEQ ID NO: 194231 - DNA, 751 bp, Cannabis indica
atattacaaaccgtttcaaccttcaactaaagattttattcattttatttatttattttaaatatatataatttccaactttacagagagaagagagagagagctctggtctggacccaaattcctctctttcaatcatcgatcgatcgatcgatcgatcctcatcttctccccaattccatcccccaaatctcaacacgaagttcagaaacttcatgcaaatggctccgattccctctgagaacggcgtagagggagatgatgagagagacgaagaagaagaggacgaagaagaagaagaagtggaagttgaagaggacgaagacgaagaagaagaagaagagcctaagcttaagtatcagagacttggaggtagcattccttctttgctagctaccgatgctgcttcatgcgtcgctgtcgctgagagaatgatcgctctcggaactcaaggcggcaccgttcatatcctcgattttctcggtaaccaggtcggtcaatcttttgattgtctattataggatttagttaatgtgaaatgtgtgttgtggtttgattttcgtgaattttcgagcttgtttgggattattggagtttgtctatttgtgatcgtttaggtaaagtgttaatgcttattgatttcgattgttagtcattgaaatgtatgaatgttttcggtttggtaaaatttcgagcttgttggatcgaattgagttcccgtggcttttaagctttggagattgagtgatag

SEQ ID NO: 194232 - DNA, 1336 bp, Cannabis indica
tagaattttagtaattgaataaaacttttactttcatttatttagaagtactctaatatagacttaaataaaagtacattttgtctctaatattaaatattacgttcactattataaccgttagattcataataattaaattaattagatggttattaataaacatgcgtaccaaatcaaacttaatttaaacttaatctaactacataaactaacttgtgcaacttaacaaaaagagatagattgggtttgtcatacaattttttaaggaaatttacaaaaaaaattgaaatttaggtttatttttataaaaatactgtcacggaaatgttttcaaactgtatttttataaaacaacaatagaatacaaaactgaacaattaaaatcaatggtggaacaactaaaaaacaaccgtagaacaacagtgaaaatttaacaaagtacacgatatttttgaaaaaaaattctgacatacgatataaaaataaaaaaattagaaatttaagtatgtactatgtagtgtaattatttcattttttattctatatttatattattagctggtggtacttcttgtctggctatatagatccaatatttgtcaatgtctacaaacactttttttttcttttgcttatatttatttattaattattaaatgaattgagtggttctagttaatcctactagaaaattattctagtatgttgtagaattggacaaaacactttacactttcgtgatttcctaaacctaaatcacagatccattagagcaaattattagaaattcttaggaacttttgtatgattcgatactacaataaggtataaattatacatagttagaaatttagaatattagttgagacgtgacatgatttttaaatcaacttttttatatatataaaacataataatattagtaatgaatcaaaataaaacaagatgacaaattgagttaaaagaacaagatgaaattaaaaaatgaaggaaagataggtatgtaaattcggccacaaacttcgaaattcaatcttttcttatgatttatttcaaataacttgttttcaccttcatatttgactttatatgatatcaatactgaaaaatatgaagatatccttatttgacttaacattatatgattatttagaaagcttaatatgagatctacaataatatggttgaatttgcataacttttttcatttttttttatggaatgtggctctaaaggaacacattacttaggttgtatttgttcaaggccgatcctgagaataattaagttctaagtagcaataaaattattaggttattttcaaaaaaaaaaa

SEQ ID NO: 194233 - DNA, 973 bp, Cannabis indica
atttagacagcaattatgctcgctactcttgcaaccaaacatatagatcagagggcaacaatcaaattcaccaatatggatgcacttacctcggaaaattgtagcaaatgcaggcccaattcacgctcaccagcatgatccaaaacaatcaccccagcctgttaaaaacaagtagttaaaagtactaatataataaaacctttttccacaaagaatcattcggtacagttacaagaatttgtcctagtgtcaagtgacttcaattaatatttattcacgaaaaataatgcagacgaagaaagattgtaaaatataaggtttagtaattacaattaccagatcctagcatgagcatagagcaagtagacagcagtattgccctgctcagacatttttaggaagacaaagaaaaaatgtcatcagcaactagtgttgctgcattgtgcttcagaaaacaaaaaaagtaactatcaagtggaaaacatatatgtccattttcactaatgattaacaaatttatttagtattctttcttcaattaaatattgacaaaagaaaactacaacagaagtcaccacaccttatcacttaacatctgatcaaaatcaaatgtataattggttagcctgttattcttcaggtcagcgtacctgccaagtacagccacattaaatgagaagagtttatgaccaaacattttgaataataatagaattaatcttgagactgtaacagctttagataaaaatcacagcacactaactgttaaatcatttcataaacaagaagttcattccagtactgatcacttacttaactgcaccataaccaacagcctcagcggtttgctcaagctcctgttcagtccactctttggccttgcctgattaatattagtttgacagtaagtaggattaatcaatgagagacagaaaagacatgagacacattctaatcatgaacataaataaat

SEQ ID NO: 194234 - DNA, 2499 bp, Cannabis indica
cgggagacagatcatgggctgatcgtccaaaaacaattaactcagaccaagacagttaaggaaacggttaatttcgaaataagaggagcacagggaaaagtagtggatagacttcaaatgggctttatggaagatgggcctgggagtaatttgggcccacatgtgaataaaaaaggtgagtgtattttgactgcacctaatatgcatggacgtattgaagacaaaactattatgtcgaagcccattttgcaactggatactgatgacccatttgggcgtgagtggtcaagagggggtcctcgtataggggtctgtgggattgagaatgatgatgagggtgaaggagattctaaaaaacagaagggtgggtctgggcaaattattgaagatagagcatgagaaggaaaagatggggaaattgggcatagggataaagggaaaaatattgttgatacgattcccttctcatattcgattggtaatctaggggtagaaagggtgggtttcaagggaagagagaatgacaaggttcgatcaaatcatggccaaagaaagaaactctctatcaaaaatagatcacaccaggttcatggacagacttcggtggaaaaagctccccaaccaggaacgaatgtggagatggagagtatggctaggggagggggtgacacttttatatttggaacgtctacaggggcgaatgggactgagttgactgcagctagattaaacaatgaggtgagtatttctcaaaacatggatttctcacttcaggacactaaatttgaagcggcgagccttgctctgcaagaccgccaagcacaatgataatgctaagttggaatgtccaagaaattgagaacccttgaacattacgtgctcttcaatcccatatttgagaatttaacccgagtattatctttttagcagaaagtaaattaactagagtgcaagcgaaaagattgtgtttggttcttcaatttggtgcgaatttttgagttgtggacagggtgggtcttagtggtgggttgcttttgatgtggaaagaggagttaaaggtttgtgtttcttccagctcctcgggacatatcgtggctgaagtggcaggatatgattttctaccttagacattgacttgtttgtataggcatccagatgctacacagaggaagttctcgtggcaattgttaaggaatataaaaggtgaggtgcatgggtcgtggctatgtattggtgattttaatgagattgttagtttagcggagaagacaggagcgaggacgagaggtactggcgctatggaggactttaaagaggtaattgatgcttattgtttgattgattttagttctgtgagattggatttcacttggtgcaatgagcatggatcaaatcaaatcatggaaagtttagataggggtctttgtaatgaaaaatggatgtgatgttttgaaggagcttacattcgtgttctcagttggtgggaatcagatcataggcctcttcttgttgatatgccaatggatgcaaattgggaacattgtgaataggttagaaagaaaactagatttttgaggaagcttggtgtgaggatgaagagtgtaaagacatagtggaaaattgctggaatgaagatcgggggtctggttctacaagagggtttaggaggaaaattgttaaagtgagtagagcgttacgggaatggaacaaaaaaaaagaaaaagacactgaatggaaagattgctacattgaaaaaatctttggctgagttatcatctagacaggagcttggtacatgggctgagatgaaaaatgtagaaaaacaattgaatagagttcttgaaatagatgaaatgtattggcgacaaagaagccgtgtgttatggttaaaatggggagatactaacactaagtattttctccacaaggcttcgtcgagacgaaagaaaaatgcaattaaagggttattcaataatgtgggggtatggcaagatgacaatcaaattgttttaaagttgattgagttaaagttgattgatgggtacttctctaaccttttccaagcttctactatcagtgatgagattatgtaggaagttttacgggttgtccatccaagggtgactagagaaatgaatgatatgatgctggaagattttacggaagatgatattgtaaaggttgttaaagaaatcaatcctactaaagctcctggtgaggacgatctttcgacactttttttatcaaaatttttgaacaattcgaaggaggaggtggtgactgtgttccttaggagtcttaatgaaggggctgacatcagttgtttaaacgatactttcatcgcgctcattccaaaaataagaagcccacaccggtggaggatttcaggcccataagcttgtgtaatgtcatatataagattgtcttgaagtggtttgctaatcgattacgaacaacattgggtatggtaatttcagacacccagagtgcttttgtcaa

SEQ ID NO: 194235 - DNA, 857 bp, Cannabis indica
aaaaaacactatcaataatggcattgagcaacaacgtgataggagccataaacttcgtggcggtgctcctatcgatcccggtcataggagccgggatctggctggcctcagagccggacaactcttgtatcaagatcctccaatggcccgtgattatactcggaatcttgatattagtggtcgctttagccgggtttgtgggagcattttggagaattccatggttgcttataggataccttgtagccatgcttggactcataatcttgttgggttgtttggttgtgtttgtttacatggttactgcgcgtggctcgggccacattgagccgagccgagcttacttggagtatcggcttgacgatttttcgggttggcttcggcgtagggttcatagctcttacaagtgggatcgtattaggaattgtcttagctcaactaatatgtgtgctgagttgaaccagagttatcgtatggctcaggatttctttaatgcaaggcttaatcctatacaggtaaatattaattatatataatgttttttttttaaaaaaaaaatctattattcttgctatatttgtaattgattaattttgtagggtaataataatattttttttatttagtttttagggtttttagtaattaaatatattaagtatatgatatgttgagataattctgaagtggtagataaatatgtttattattttcaaatacttttttttttattaataattatatacatttattgaaaaagaagatatagtgaaggtaggtagatgtgacatgtatccttaattagtagatataaataaccaacatcaatcaaggtttttcaaaaagaagaaaaaaaa

SEQ ID NO: 194236 - DNA, 672 bp, Cannabis indica
tagtaattatattggcacatgtcccaatactatatgttagagtggggaattggtcacactctctagaacaaagatcttactttttttttttttttctgaaggaatgtaaggtaaactcattttcttcaaataagttataaaagaaatgtactattttgaaaatgatagtgagaaataacaatgcttaaaattgaagaaatgattaattgacattatcctgttaacttgatcagttcaaattttctagttagttatgattgtattgtattgtacatacataaattaataatttgtggcttacttttggttcaaggtaaggtgactaataagctcatcatacactgaaagtacactttacaacttcttcctatcatgtgtacgtctcaattagttgaagttaggttatatatttggtactatcaatggatattgtgactatctctctctatataaatatatttgatttggtggaagaaacaagagtttaataatagatgcttaacattattgaatcagtctatatttaattacaggaacttttcctaattcttaaaaatagatgtattggtgtatttctttccattttaattctgagacattatataaatttatttgttttatctataggtcacaatgttcatactaattatttaggagatcctacaaattttt

SEQ ID NO: 194237 - DNA, 900 bp, Cannabis indica
tatatatatatagatcattgtacttaacttctatgtattgtattttatcaatggtcatgtgaatagttggtacttggtagagtcagtgttcacagattcaattcatacacagaaatataattataacaatatggtgacaaagaactcaaccccgtgaaacaaaagtacaaaaaataaaaataaaaaacagagccaattagataatttaataaactccacgtgtcaacaccagacacgagtggaaatggtaaaagattgctaattctcctctgttcttgaatatatatatttatatatatacacctatatatgttcgacctttgaaatgtgaacagagaagaaagcaaaacccactaaggagtatggtggaattggaggtgaagaagaagaagaataacagctgcaacaatggtggaacagtgaaagggatagtgacggtgaatccgaagcccaacaaaggtttgacatcaaaactcatcgactggtttgaaaatgtgattattaagcttatgtatgactcttcacaacatcaacattatctctccggtaacttcacttcggttcctgaaacacctcccataaaggacctcccagtaatgggttaccttcctgttagtatttcttgccctttatgaacttcgagttattatattttttaaataaagattgaaactttggatgaaaatcagatctttacgacttgggtttgtgttgaaattgttaattgttttcatatgagaccttttattgatctgggcttcatttttgtactgcatgcagttagtttttgaatattctttgttcatgtttttaggaatgtttaaatggagagtttgttcgtgtgggttcaaattccaagtttgctccagtagctggatatcattggtactatatttaatt

SEQ ID NO: 194238 - DNA, 2194 bp, Cannabis indica
ctctcttcaaacttcttttcaccgggttacttttacctaaaggtatttggtgagctcaaacatcttgacacattgaatctctcttcaaactctttcattgggcttgttactgaagttcattttaaaaagctttccaaattgaaaagacttgatttatctgataactccttaacattgagcttcaattccacttgggttccaccatttcaactagagtatgtatcattgaggtcttgcaagttaggtccaaaatttcctacttggctcaaaaaccaaaaaaatatctctcgacttgatatttcaaatgctgaaattcacgatgaaattcctactaattggcttagtcctttgaaatttctagatctatcttcgaatcaatttcatggtcctattccaccttatctatcgaatgtgagcatattgatgctatcaaataatagatttactgatctaaagagttttctttgttacccattacaaggatcaataaaagttcttgacatttcaaataatatgtttagtgaaagccttcctaattgtcattggaatatcaaagaattgatcggtctaaaattagataataataatttgtctggaataattccaagatcaatcggtttgttgaatgaaattcaatatttgcttttagggcataataatttctcaggaaatcttccttcatccttaaagaactgtacacaacttcaaattcttgatatcgaatataataatttagaaggaaatataccatcttggattggggaaagactcaccaatttgatttttcttagaataagatcaaatcatttttatggaaatataccaccaagtatgtgtcatcttcaatttcttcaaatatttgatatttccataaataccataggaggacttattccttcatgcataaaaaatttcacatctatggtagatgaaaggaaacaaagtcatattgctatttcgacaataattcccctctacgagaatgtgattcaaatatgtgaaattgctatgtggttaatgtggaaaggtgtttatcgtgagtatagcaagactcttggattattaaaagtgattgatttctcaagtaacaatttgagtggaaaaattcctaaagagttgacaaatcttgttgaattagttcaacttaatctttcaaggaataatttgaactacacaatccctttggagattgggaacttgaataagttagactctttagacttatcccacaataagttttctggtgtaattccaacaagcttggcaagtgtatcttctttgtctttattggatttgtcgaataacaaattatcaggaagaatccccatcggtactcaactacaaagttttaatgcttcggtgtacattcataacgatggcttgtgtggacctccattgaccaattcatgttttggagatgagtcttcaaatggtcctcaagatcatttgggtggtggtgatggaggctatgctgaagatagtgaagattggattgacatgtcatggcttcacaagggaatatggattggatttgtaattggatttgttggagtttgtggtaatttattactaaatacttcttggagacataactatttcgatttcatgggaaatattggagattggatttatgtgagtatttttgtcaacataaatgtactgaagagaaggttcattaattagaaggtaattaatgaagtataacttttcatgtatatattttagttgcacatatatatatcttcatatttcttttcatttccttataattcatttgtttccttgttttgtttcttagaatattaatacaataattaaggtgtggagttcgttgcttccaagcttgaagagtttgcaatctggatgtagtactaaaggataataattattaattaacatcatctttcatttattatttgtgtttgtaacatttaaagggttcggtgtgtgattttgcttgtgaatttagctagtgttttaattgtaatttattctctactttataaaattacatgtataataatttccacaactgaaatatgcatgtttttaatattttgttgcattacgatatatgagatatgtactattttccctactattaattaatttgattgccattaacggtgaatgagagagatttcattaacggctagcaatagcagcgagcctcgcggctaataattattttttg

SEQ ID NO: 194239 - DNA, 1820 bp, Cannabis indica
cttttgtttttcctttttttttccttgtaattttcaaatgaagaaaagggcttttccgaaacagggatgagaatttatcctctgctggttgatgtatggcttgacgtatgtagctgctcaactacccttccgttgaagtttgaccgtgtataggaaccggtagtggattaccaaactgcccacaccgggacgcgtggcagcagatgaggatgtacaattaggattgtaattgttcagggtcgtatgggagacaaaggtgttatgcctgaagtggaccgaaccgaaccttctattaagcctataatctagtacatgcaagtgtagtggatcataacagtgacgctactaattaattttataataatgtatagctgataaattcagtgttttgtaatctatggtaggtttgataattaccctatatctatttaagtaagatttttgttgcctaaagtaataaaaatgtataatcatttttagttaatgagcaatgaagttgtcatgttcatagttcacctactatatataggaaccctactcaacccaactcattatatttggtcacaaactcatgatattgacaatctggagatattaattatttttattctgacaaataccagtatatgatgtgtcattttgataatgtttaattactggggaaatgacgccactgttttatatatataaatgtttgtatatttatacgatcacattcaccttgtaaataagaggaaaacccattaatgaaagtaaaagtaatagataatggattatggtatggagcttaattatttattcttttttttttaaaacaaaaaaaaaaagaaaaaaagaaaaaaaagaagtaaacgataatggagtagttcaagaatggccaatagaaaaaatagagatatatataatttatatgattttacatcacataatgcagtgaacaagagctgcttaatttatatatgattttaattaattacattatttttatgcagaattatgtacaatttcgttattatatatttgtatgctattaaatttaagtgtacgtatattctgcaaaaaaaaatgtacgtacatattcactttgaaaaaaaaaaataagagaactatgtgtacataaaattacaatatcaatctttttattacaaaaaaaaaaaaaaaaaaaactaaacaacatcaatctttaaattacattgtaagacgaaaaccaaaagtagtaattacttaaaagaatgtttaatctatagaatgaataatactaacgaccaattatgaacgaaaactgtcagaaaattcgatttgcagcagttattctttgcaattgttaacataatgtctaagtctggcttcgtccgattctttcgtccggtaggatatcggtgggcgtccaccccatttattgtgcccggtgctggttctttcttcttctccaatctcatcgtttactctaggctcttctatgcattttttacaggtctgggaaatggccttctctagctctgcaatctccgcgctaaggggtatcaaaactattctatcctagatcatctcaacgcgattgcattcatgaagatggtgttggtacaagaactatggcattattataatcaacacattgtttggtgttcactaggtgttcgaccaaatgccctatgaaatatatgactcaatttactctctggattcaaccacatttaccactaataaaatggtgcacaccctcaggtcgacttaaacttactactaattaataggaattttctctttcaatagttggtgttcggcgataagatgaactttgcacggaatgtacttccaga

SEQ ID NO: 194240 - DNA, 1661 bp, Cannabis indica
catactccaacctgacttaaattttatcttgtgtacttcttcgtcaattcgtacgaatttctactgttatcaatatttatcacaattaacattactacacaaatactaaggttaatttcctataatatgtctttatctatatttacatattattctacttactaatttttcatacctaaatatatatatggatcattacaaaatagttatacaataatttcttttaaaataaaaataattttataactactatttttatttttaaaaaataaaattttaaaaaacaaaaatttatttttacttttgtgattataaaaaaagcgtcgagacacaatgtcgctttttttatttgtcttgattatggattacttaacgaggatgctgctccaagcctcccactccaaaggtttcggattccacccaatgtgtaagtctataaaacttattaagttatgtgatctagttatcttttacaagggaaatgcaaattcttttcaccttattcaaaacacctttaagaggttttgtgactccacgggtctcacagcaaacaaaaaatataacattcacttcggtgggattaataagataatcaaagagcagcttcttaacatagttcaaatggaagaaggttctttccctttgaagtacctcggggtgcacttgagaccaaccaaatggcaagcctctaattctggagttatcctaaacaaagtttacaagaacctttacaattgggcaactcgaaatttgtcttttgcaagaagaactactcttatcaacactatacttttggggataagaaacttttggatgggaatatttatcttacctcaaaaggcggtggctgcaatagacaaatgttgcaaagattttctttgagattcgaatggaaactggagtaaggttcatcttgcttcgtgggaaaaagtttgtcttcctaagaagtatggggggattaaattttgagaaggcaagaaataaaacatctatcattgctaagtttctttgggacatttcgaacaagcaggacaacttgtgggtgagatggattaatttcatttatctcaaaaaccaagatatatggttgcttcttgtgaaaagcgactacatctggtactttaagaaattgctgaagataagagattccacagacaaagttgccttagattttgctgggataaatggaaagtttaacgttataaagttttatattttccagttgctaaggttgattatgttatagcaatttgacataaactaagtattcccaaatacaagtacattgcttggcaattaatcaacaaccaccttcttacttgggtgaacttaaacaaattcttgaagctttctaactgtctttgtccagtatgtgagcttgaggaagagaccccccaacatctcttctttgattaagaaaattaaagttgttataaactcttggcagggagtttgtgtgtggctgatcagctatgagttctggagataacaaggcacaacttcttcctccttggttgttgctatcaacaatgcaatttgttatgagatttggtgcaaccgaaatttgtgtgtctttaacagggtcgacccaagctttgggcagcttgggccattgcataaggccccccatttgtaaaggcccatttgtttataggaagagt

SEQ ID NO: 194241 - DNA, 1681 bp, Cannabis indica
tatggcgttggtgggggcaattaaggcatacgtataataacacagatctggcatcatctcacacttgttagtttaaattttttgaacgaatcaggaatcacacacacacacacaaattgtaatttgaattaattatatataagctataaatatgtaaaattctgtgccaaataccaacctattgttgaccaaatggggctgatttgcgtgtaatagaaatagagagggtaagttatgatgcatgtaccagtactgtacaaccaaacacacccaaacctaaaaactgcaataagaatatttatatttaaaattataataatatatagtagtctaaattaagtatgtgtattattagtggtcccctggagcttaggctatatggatgtaaaactgagatgaggattggggcgtgacgtaagtcgtaaggtgttcatgatggcccagcccagccctaactaaacactagtacaatattcatacttaaaatcacatgcacatgtattctaactactctgcctttcttcatccatatgcattccaaacaaacttttctcactaaaaccctcatatatataacgaaacagaagcagattttacaatgtaattaagtaattttattcactctttctcatcgttatttatatttagttatttatttagtttagcctaataaaacttttaaaaactactgccaaatactagtactatattgcaaatgcttagtggtaaagtagtggtataatgctataatttatcacttttcaataaattagctctccaataattaatgcactaaatattgtgccgagaatttgttactacaagttgtactatattttacataaaatatagcattttgcatatttgactcaaatgttacttttttatgtagcaaaaaaaaaatataaatgctgcttttttaattacaatttttttgataattataagttttaatatacacatttctatatacaatattgtcaatatatataattagtttttaggtatttaatttatcagtgaattgtttttatattattagtgtgtgcattggaataaaattataaatgtttacatttatatatatacaattacatttacatttaacattttggattggtgataattgtggatgaaggaattgaaaatacacaaacaagtacaaatgagtaaaattagcatatggtatttgtggttaaattacaatggtcataaaattgttaatgtacacattatataataattaggaaaaaacacagcatgggaaacttcaaacagttacactatatattaaatcctgatcaaagtcataaagtttaatggtgtctaacactactacaagttgttatatcactactataattaaatatcatgttaaacatatccctaactatttattagtactaagagcaatgttgctgtaatataatgatttagggaagtacgtacatgtcaggttatgatcaccttgattgtttgttagtaataatgagaacatgaaaattatgctaaagcttaattactattaattcaaagtttaataattgaacttattattattaaggagtaacaagtaccaagacaccttaattatttatcagcaaaattacactagctagggctaggcactactgctaatatatatagagcattgctactaagcactagtggtgcttagcac

SEQ ID NO: 194242 - DNA, 2610 bp, Cannabis indica
gcttgaacatggcaagaactgctcaattcatattccaacatggtgatggaattggcacatcgactggggccaccaaacatcgtttagcctcattgattgtcaaacctgtacacatcgatccatgttccaaaccaattaatggacttggagactcacatacaaccataaaaactaaaataaaaaaataaaagcaattattgaagtcattcgtgcatctctaatctaagggtaccaccactttctaacaatttttatatgatgcaaaaatataatattttagtttatttctgttcatatcattttttagtatttttcttttaaagtataataatagtaagcatttctcaaattttctaccacattctacgcattattatttaatatatttttttgatttaaggcatcaatattaatggaagaaattagttttaatttttatttctatttttatattctttaagatatacttatttttacgaatgatgtttccattaaattttttaaattaatgtaaattatatacttgatttaagtatggagtgaaaatatatcgaactatccactcaaaaaaattatattttaataaaatataatataaaaatatttttaattaataatagaaaagatatatgttaaactcacccatattaatttttggtttggcgtactacaaatctctccaatgctaagttccttccaaacatgtttttccacgtcactagcattctctcaatgcatcacaattatcatgtggtctcaatagttcagtggccaatgcaaataattttgtcagagatatttttagcaaggatcccccatgagtgatactccaataattttatgtacacttttggtaattaaaaatgttaagaggctgtttgctattttgattttactttacgaaataagtttgagattttttgaaaagtgaaaaaagaaattttgaaattaggaaaacaacattatagtatttggttgtgtacatgaatattattcatgagaatattaacatcactttgtttgattgacataagaatgaaaagtgatttttttcttttgtaaaatacaaatatttaattttttttttacttagtgcaatacttttcatttattattctttcatataattttataaaaaaaatagcaataataaataattataaagactaaaaaatacatatacttatcacaacaattaatagcataattaatttaattaattgaataattaatttgttaataatttttttcaaaaaaataataatttaaaacaacaataaaactctttataacataatagatattgcatattcaaaaaatttggttaaaatcacattcaaaaaaaaaaatatatattggttaaaattttcagtcattccaaagaaaaaacaaaacaaatgagataataacactatttcccaaagataacatataatcttgtcaaaaatttgcttattatttagtttataatccaaaagatggcatcttgccaaaagtttcatccaaaatatcatccaaaaattgaaattaatcgaccaaaaatttcatctgaaagtaaaatacatacatttcatagagtcaccccaatagtattttctaaaatgtcatcaactattaaatcccaccttacttaaatagaccaagaatgaatcccaacttgtattcatcatccaaagtaaataaaagatttgtataagcttgattttagacaagaagttttccagctttaattcgttgttcaattgtcagtccatcaattctttttagttcatcgaatactttcagtcttctacttagaccttttgactcaaactggaaacaattagcaattcctctaatactatcaccaggagcagcttgtatgttaccaaatttgttcactatggtagttaatacctcaaccaatgaatcttcattcctagacctctttctacttctctttcttgattgtgctgaaattattcctatacttgtgtgactatcggttgcattaccaacaagatcatctattggggcaaatagattgaactcagattgctggtcattatgtgcttctctatcaatctcatccattgttttagaaaattttatagcaccttgcttgcacgacccttcccaaatatagtaacaaagttatcatattgagataatttataattccttaagccccttgcatttggatgactttgtaatgaataaaattaagatatgatcaaattgtaaattaaattgaacaacaatgtaacacttacttaatccaatcatcaaaggcactcttttcagtaatcacacactttagctcctcacttcaaccaaaattacttgcttgtcctaacatgtttggaattgcactgaattgtttctttagtatttgaatacgagactcaatgtggggctatcatttcaatccacaatgaggaattttttcattcatccatatttctaattgttgtagatagccaagtttgaaagtctcattgtctgctttccatctttcactatttaccaactccaacaaacactcaatcaattttgaatcctcaattgaagtccattggtgctttttcctagaatcaatgttgcttgttccaaagcatccattttcttaag

SEQ ID NO: 194243 - DNA, 3624 bp, Cannabis indica
ggagtgctctttatctctatcttctttacacgtgagtaataaaggaataaaccatttatatcttaatattatgttcgtattaagattcatgtgctaaacaataaaaataagatctttttcaaaaaaaagaacaataaaaataagaagcattgcttgcacaacattgtatactcatcatttgttcatttaattgttttagttttttcttaataatgtagagaaaatccagagctttatgtagagcagttgcaagtcaaatacaaagaactatgtgagaaagttgagcagagaaagcgactcaagacaaatggaggacctacgaacggaaacaatatatctggaggcgttggtcgtggtgagaggttgagtgctactcagagagagaggatgcgtcttttaacaacagcagcctttgatcgtggtaaaggtgaagatacatttggcgccaaagatgaggactggcaactgtacaaactgatgagcaaagataacgatgacgaggatgaagggccaaacgaggatgaatccgagctagctcgtttatcttccaggcttcaggttagtttatctactttattggaacagtaactcatgacacacttgtatgttttattctcatcaataatttaagtaataatatactactgcggcaggaagtagacccaacttttgtcccaaagttagatgttggaacctcacaatctactgaagttccacggttgcgtcctctcactaaagaagattttcaaattgtttttggagttgaaaggttccgatgtcctgagatcttatttcgtcccaattggattgggattgatcaggcaggtctagacgagatggctggagtctctataaggaggttgccttcacaccaccaggagctagagtcgagactgaccagttcgatatttgtaactgggggaagttggtctttttcccggtataaatgagcgcttggaagctggaatacggatgatcaggccttgtggttctccgataaaggttaagcgttgatccaattcttgatgcatggaggggagcttctgcgtatgctgcttcatctcagttcttcacccaaacttttagtaagatggactattatgagaagggtgaagattggcttcgcgggtatgaattgcgatatacattatgatctgtagcttaattattttatttccttttttttgaaaaggctgtgtagcttaatttattaggtacatctttactgaagttttttaggattcttacatgacattgtagctgtgtatcatcatttgtatagactttagtgggtttggtcgttatccttcctattctgtattcctttaaaaatggtgctaggtctgcggccatatttgtttgattctattctaagctaaaaaggaaaagccctcaaggcaagatttatagtgttagtaacatcattattattattattattatatcaagaagaaagaaccttcattaatccaacaaattatacaccctcgaaagctctctaacaaggcaagagaactcaaaaaaaaactcaccaaaaaacaaactgctagttacgtatcaatctctttacagaaacatccactatagactttttcttattcaaaatcctgtataatctataactcacatcccttttaatatcatttacaactctattgactgttttagaatgaagctcaaaaatacatctattcctattgactcaaagatgataaaccactgctgccaatattaaaatacagcactttcggattaaactaggggctgggtactcagttgttccagctgctgaaactcaacgaccaaatggaaaaactagttcaactaaagatagaatccaccacattgtgagagaggcaccattcaaaaaagaggtgactatgactcttatcagagctgtcacaaactgggcaatttagagtgcttagatcaatgtgaaacctgcttaacagtttgccaaagtatgaaacgatgtttaggcacatttaaaccacaccaaacatctctattatagcacactggaggctgagtgatagaggaaaaatataattttgaagctttgaatttacttttactgcctgcaggttggatctcttcttgcgtgaatttttgtcgaaccttgcaaagcttttttcaataccaactcgtgtctggtttaactttgtaagaccagaagctatccccctttaaatagatctcattgatccatttaacccacaacaactctttgttctccaagatattctaaacaaacttggcaagcattacttgattccatttagaagcatccttgaaacaaatgcctccaaaagctttagggagacacacttgatcccaagaggtcaaatggattttgttacggttgccattcataccccacaagaacccttgacaaattttttcaatctcttctatgactttcggaggtagcagaaaaatactcatccaataattttgaagactaagaagtgaggagtgcattaattgaattttacctacaaaagacaagtgtttgtttgtccagaacacgagctttttcttcatctatttaaagataataccgtagtcatctagcttccatttcgtagatgaagagggacccctaaatatttaaggggagaggcaccttgggcaagcttgataatacaggcaaggtcctttttttcctcatgagcaactccaccaatataaatttgagacttttaaaggttgagtttgagccccgagaaattgctaaaatcatcaagagcctcctttataactttaacatagtttcaaatatttacaaggcggatgatacctaaagttcttatcttgggcagcctgttggagaatcctagaaagatattccatcacaaggataaaaattaatggagatatcgtaggcctttctctcctttgaagactccttgaattctgccattaattaagaggaaataagaagtattctcaatacaaaccattatccaacttatagattttgaaggaaagcagagagctttcaagagattttcaatgaacttctagttgacagtgtcataggcttttcgaagatcaatatttatcgagcatttaggagaaatgttcttcctactatagctactcaagatgtcttggagaataaggatattatggcctatggaacgaccttgaaaaaaagctcctttatgctattgtacaatttgagggaggaccttggcaagtcttaaacataaaagcttggagatgcacttgtacagagtattgtagcacgcaattggccgattaatagctgctgaagtaggacaatcaaccttaggtatcaaggtgatggctgtactacgaagctcctgggggatctgattagtgttaaaaaaactgaccaatggctgagcaaatttccttcccacctcaggtcagattttttgtaaaacccagacccaaagccgtctggacctagcaatttgttgctaggtacactgaataaagcttttttaatctccttttgtgcaaaaggcttcaagagagtaagttgtttgtcaagtgagagcactggacccatggctatgcagtttttttccacctttaaagaagggtattcgagttccacatgacactttgaaagtgaccaagaaaatgagcaac

SEQ ID NO: 194244 - DNA, 1256 bp, Cannabis indica
tgtgtaaattagtcttgatgggaactccctgaaagtggctgaattattattcaagaatggattcaaagcagcttatgcaatcaaggatggaattgcaggcaaaaagggctggatagtaagcttccttttcaaatttcttcctcagtttcactgttttgcactaacatagatttaaggccataaatatatttacctgtattcacacaatgctttttgaaagaatgaataagatttacactttgttgttattcaggaaatacaagaaacacttttgccaccttctactcatatttatcccaaaaagaggaagattaaacagtcagaagaagaacctttaaccaatggtgctgttggaaaaaatgaagatgaaaataaggttaccactaccacacctagctccacagctgagaatcaagtagctaagatcacagagtcaattttaacaaccaaaaatggtgccaaatcatcctcctctccttaccccaatgtatgttattctctctctctttctttctcaatctgtttgtatatatacatatttatctcatttgtaaatgattttttttgtcttgttgttttggaacagtatccagatttgaaacctccttcctctccaactccatcaaagccttcaaaatgaaatcttgaaagacctttcaattttgacaataccattcagtagtagtactagtagagtctgtgtaatatttgtcatcactgcagtgacactctcttgtaaattgctttatttatttatttaatcttaaaatatttcatcacgaaacgacatgtcgtttcaaccctttaacagaggactatactacatacaaatacacaaaacgacacgaaaatccagactcatataaaaagtaaagatttccttttttttttcctctcaaacaatcacaatcagaataatcacaattacgattatggatggagcaatctcgtggggtgaattctacacagctggtggtgcttttatggagagatggaatagattgaattcgagtttgccgccatggtcatgggtgtcttcttcttcttcttcttcgaaacaacacttgaatctgggtgttgctttgtctcaaactcatcatcaaaatcaagttagtcctgtccagaaactggatcagccatggagattggtcccttcccttggtttaaattgttttttcttttgtctcagatgaatggatacttagtccaagaaaagctatgccttcctgttcataactcaacaacacaaagagatg

SEQ ID NO: 194245 - DNA, 3328 bp, Cannabis indica
tacaacagagaaaagagagcctttagctgagagttgtcccctcctggtgagctcctggtctataacggttccctaagacgtccaaatgtaattttaaaaccccatcttcaatatattttaatgagttacccatataatcgtagatacagaagttggcaaattgttgtaacacacttttaagacaaataaatatataaattttttctctatagttgtagtagtgatttatattcttcaattcttcacttttttagttgttcttaatacattttcccatcataatgtatcgaattaccactgtcaatataaatcaattaatcccaacaattaattttaaaagagacatcagtaatttctaacaccgcttagaagtagtgttttgctattggttagtaatattttatgtaagaagtattacttttaggattcgatactttattatactaataacaataagacatattaaagaatgtcagacataatagtactttttaacatttctaaatataaaagcgtcagttcaccttataggaattcaattgggacaaaaaacattttcagtaacaataagtaaattgaatatgttcattgcttaaaaaaatataatgcttagtaaatttgtacaaaaaataaccactctaggaccaacatcataaatatataattatagaaaactttaacagtgcacccaaaataaagatgtaccatgcacctatcacttgtttttagtaggtagataattataattttgaatttcttttgtaataagtatatagtgtagttatttagaatattttacaaattattatataataattttgaataatttattatatcaaaaaaatattcaaacaatcttgttagttgtacaccaatacaaaacaagattatttgtaatcttatttttgatacaataaattatttaaaatattttataaaattgtaaaatattttaaacaactacaatatataaaaataccatgaatattaatattatctacttacagaaaacatgatatatagtgcataaaattaccctacaaatatatatttattgcacactgaaaatcttgttcaatcgaattgaatagtaatattttcatcttaattattatcttgtcatgggtggtaccatcattggagcagcagtcactccacgttgttgtctttccaaattggcttcccaacctaataattatagttatacaaaattaaccaaaatataattaaaaaaatgatatataagataattaattcctaattaaattaagtacccacaaatttataaaaagaccattcaaattagtacttcaattaattataactaagtcaatgcacaacagcacaagttttaaaaacacattaaataaataatgccaagtgcaggatttgataatgatgtatatatatttatatatataataatgtttaggtatgtgtgtgaacgtatattgtatataagcatctccaaattttcaatattatttttatatatatagtttgatactcctccccagatccttccccaagtcaatagtcaatatttttgtattttctatttgttttgggagtttaattttatctttgatccatggtataatgtatagttaataccaaaaaacaaaaataaagtaaagaaagatatcattagagatattattacagattaaattatatatttcggtgtagtactgaaaatttattaaaaaacaattaacttttattaataattttttagtaataacgtaatttttttttaactaaatgtgacttttagtaacaataaaaagttattcgtgattaaaacatagtatttagatacaagatgtcactataatttaattttaatcacaataaatattatgattaaaaacacatttagtcacaataaattataatttttgtcaccaatactttagtcataaacttttttattataaaaataataatttataattagtaacaactatattatttttagtcacaaactttttataatgagtatttgtccctataattaaaggttcaactcagattataggatgaaacctaatatatataattaatataattgtgaagtatatttgcatttcatattaacttacaattatacaagtttataacaatatatcaatcaggttagggatattttatacttatcttttattgaagagttgcaaattgttttaataaatgcatatattttactttaggggtaattacaaatatcactattttatacttaaaaatatttttttatatttttacggtattttataaaaattatacgaaaaataataaaaaattacataaaaataatataataacataacgtttaaaataacatcaaaataatattaaaaaacatacaaataataaaagtacaatataaaaatacattaaagaccgtattttctgtaaataaaaccgtaaaaatatttaaaatttcatacaaatatatttttataacatttttgtgtatttgtgaaagaatctctatattttatatttgttgtaattaataagaaaagagcatgaaacaggttgattaatataactaatttaatgaaacacaacatttgagagtaatacgtagaaagaattaataatatataattacctattccaagatcaaagccatggtacttgagctctctgtattcttggcaaagggcacaagtctcacaacagaagtggactaagcaatcaacacaaggtgcctcttctaacccatattgacctctcaatcttgatcgatagatacacgagtacaagcatgccagtccagtcatattaaccaacccataaatagccccacgacaaccacaagctatatatatatatatatatcaataccaccaaattaattatattactactcatataaatgcatattattaatttctaatttatttttggttattattaattgggcttacttgaagaacctttgtctacaatttcagcaatctgtccaaatgtgatgcatgggcaaaagcaagtcaccatacctaacatgacaaacattattaatcatacatatttacaaaaatcgacataaaaaactcacataacctaaatcgtaatcaaaattcatgtgaaccactgaagcaactaccgaaacaacacaaatcttaaatttgagtactaattaatttggtggtattgatatactagatacaataccccttaataatacatatttacacttctaaaatactttttttttttttttgttatttttattagaaatctacgtaaaaactcatataacaactaagcaatctaaatcacaaccaaaactcacatagcaactaatataaaaacc

SEQ ID NO: 194246 - DNA, 874 bp, Cannabis indica
aaaaaaaaacaaaatagagatgagagtttaagacatattaccctcaaaacaaaagtgttccaaattggtttgcaaacaacattagtaaggttaccaaaaggtggtggcagaaaattactcaaatcattattacaaagctctaattctccaccaccaccaccattgccgccaccataaccaacttcagctccaccatcagctgccaccaagctaagaaaaccgagtgcccataacaactgaataacaagcctagaagaaggagagaccggattttgaaacacccgaatcgccatattggaaggagaagtgagtgaaagagtagaaagaaaggaagtaatgggtgaaagtgtagaacaaggagaaagtggttgagaggctttagtcacttgtattgggtttgaaggctcattttctaattcttctagggtgttattggtggtggggttagggagttcctcctttggtttggtgcatggttacatatcatgattctcctcctcactaccaaaccataaatatatgtatatgatatatctctctcttaacagctcttcttctgactcataccaaacgacaagaatattgaaaacgacatcatatcaacagcaacaagcaattattaattattatttttcaagctatcatagcaaaaaacaattaagttttgtagttagaacaaagtaaaaaaaggtttggaggaataatcatattgatgtgaagttacttggttttgaagtaatattcatttaggtagagagatgcttctgatttgaacttcctaacttgctgtaaatggaggaaaaaatcgaaagacaaaagaaatcgatgttcttcattttcctacctttctttatagactaggtgattgttacgt

SEQ ID NO: 194247 - DNA, 2589 bp, Cannabis indica
ttttttaaaaaaaaatttttagaaatgttatgatacgtaattatcagtacaatttaatatttagttctatttattttattttaataaaaattgtataaaaaaaacgctaattaattataaagtatcacctaataataataatattaagcaccttaattttttataacaatgccgacctcttatgctgttaggagatgttttcttgcttcccttattgtgtagaagtcggatacttaatagccaagtgttataaattacaataaaatcttaagaatgtcttttgactggacaaataattatgaggtatttataaaaatattagattttaggtaaaaatttataattttattgtcatacggatttttttaaaaaaatactgtctttttataaaacaaccgtaaaataacaaaacagaacaattaaaacaataatggaacaactaaaaaataactgtagagcaaccatgaaaacttaacataatacatagtataaactttgcacaatatttttgaaaaaaattcttctccacaagaaaaaagtaaaaagttaaaaatttcagtatgtgatgtaaaaatctaaaatattatttttaattattgtattaaattataaatgtttattttagttattattattattattattattattattattattattttgtagaagtgatatagaccactttaagaattcacgatgtagacatcaacgatcgtcaaagtagtctgcatttttgttccacaagcttaaagttatttttgtcaatgttaaagtcatgacagatgaccgcgaggtcgattccagtcacttccttatgcgaccagacggatacatcttggtttcaccagagacaagccacgagaagtgttctcagggttggccccaggtttttgccgattttgatagtcttagtcgagtatgcttcgttgagagggacctcttctagttcttcggtcaaaccaactcctaagtcattatctccaaagcatgggtagatatcttccaagcccggggcgcacccttaggcagttgcgggtgcagtctccgtcttctccttagcgagatccaacgcctcaaaagtcttcttcttctcatcagctgcttttgtagtcaatgaggtcttttttgccacaactagcgaagtattataacactcacgagctgcacgctggttacccaacaagcgtccaatgcttgtcggcattgagaacttgatgaacaagtaaaaaatggatgagatggctcggaggtcataaagactaggcctccctgtcattgcattatacaaagattttgtatcgaccactatgaaagtgaccattatagtgttagtatgtggggattttcccacagtcagtggcaatttgatcttgccacacggagcaatgctcgcttcactaaaatcatacattagctgcttgcatggctccaagtccttcaaagacaaactcattcgttccagggtttattcgaacatgatgttgggtgactctccatcgtcaaccatcattcttgctaccatcatgttggcaatttgtatctccacgaccaaggggtcgttgtgagggtaccacacatgagtagtgtcagactctgcgaatgtgatatgatcacactcaaagcatttagtcttgggaggtctctcctcaacttccaacatgttgacacaaggctcatggcgcatcgaccgtgcgtacttctccaatgcttttctcaagtttccaattagatgtgggcctctaacaatcacatctaaccaacctgaaatggttgcaggttggagaggtgcgacatgctcttgagggttgttagtcgtacatacctaggggtgttcatcaaactacctgcaccgtaccatactgcataaaaaaatgcaatttgaaatcttttgtggtgcaactgcgatttacattttctccacatcgtagagtgtggtgcagtatgattttaaatttagtaattgcggttcaaatcgcaccgcactatacattgtaaagttaccaatttttacaatatgatttttattattttttcatataagaacaaatatatgtaatacatgtatatcttacattattttttagagacaatttaatataataacttgatgattaataaatatgttataatgttaaaattttattaagattttttttttgattgctaaaactttatagattgatttttaaatttttattataatgttcgataatgatgatagtgtaaattgctcaaactgcaccgcactatactgtattttcactgtgtggttttaagatctcgtagtgcagttgcgatttgagaaattacaaaaaccacatatggagtttggtttgaaaaaaaagtcacaacccgcaccattcgcaccgcatatgtattttagctttgttgtgggattgccaatttttttttatctatgatatttattgttcaattatttttttaataagacgatcaataaattgagaagcacattaagcactttcggtatcaaccttgctgtagtatttttgattttctaattgttaatcttcaatatcttttgtagttagagagttaatttattttaatgaaattatattttaa

SEQ ID NO: 194248 - DNA, 626 bp, Cannabis indica
aaaattttcaattattaatattaaaaaattgatagtgtatctttgttaatacatgggaaaatgtcaaaggcatgatctaataaaagacccaaatttctaataggtcataatactttttaaaaatacaggtaagtaagttggcctccaaaacaaagtaattgtatatcatataatataattttattttaataaatactttaagagaatgggcccaaaaagaaaacgaatcatcttgataacactaaacaaacactcatgtatataacttttagtaaattaacttttatagaatagcaatggacaaaacccaatcaattatttccacataatgttcattctctttatatcaaaatgtactgatatcatataacataagagaatggggaattaataaattaaaatttattatgacacgacacatcaatgaattaaccaagcacaaatacaggaaataaacaagacctaaaaacaagacaaaattgaatcatatttttcgtttcatttattaagtacttctttcttttaataaagataagaatggggttaggttttgattattgaataaaagaagtaaataacattaaacccatcatcatttaattaaagaataatttcataaatcatca

SEQ ID NO: 194249 - DNA, 1315 bp, Cannabis indica
tgatgtatgactatatatatatatatatatatatatatatatataaatactttctttggtcaaaacaatggtgtccgacaagttgctttggcatgctttgaaaggtaatattatatatagctctcattttttagacatatattccagatgctggtatgaaattcaccgacacgatcgacggctggtctcgaatttatattccaaaattctttctactaatataatttaaccatggccttaattttggatcagaaaaggtttaacgatttaaataatgtacatatctatataattaccccaacaatatatataataagaaaaggagatatgaagatctaatactaataattaatgatgagttcttatttttcattttgtaaacgttttattgacctcgtgctactttaattgttgatcatgaacactactactgcaacaaatattttaaaaaacatgtgtgcatttgtatatatatattattaggttagtttgtaataccgacaccaaaagtgtttatatggtattattacacttttaaaaaataactataattaaatcttaattttgaaaatattaactttcgaaattaatattgttttaattttcgaaatataaataactcaaacaaacaagaaaaaatatatgctattataagcttttttatcactgatcatatgattatctttcaaataggaattattatttagttatttaccgttaattaatcaccataaattaagcaaatgatgatcgagctggagaattaattaatagtaaattctgcaagagaagcaccagtgaaattaaaatttaagagaattattactttatatattattttttaattttttttttaaatttatgctttggggaatttctatagtttctatgatacatatataaattttggttacaatttaagttttaattcatcttatatttttttttagataaattcatctcatactttttaacagtcatatattgtgtttattatgggtcattattattttaatattttttaataattatcgttcattaatattaggaaaaatatgagtaacacattatctatccatattctttttataaagagttcaaaataatttgattattttgattaattaaaatattttaagcaggtgtgaatattgtttgaaaactactagtagactgtttacatgaaaatatttagctaaatcttttttttttttttgagaacttgaattcatattaattaaaaagaaaattatttcatatactatttttttaaatttacggtttgggtttttagagtggtttcttcggtagtttc

SEQ ID NO: 194250 - DNA, 915 bp, Cannabis indica
acaccatatttttgtttaaacttaattgatgaaaataaaatatgattaacctacagattttgacgggagttacgtgccaaatatctataatatatatatatatatatatatatatatatatttatataaagtttgctgcgtaaatcacaaggaggaaacaatttaaaagtttggtagctattaaataaattactatgttggtatttattatgttataaaagtctttaatcaaagaaagaagaaaagaaaaacctaaaatgatttatgtatgttggattctgaaaacacatgcaataaataagtcattttcatacacacgtacacatgtgttgtaaatgttagatttatacctattttctttgccttttgcccaaaattgtcaaacaattatcattttcatttgaaactaattaagaaaagttcaaaccaacaaaatatattaggttgaaagttgggtagttgtaatatggataaggtcaccaaacatcaacttctttttgaatattcaccaaataaaataaaataaataataataataatataaaataaaatacatacacacatcacatcatatgggcctttcaataataattgggcttttagagttcaactcaaaatctccaactcatagctatagggctgtgctattgtacagtcaaaaagtaacaaagcccaccaattaattaagatttattttttgactaaacatgttcaaacttcaactatttccttaaaaataaaataatataaagaattcaattactactcaaccttttttttaatggaattactactcaaccatttcatttatttatttatgctaaaattcaggccaaggggacacttgtacaactgtttgataaattatagtatgtatagtaaacccttcatttttggcccctacaattttatttt

SEQ ID NO: 194251 - DNA, 1618 bp, Cannabis indica
aatcaatttattccttttaaacaaatttgatttacttttcaagaatttgagggtgaaccaatttttttcttttagagatttaagccatatttattgtgtacccacctaagtaatgaaattctccttatcccatctccgcaacatcatttttgacctgaaggacaggagtataggcatattgtagaaactgtttttttttttggttggctgtgtttcaagaacaagaggtgtttgtgaaatctttccttagagcagttttcagagtctatgcttgattctgtacttagtttcagtctagcttttctcaatttgcccaagttgggaaaattgacatttttagtttacattgatatgggtgttcttaatcttatgtataagcacgtttctttcttctatattgcttggtgtttttcttattgttgtgtctcctgtttttagattctggttggcccatctgattgggaagaccattctctgggaaaggaaggagcagaaaggtacagggttcataatctcccaaaaaaattcaggtccaggagtatatgaacttggcattgctgtatctcgaactggtttcggccgtgaaataggcaagcttataccagaacggatagttgtcgtttaccttggacaagctgatagtgtgaggactcgacttcagcggtatggccggagtggtgctcatctgggcaatagctactcctctggtttctcaattgactctaaagaggctcttcagaagggacctggattgtttgaggagattctgttaagcggctatccaattgtctttagatgggcacctgtgagtatattccttaagctcataataagttttgaaaaagaaattatgtgaataaaagtctgggcaatacttataatcttattgatgtctctggtcttgcacttacagaattcaagctgactttccttctggttacaataaatatttattgttagtaatatgctctagttattctgcattgatagttgtggtacttctgggaaaacccttcttgggaaaccagtaattattcttttccacccaacgggcatgtactagtttttgagaggaggaatcattttggatatattgtagcagtagtgctcttgcaaatgtcatcattattgttgtcttaagttggttcaaagcaagtttattttcatttggactggggtcatctaacacatatgtgcaaagttcagaggcataaatagtagtacacaaagacatgtacttttataagtatatcctgacttctcttctttaattgtttcaaggaattgacattttaacatttctactaacttctcctacatttttatgcttcacactggctgcatgagatttgcaaaattgagcttataagtgggaaacttacaaatgcttcattttttttattctttaatggttgtgaaacagatgccgagcaaaagtgacgcaataagaatagaaactcaactgcttaacacatttgattatgcatggaacacaagcattaatggctcacggcgccccaatgatatccttcaaaagttaaagaaaatttcttcgtccaccacccacttttatgatagtgtacttaagcttgtacctttcagtcaaaagcaagtaggt

SEQ ID NO: 194252 - DNA, 1101 bp, Cannabis indica
ataaaatataagtcatttagaaacaacattgttatacttataagagtaatttgtggcatacatacctaagtttaactcccacttacaaataaatatctaagtttaacttttggcgacaataatacctaagttatatttttagaactctgtaggtacctaattgttaaatattaagtaaattgtccagtggaaatccctaattggtccaagtcatgaatttttaatttttttaaaaaaattaaatttatatgtaccaataagaaaatgacacgtggataatgatttgacatttaatgttcaggtacctactctcagaaatataacttaactattattaccgctaaaaattaaacttagatatttatttgcaactgaaaattaaatttaagcaaattactctacttataaatatacatacgacataagaaatcgtcgtgaaatgttttcatagaaacgacaattagtccgagtctccgttcacagggaatcaggactcatgacccgatggagctccgaatgacactaaatatagccgttataatgagagttttcaatcagtttaatccgacggtccaaaatcgctcaattcaaacttgaatcaatcaaaaccctacccttccattacaacgcttataacgtttacaatcactctctctcctctaactctctctctctcacacacacacacttgacgctctgagctcttagagatcttcaagtcttcgtgttcgtcctctatctctctcgttctccctcgttctctttctgaaattcgcaatcttgctctcattttgaaaccatggacggtccttctggtattagcttctacttctttcttcttcgatttgcgctgtgttcaaattttgcaacgtttctttattttgaacttttgattatcctatgcagatcaaacgttagaaatagtttcagacaactgcgaaagtgctttggatcaagattcccagccttcggtcgtctttgaacgaagttagatttcttctcttgtgtaaatctgacacattctgttttcgtctgtggaaaaatagaattaatgcacttttttttttttactttttaggtttttcgttatttaagttttcg

SEQ ID NO: 194253 - DNA, 2354 bp, Cannabis indica
taatacaaggcaaggtagccatgcacatgcattaatttaataaattaattatatacccggtcaacactctaaattttaattaccttgaaattaaatgattaatttgtgattgtgtgtatatataattaagccctaaacacttaagctcacaaggtgggaacacacgcacaccagagcaccgacttatacatataatcgatacaacttttttcttataaataattttttggtaattaagaatttcttatatttatttattaattactttctaaagaaaaaattgaaagcgtattaattatgctttccgtaatttggtcagtattacatacttttggtaattaattatatatatatatatataacaaataaattgatgaatagtaataaattaattaattaaagcaatgaataaataatgagtaattagttaatatatatataaaaattattatatcattgtgaatattgaagatgatgtagcaagaggagggaggtagtacgtacgtacctaataatatgatgatttaatattactaagatggatcaatggtgcggcggtcatccccggcggcagccctaggttgctgaaacggactcagttggccgattccgccggcggtggcggacacattcatggccagaagactgctggcgtcatagttgatcatctgctgggcggccgactggtggtggtggtggtgatctctagggaagaactggtggtggtagtggtcccgggctgcagccccggatatgagattgatgcctagattctgatggtggtggtggtggtggggctgtgcgcgtggtgtgcagcagcggctgcagccgcgatgaggccgtgtccggtgattccgaggttttggtacttggagagctctgatttggcgcaggtgagatccatttggagttgacggagctggtgttggaggagagagatgactccaacgcagccgtagacggggtctcggagcctcatgtcggcttcataagcaagtgaattgacggcatcctctctctggctggggaggagctcattgagaagcttagtgacgttgcttgcgccgaacactttgtgtacgtttgcgaatttctgaggttggtccggcggaaagtagggtgcgaacacgcactccggttggcattttcgcctcagaaacttacaggccgcgcaaggcgaatttgatgatgaagaagaagatgatgatgccatataatatatattattctgttaatttttgaatggattattcttcgatttctgctagctagctaggctctgcaagattaataagaagaaagaaaagagagaatttacatatatatataatataagaaattaaataattaataaaaagaaaagagtgtgactgattatgattgaatggagatccaaaattgaatgtacatttttgttatatggaaactgttttgatgatgatatatatatatctttgatgtgacacaaccatgaaaatcacgcacgcatccaccaatattaatatattcagtttattattaattaaaatacacacaaatatatatgcacaatttataccaaataattttggtttaaaagcgtcaactatatatatatataattcaccattatttcacaaatatatattatgcatagaagaagaagaagaaagaaatgagaatgagaattgatgatggaagattcggcccattttactatataaaaggataatgttgcaatcgaagaattaagtatataaataccaaataatggggttggcaacacagaataatttctcaaattatatactatccatatacaaattattaggagacagatctgggaggatttgaagatctttttgtttgtttctttctttcgcctgtttaaaagatctatatatatatatatgtggtaacacctatatatatacaatactactacaaaaggaaacaaatttaaattataagagtaggtatatagtagtatcacctcatcagagagatacttgaggagatgtataccttagaaattaatatgttaattggtagagatcatggaattaataaattaattaggtacgtaattaaatatcccgatcgatcgagaacaaggagagcaagagagaaaattaaggggggccggggtatatatatacctgtaaattgatatgtagtgattatatttgcctagatagctatataggtgtgtgtgtacgtagtggtagtagcagtagtagtactggttttgagttttgagttttgagttttaggaggcttggcctggtgtgtgtagtgtggtggtagagactagagttttggattggatctcgtagtaaaaagaaaaagaaaagaaaaaagagaacaagaagtat

SEQ ID NO: 194254 - DNA, 2287 bp, Cannabis indica
cttaccaaactgctgcttcacctcagggctgctaagatcgaaatttttcaatgaatccatcactcgattgtcccaatcgctgtttccactcatattagtgctggaaaacaacatcaagtgaaaaataacttaaacagcattcaccaataaggcataacaacctcagatatacaccataaaagaaagaaaaaagtttgatcatctctccacattagaatggcaaaaaaaagttgtttccttaaatcaattgcaagaataacaaagaaggagcttacagcatttcttcaagttgactgcgatattctggattttgtaacatccctgatagtcattacaacatgcaattcatagaattaagtaatagtcggtatatggttttcatagaattaatagtcagtatatatggtctcatagaattatcagtaatagcagggtttcaagaaaacaaatctaagcgaagagattgagaaaatctaagagggctttaggggtgcggcttccaggaagaaaaatagaagatataaaggtatatatttaaatgaaactgtaagataaacttacatttgaaggtagtaggattcctcatctcctcgggtaaatagctacaaaaaacaaacatgcaattaatactataataaaggaaaatatattgatcattttcaaaggctgaaaaaaacaagagaaaatactcaaaatatctttttctttttcgcatctaaatcattacagtaagagcatggaaaaattgttgaattttactttaaagattaattccaagttataaagcttaagttatgttaaatagttagcacacttgtttaggaaattacatacttctttcaatattttctctctaaatatcccacaatttacacaacggttgaagaaatggaatttgaagtttgatgtccaaagaaccttgacaacacttacaaaatgtacaaggaactataacaaacaaaaacacataatgtaaatcactaattacaaaacaaaattttagagaggaagagagattacggataaaccatcttttgcacagtaggatcctccatcatcttctccaaagcttctactgaaatggtcttccctttttctatccattaagaaaacattaacaatgacagaatcaggatgtcggaaataaaaaagaagaatctcaatacaatgtaacatcataacacagtacttatcaaggataaattagaaaatgcccccaagaataagataatggattcctagtgtctccagtaagacatagtaaacttcatagatatttttatcaatgcaagggctgacagttttccatactatattatacaaattaaattttggacataaaaaatatagcctaaattttctgaaatcaaaaattcaattttcttataaggaaagtaacaaagccaaacaaatctttacttacgagtagattgagactccttggaagaaccaaaaggtccgaaactttgattggaggtagttccattctgatataccttattgaatatgcaaataggtcaaacttctaaacaaagcacaagttctgaatattatcaatagtagttacttacttcactagccacttgaccttgactatctcttaatgaacttgtctcggcatcatcctttatgctactctcaaagggacttttttctgtggtttcttctggagagacatctacaaaagctgcaaatagaagttgggaaaagaaataaaatatttcatctatttaggttgctaaaatgtaaatttgagatgtacggaaataaaaggcaatccatcaccaaatctaatagcataaaatgttggaaaaagaaaagcatccatgcatgtaaattgtaaatgaaagctaacttcccacccatcagatcatcacaaaaagtccttggtcaagctaggaaaaagcacttgaactaaaaaaacgtagttttgattagttccagataagaaaaggttactatattcatcacccagcccacactatagctgaaattcatgtgttgataaattactaaaatctgatcttccatacacccatatcacgtacctaaatctaaatattgcatacttcatctaaaaagcagaaattgactagatctatgagagagccgggtgattctttgtgacatgccatcagtagcgtaattcatttagagagcatcttgtgagatccaagggatcctttactttcttttttaatgaataaacccaattaggaaaaaaaaatctgtaacatcgataggtacaagcaaatgatatttatttaatataagcaacatctcctat

SEQ ID NO: 194255 - DNA, 2350 bp, Cannabis indica
tttcacaccatactgaaggtaactcttttctatggtactacatcatcttcataactcctaactacaaagttttagcttactcaaaagatggcaaagggaaatttcttgctcgaacttgcagaaggtgatttatgagggtgtcgagacactcgtacatcctccagtgagaagaaagtttaagttcgaagttcttctgtccttagattctaagaaggaaagatcttgttcaaattttaaggcaaagggatttagaaagcttagagatggcaaaaaggaaaacgatgtgggtttcatacctattattagtggagaagatattccatgtgatttaaaatcaaaggcctggattaagtcagctaaaaaacacaaagtgatctaatggttggggagttgagaggactacatttaatgctccttggcagaatcaaggtattaaattttcatcattatttgcctcgggccatctgcacattgaagagtcgtcacatcataactctgtcgccatttgtttttatgcgataaacgttctacctttaggcatgtggcattcataaattcaaaagatacacaacacatgtgcactgccagttgtttcccataaattttttagatatctcaaccaccaagtgccatatgaagaagatgctttcgcattctcgagattcatccacgtgtcccaagtgtactttgataatccggaaggagactacaagcttccaccactcaagagtcgcagaagcttcagggtaaatattatccgtgtttctagatgaatgacatgaggcaaaaggtggaaggagactatccaagtaactaccaataaagtcccatgaattacagaaagtctcaagaagagtatatcaacctgggaggctcagagatttacccgaaggcaaatcaccatccgggacctggaagccttgtcattcctccgggacctggagaagaccaaatcaattgggtttataggaaaacacttaggagccatgcgaagagtctaagacggctgccaactacacatggaaaattagaggcctaccacgaagctagagctggatgactcttgtgacagttatactttttttcatacaagatcagatcttcgtcccctgtgtcagatcatggtagtgcacacacctcctttgaatacacctttttgtgactgacggctcctctgagtgtcttgtctaccaagtgcaacttatgcctgacatgcgtcctgcaccaacaatggtcccagctgtatggaacctttgacccacaagaagactctccttaggggcccaatagttagtacttttatgtattttgccccaataatgggtggactttttacaaaaaaccctaggcgggtcatgggtatgcccatactcgcactttaccctatataagtccctctatttcttcaaaaagggggatcaaaaaattacatagccgaagctctgctaaaaagctttcatcttcttcaagagaaacctagagaactagagttagggtttcactgtaaacatcacttataatacatttgaacgcatataaggccaatatactgactcgtggactaggaatacctaaagtccggaccacgtaaaattatttgtctcatttacttaataattatttacttcctaaagctttcatttaattagtttctaaaaatctcgataacactgaccagataactaacctgatgattaacagtttgagatgttgatggtacagtggtacgtgtgttcgctaagtttgtacctagatgtctttctccttccacaactgagctccttgcttgtttggagaatctgaagttgcgattccagtgcaatattagatttcagtgtttgggaaatgattattccaatgttattcatgtgatttggaagggtggtactttgattgaagatatgatgttcaacactatctttctttatgcaatgttggtttttgtccatttatttttcggaaaggaaatatgttggcccatacattagcaaattttgtttcagaaataagaatcgacatactacttaaaaaaaaaaattgaaagaacccttcagctcattagaggagaaaactagggattacaaaaggggatccttctcttggattacatccatcaaaatgcaaagaatttatcgcatttttttgctagatttgctatttgattgtccgaacacttaatgaaatgaaaataacaagaagaaaaatgacttataagatcaaggattaaggatgttgaatgccagattccccaattaggaggtcttcaacgacaattaagagcttccaccactatttttgcatcaaagagtttggagatatgttgcattttcttttcaactgcaattcttag

SEQ ID NO: 194256 - DNA, 2551 bp, Cannabis indica
aaaaattatatatattcttatttaaaaaaattcaggtgcagttatagtttttttattatattaaaattttataaatattattattatttaattaaaggaaaaaaatatataccaattttttaaaatatatatttatatcattcacctacaatctatgtatatatattgttatttcaaaaaaaattatgctaagaaattattatcattttatttattgttttaattaataagttaaaaaatatatatcagggtcaaccctagacataggcaggctaagtccgtgcctagagctcacacctttcaggggtccaaaataaaaaataaaaaaattattaggcttttatttaagtaaaattaagtgtattgtaaacaataaatattcacagcttagttggttaaggtgtatgacacattatacaatgttcggatcccataatacttttttttttaaatatttttttatatatattttggagggccccaaaatcaaatttgccttaggcccatatattttcagggccgaccctgtgtgtatatatataccataagccataaattatcttatagcttacatggtcattttcgttttcaaacttttatttcattgatttgttctcaattgttaatacggcgatgacaaggactttcaatatgatattgattacaagtgagatatagtgatgacatcgattttgaatgtagtagttactacaagtaagatacggtgaagacaataattttaaacttatgataatttttctatatatttattagtaatttttttaaaattttattttttcattatattatataaaaaaatttataaattaattatcgctaaaaataaatataattgcacgcgaaatgtgagttatttcataattatatatatatatatttatatatatatatttgtaggatgtttattagatgtcaatgaaaaaggaatttgtctttggattgatttttttttttttactttagtttctttcgataaaatatgcgtatattttatgtccatttttttttaagtatccctaatttatattcaattgtagatagtaaattgtaaatttatataatttaaatgtatcatacttttattattgtatatttgattgttaaaaaaactaattattgaataaagtttgtttatgcattgaaggaaataactctcaaatcttttgataagttgtaactttatttttatttttaaacaatgtaattatgtggcttataatataattaagtgaatttttatgaagaatgtaattgagatgatcgcttttatggagattttaaataatattttatgcaatgatcctaagaattaatttttattattaaaaaaaataagaataaattttgttaattgaaaaaaggaaaatcatcacacaatttttaaatttattctctcaaagtaatttacactggaattaagtacagtagaacctctatccaagaatattcttgagaccaaataaatttacaaaatacatgtatatattttattaagatgtaattactaattacaatttaaagtttgttcttatttataattggcccaaatccagacttgatttttttataataaattaaagattattcttaaatagagtattcttaaataaaaattctactatactaataatttcttgcacaaaacctaatttcttcaatcattatcataagattttggacaacaatggcggaattttgtaacttaatttatccaaacatttctttaaaaaaaagataaataacaattatcaaacattttaaattaccacaatctccttcgtcatccaatggcaaaatggcaccattttttgaattactccgctcgggtccaccaagacacaacaaacgaatacaaccgttataagggtatcatcgtaattaaatccaacttccaatggccataataaccagcgccgaaatttcagagtcgtccgacgacacagtctcgttccccgaaaaaccaagctcggaaaacgataacactttgctcctcacttaaacgacactcgaatccttcattaccctttgaatttacatttctacccttctcgcccgttcaaattcatgacccaaaaacctccgctctctcttcgcgattctacccaaactgtatgggtattttcgtaatatagaatataataatatattttcaaaattttcattgctccgataaaaaaaagaagaaaaaataaactctttctttggatactacaaaacgaaaaagggtagtggtgtggttgggttgtatcgttactttcgtatcgcagtgataggacttgtactgtgtgctgtgcatagttgtaccttcggttttgagttgtttctattaagcttcggttgctgtacattgcagcgttctaggcctctgttaaccggagctctggttttccgatttagggttattcgcctccgatttgatgctcattctctgtgtgattggtcgagattcatggtagtgtttcgttcacgtgacgctttggcattgtagagagagaaagccgaggagcgtgatttagagagagagagagag

SEQ ID NO: 194257 - DNA, 1246 bp, Cannabis indica
aataataataataaagagctatgtgggggagagttttcttttcacatagtcaatcagctctgaaccagaataagaactataaatattgatctaattagcttatgataaataaccttattattagtccctatttaacttttgcttgaataacactttaattttggtttcttatagctagattttgacttgcatgtgtcacactcctgcgcatgaccaatcaacagtacatcacatacactataatatattcttatatatagatagagaaatgctaagaacatcccactataaagaaagtgatattattattgaaacaaattaatattaaattttacataatttaatttaataaataatataattaataatccacatattattattagacattagtattacttaacttctataagtggcgtctataatcgactaacgaatattcgctaaaaactatttttttaagttatataagacccaatatctaattatattaattttggtataatactgaagaatgtactaaaacaatgtttatatagaaatgtttcgataaacattcaaattaatttctttttatagctgtgtatattatacttatttagacttatttttttttatacaaattaagttagtggtaaataactatttagattttctttttaatcctataaaccattcaaaaaaatttaaaaatttaaatgtaatcctaaataactagacgattataagaaaaaaataaaattaaaaaagaggttgtactgaaaaaaatctcatgtagatatctatagattcataaaacacaagatcaaaacatcacccatagagataattaacttgctttttagaaagaaagaaaggggaaaaaagggaagaaaaaaaacagtatataaaaactgaaaagtaccatcaaaccgcccaaactttaaaaaaaaaaatctatctttactgccatttggttctttcctcatctcatcatcatcaataacaacacaacagacttaagttttgtatgtgtaaatcaactcatcaaaattaaccaaaatctatataaagaaattgagaaatttgaaaaatttatatatacatatcacctatagctagtgctatatatataactagatatgatcaagtcaaatataaattccacttctagtcataaaaaaatcatcagcttagcctataacactaatatttatatgattatccatagagttattgttaacaattaaaaaaaaaaaaacgtggt

SEQ ID NO: 194258 - DNA, 1341 bp, Cannabis indica
agttatgatataatataatatattttaaataacaaaattctaaaatggatgttaaataagattttttttaaaagaaaaattataaaatattaaccaatcactatattagtaattaaatagtttattttctaaaaatagcgaaaaaatatatgcttcttacattttgaaacattcacattgaagagtagagtctaatgatttttaaaatttgaaataagagagagaaataagaaggagaaaaagaataaggagagaaagaaagtaacataaaagaaggaaagaagtaagaaaaaaaaaacaaaagagaaagaaagatataaataagggtattaaaatatatccaaataaataaaaacaaaacttgaccaaattattttttataattagattaaaaataagttatttcggagaagtttttttttaattctttgggcctcaaattaggagtccaaaatctcagtgttgtacctaagcacaaatattgatttataccaccattgtttttaattgatgcataccaatttaaataaacattatacatgatttagcatatatttataataacccatttacagtaacgagtagaaactaatacaaatagtgacataaattactcttaaactacacattaaaaaaaaaagagtacaaagttttacccataaatgtggtgataaaattcattacttttaagaaattgaagtgaaatttaggaatatccaacaagttattaggagcctaatacaaaaatgtcatattaaaatcatctgaatattctacatctttataccttagattatgagtatttataggcaacgataggacagttaaggagcaaagcaatgtacatattctcattcttaagagttgtattttctagatcccctgagagtgttttagttcaattttatctttacatatattatagctatttatgacgattctctctctcacacaaccataataaaaagtattgaggattaccaatacttggaacgaggttcaacgccttcgttcaaaaatttctttttctttattttctaagcactagcgaactcccacatttaggaaataactccttggaatcattatattaagcataggtttattttagtcaattcccttttaaacagaaaccttacaaatgagcatttggtctctttttttacagattgaaatcactatttgatttttcaaattttcactatccggtggttgttactaataatttgggtgtttatggaagtaaaggaacaattattggagatttcaagatgatcagtaacatgtcggtaaaattacatattattaagtatattttggtgaataattagaattaaatta

SEQ ID NO: 194259 - DNA, 1999 bp, Cannabis indica
taataataataataaatatttaaggcttatcgtcttcttccaaaatttctgaggaaaccaagtatcttgctcccacagaagaaaaccaactctgttttcttaggaactctcaaatctgatctgacgttgattctgacaatctcaactaacacattttgattagacttttgggaaatttgagattgtttgagctgcgtaaaatgaatggagttgaagtctgagctttctcacttttgattggtatttactatttagtgtttttgggttttacattctgattgaaagattgtattttgattaaaattaaacctttgatatttggtattttgttggtttgataaatgaaatgaaatgaaatttgggatttcatttttgtaatctcatattattagtgcccattaatggaggtaggtaggttagggacccttcttttcatttgttcatttcaaattttacttggttgagaaaagagtacttttatgactaatcaagaacagtaaattggtataactgttctgttttctcttttatgcagggaataattactggcaaaagatttctatttggtgagttttctttcttaactttgtcttttcttgtctctggcacctttgatgtggttgtgtatatttgtttttaggttgtttcatacacatatattagaaatgctagtaatagtacttgtttgattttgagtcaaatttgaatttagggggttcagttataatctggattttattttgtaaacttgctgtgttatgaaaaagaaaagaaatcatttttcttgtagcttctgttaagtggtagacatgacattcagaaggttcttcagcctttgttatagattcaattttctctcttggatagtcaaattgtattttgggttggatcaaacttcaatatgcatgttcatacatatacaattaaatgggcaaaaaggatttagagacatttggtcttagtattttcttttgaacaaaaatatatgcacaattaaatgagtgaaattgccaaaagcacacagttcatagttaaataaggagagattcaagttagaaatgttgtagcagacatgtaatatttctgtgtaagtaaggttgaaactagaaggaagtggttttagattgatgaataataaggctggtgtgttctttgacatgaaggaatttttcagcaaatatgttatgattttctcatcaaataaatgtattaaatatggcttaggatttctaaccctgttattaaagctcttaggatttctttgctgggaatatatgacttgaatgattatggattgtcataagttctaacaatgttgtaattatttattgattgcttttatttagatgacatgtcaagcttattagttcaaggaggctcagcaataattgttcaaatatctgcaaaattcatcagcagctctgtaaagttccctacatgtaagttctaactttaattaattaaaaacacaagaaaagaaaaagaaacaaaactattaatgttttgaaatttaagtctttttcttattaaaattaaaatcttttggttatggtctctcagcaatggtatcttgcaaatgggtgtctttcacagaaaatccatttttatcttcctaatggtgttaaaatatttcatcatgtttttactatgtgacttacaaaaccacaattacatctaaatatcaggttttgtaaatcaattatgccactggccaccacttattagttaatgtctgccttcggttatcttcttcgcattgctgccaaatttatagggttccttattcatggatataccttcaacccgagtcttccaaaacttatctctcctacccattaaccagttccaaacatccgagcagaaagactggaacttgatgatcaagcatcataccaagtccaataatgaccaggcaattctcactacatacacccatatggagtctctcggcatctcacccaataaagctactctacctcttgttctcaaggcctgtgca

SEQ ID NO: 194260 - DNA, 1452 bp, Cannabis indica
atatagtgttactctttgacaggaatgttatgctctttccagtgtgggacaatattacaaaactgcaagtacattctttctacaaagataagattagtaagtaatattggactacgttcattgccttacattattagttcattaattagtttcatacatagttaagttcccttttagtttataactaactagtcagtagaatttgcttcagacaaagctgctctgtgatgcaagttagtgcatgatcgatcagccttatttacttgaacagcagtaggtgcaatgtgcatgcattacaaaattgcaaatatattctaagtaaatatatatatttatggcaaggaatgcatgagctagtactggttataggtctaatgctcttcacagcaaaaaagaatacttattttcttgaaggccccataataatcaactaagttaatattcctacgctccaatatataaaatagccagtgctatactattagcatactcaaatagcacttaagtgttaggcaatattctcccaatactaaaatccaaaaaaatagaatcattctaatattaattttggaagcgaaaaatatagttaaattttaaacttaattttagagttttctataagaaaaactcttcaaaaataagcgtatgccattgaaagtgacaagcacacggtattctttagtaaaaggcgaaagaatagttcgctttgtgcttaacacatggctgcgtgatcttaaatgatttatcattagttgtattatagaaaatctcttggaaaagttcttaagctttcttcaatgtgggacaaattgactgagaattggtacatatatcattacattcacaatttggctgcccaaaactagtataatacttctcgtgattcactctaacttttaacagtaaaatagattgctctaaatatttttggtcacatattaagaaattacaataatcaggcaagatcccatttttgttttatttgttttttatcatatttactgttcacttttcttttcattactttatcaatccaatttttcttaaccaaagatgaacatttgtacgtagtagtactagttactatataatcttgtaagctacccataattatcgaaaaagtaactttctaagtggatcagtcgttctagaaaactttagtgggaaagcttgggagtattgggagctcctcgaaattcatgtgagaaatcatatacagaataacagagatagggtcgagcctaaattttgattagtagattacttgaggtatattttagtatttagtttataaaatgttctacaaattataaaaaaatggtaaagtacccaaaattttaaaaaaaataaaactacttttttgggtattatagtggatggttcatgccccaagggacaggtatccaaagtaccagcaggatgccctgaacgcagaaaaaaaaaaaaaaaaaa

SEQ ID NO: 194261 - DNA, 2867 bp, Cannabis indica
gttttttccttttttttttctgactcagattgtgttgattgaagttctggttcctcatcgggaaaattactactcccaccgaccggagctggagctggagctggccgattccccagctcacaccgtttcatagctaaaccaccaccgccataatacgactcctaaaattttgtgctcgtttccaactctacaaacaaccccttacactcgtctccattccaggcctcgttttgtttttctcttctttggtttgttgaaaagaaaagccacttgatcatgtcttcttcgacttcaaagaatttgaagcgccccaaacccaaagccaacttccattccaatgctttcgattcgtcttctccttcctcaaactcaaagctcaactcatttctctgggaaccgcctgatcatatctttccctccaagaacgattttttcagccttattgctggtctcacaattgcagcttcggtcgccctggtctgccatttcttcgccaattctttcatgaatactcaccctaaacctttctgcgataccaatgtggattactcagattttctctctggtgagtctttctttctttcctgttctgtttggttgctaagaaaacccgggaaaatcaacacgattttattattattatttatttattttttttgcagtaatacgaatttgaattatgtatacattaacatcttagttttgataaacccttttcttttcttttttaaattgttgttttgtgttgatgtattaattataaacaaatcatatattggggaggtgattatggcataacaacagctttggttgatagtttccagccttagatgcatttcttattttgcagagcattgtgaaccttgtccaagtaatggacaatgttatcaaggcaagttgaagtgtgataatggctatagaaagcatggaaacctatgtattgaagatggggacattaatcaaacagctaagaaacttgtgggtttcaacaaccttattcattatggtatattatattatgagtattctggtatgtaaaaaacaatactttgcctactgttgacagcttattccggtgctacttttttgtcgatttgattgcagtcggattgggtacaatttcatctgtgtgaatcttatgctcaatacttgtgtggtggaccagagataatttgggtttgtttacctttacaactctttgtgactaatacttcgagttgtatttgctgacatttttggatctaatattacatgtgtgtttcaggttcaggagggtgatgtatggaatgagttagatgggcacaagctgattgaacatattggttctgacaataccattaataacatcacaaagcataaagccactgggatcattgaaaaagtattagagagtaggataaatgttcaggggtatgttgttccatcttggagtttggtatttgagaaattcattgtgccctttggtgagatattcccctagtggtgcacattgtcatcagatatttaatgtgtacagggtcaaagaatggaaatgtccggatgctctagctgaaaattacaaaggtttttcttgtcgtgtacatcaatggatctccaataacgtgctagtgatttttccagtttgtgtgctggtattgcatttcaaatttctgttctgtatttatgttttagtgccaaaaaaaattgacacttgttgactgtttaaaaaaatctatgcaggttgtgggattcattttgctgatctggaaagtccgtcagaagctatatttgtcgaaaagagttgaagagctttatcagcaggtattaaaggacactttttatgtatactagtcatttgattcatagtttttttttttggttctttgaggggcaatagtctctgatagataatggcctaagttaatatcctctatgtaattatgattttgagcatctattttagtataaatacaactagttgaagtaaagcaaaaataaggtcagtttattagttcacttgcttgttgccctcttcagcatgatcaatccaaatcatgttttcttcatcattcttgattgctatttctagctgtatagtatctcatgttgttccttgtttttcatcaaggattgcgggagattgttgctcttccttataatgcaatgctacagggctgatataatttgtaattttataggtttgtgatatacttgaagagaatgccttgatgtcaaatagagcaaatggagaaagtgaatcatgggttgttgcatctaggttgcgggatcatcttctatctccaaaagagaggaagaaccctgttttgtggagaaaggtattattctcttcttattggacatattatagctttgacaatttacttgtattctcaaataacagatccttacaaatatggcaatagttttttagctatactttagacgaacccctattgcatcttggaagattatgtgcgcacagttgtgtctttgtttaatatcatgttgaagaaattgctcattttcgtggaaccagaattcaagggattaatttttttttctttctgttagaccccatattaatagggtgaggttgagtatagcaaataagagagatattagttattgtattgaagagtgtttaagtggagaatagaataggataagtaggtgagcaagagaatagagggattatgcaagaatttagtaggctatttcttctgcatcatggaggagtcctaggcctctcaaatagcctaggaaaattgtctcctcatcttcacatatgtgttttcttatagataagatgcttttctttttttttttcctttttcgaaagaagatcttacactcttttatactctcattacactcttttatactctcta

SEQ ID NO: 194262 - DNA, 1555 bp, Cannabis indica
ggggaaccgctctagcatcgatgagaggaaatgagttctctttgcaggtagagagattgtgtagagcagtcacagcatcaactcttccttgaacactaccagagctgagaatctgaaccaggagaggtgcagcgccagaagctgcaatggttggcttgtttgatgcagcagcggacagggttaagattgccgctgtagctaattcccttaaactaccattttggaacctcaagaggtctacaagagggggcacagctccggctgtcactatcttgaccttgtttctaatagcaacataaaacaatatggccatatgagatcaactaactaaaaacagatccaaaatggtatactcaagccatgaaaaagcaaaagaaaagttgtgggcaaatacatatggagctaatatatcgcaatgcatatgtgatagatttgtgtaccactaattaagaaaagcaagctcaaaatatttatggctcgggagcattgctttccgaatagataaaggaaaatggagggttgctttttcaattaccaggaaaaagtttcacgagaaatactcaaacttgttagaatagctcaagagaaaaggttcccccaataaccattaacttagagcctaaatcaacagaagagctatcaaggctaatgtgcaacattaaccaactttccttataatcaacctgagttcacagcaagcaaacaaattcctgcactaaaagaaaacgaaggaacttaaaacccgaaaagcttccaacaaagcaagagaaaaaacgctaaatataagggccttttttttctctcgattggaagaagtttcattgttccataacccaaagatcattcaccgattcagattagaaaaagctaatttttcggataactcttttgttagctgatggattcaattttatacttcccccaattgcctccgaagagaaaatgagtgaaaactaaagcttttaaaataaataaataaataaatcatcaatagcatcaatatcggttcggtgaagaagttatttcatcatttgatattacggacgaaatctcaaagacccaagtcaacaaaatctcagaaaaaaaaaagaaaaagaagctataactaacaaaatcgaagttggtaaaagagtgtgctgacctttcgtcgcgaacggcgaggttgaggagggcgaggagagcggcttctcgggcatctgggttaggtgagaccagcatcaaaaccagtggttgaatcacacccgccgcgcccaatttggaccgagttttcccagaaaaagaggacggagaaggagaaggagaaggagaagaagacgaagaataagaagaacaagttttccttactagctttcgaatatctctagcagcttcaatcttggagttcagatcaccatggatgagcttagaagaaatttccataatgagagaatgcttcctcaagctacttgcctcctcctttctatcatttttcgtttcttcttcttcctcctcctcctccgccactgctaccgctgcgctttctctatcctcctcctcttgccccatctctctctct

SEQ ID NO: 194263 - DNA, 1317 bp, Cannabis indica
agaaaaaaagactatttaatctataatattgcacttatattttgtgcacttttttcactaattatttataagcacgtgcaacgcacgtgccctctactactagtgtaataataagcggtgagcatatttatttatccactgtcaatttgccggctgttattgcggaataagactagaagaccagaatctagtacgtaacaacaaagctgaacaagttagttcaacttgttttttttttttttaattttattttcttaaagtaaaatatatatatataaataaatatattttttgaaatattttctacaacaacaaaattcgttaattctataattttggattactctattaaatatgactaatgagggtggttatttgtcaatgaataagcatgcattttgtaagatgatatgctaaaataaaatattaatttttgtagttaatatttttcttttaataatatgatagaatattttattatgtataaatatttgactggaatgttggattatatatgtggtatgagttggatttggtgatgatgataagtaaccatggatgacatatgtacttgccaacatgttccacctatttcaacggcatacggtaaaaaaatgtacttaattttgttggtcttcaatataattgtcatacctatattgatttatactttactctctcattttcttacctcacaaaaatactaaaacgacacctttgatatttggtaaattttttttttatatatatatatattttaaaggtcaaccaaaaatatccattaactaataaatcaaactgaaatatttaaagagcgtaattcaataattttaggctaattaaatcatttacaattaaaaaaagaaaaccgtagtagcatcttgaatcatcaaaagattgggaagaatattaagttttcaacctgaataaacaactgtcaactccattttattaataatgactgtcaatcaaaaattttcttatacaaatttggtaataacacccctattattcaatataagaataaccaactatgtttatactatgccaatcccaaatttggtaatttggtaattttcttatgtttatactatcccacaacaagattgaacaccagaacaaaggatcaataaacattcgggattttcctgtaactgattgataatgatggaaatataaactctctattttgagtcaatcaacaacacaaactactacccaataaggatcaaactctactccgttcatcaaatcaataccaattattactaatttagcaagatagtgaaataacatcgttattttaaaaaaaaaaaa

SEQ ID NO: 194264 - DNA, 2061 bp, Cannabis indica
ttttagtacgcataaagttgaagatgataaaatgtgtgcatggttaaaccataccagtgagagtagcttgtctatctccactataactttggttatgaatacttgttaaaggagcagcttctgcataattggaagtataataattcaatccaagaaaatctaaagaccctttcagcaacttcgattctgctggtgtgaatttggggagtctatttctcgctgctaatctcatacttaacggataatgaccaaaggttactggttgagcaaacctatacatataaaacatgtttaactaattaatgagtaaacataattatgaatatgaccattcaatttattgtatatatatgcttattatagataatgtctagctgaactctcaccatccaaaaaagaaatcaagagctctagaagctgccctttgatcagctgttgttttgttgttttggttcaaaccaatgagtaacaatggtaatcccaatttttcctttttgctgtgcctgcatcatatatatatatatatatatatatttatatattaagtttataatagttctttgattacgattaaaatatcttcattattgagtaattaaaataaaatttatcgatattaattacctgatatttttccctgtatatttttacaccattggcatgagcaagaagcaaatggtgggctgcaatgtagggttcagtggctgagttaccagcagtacaattcccggcgtgcttggaacatcggccaggggcaaatgtgccaaaattataagcattcatggtaaaactattgggctcatttatagtaacccaatatttgactcgatctccaaatgtcttgaaacaaaaatttgcatagtctgagtagtccttcctattgatcaaatcatacatcatccatcgttattttttcaattgtttgaaggaagaccactttaatcataattaaaggggaaaataaccattttattattatactcacactatcttagggctcaaccagccggcataatctttttcaagtgctaatggtgtgtcaaaatgaaataacgtcacaaatggcttgattcctgcattaaaatggaagaaaccttatatcatattatatctatttataaattaaatgtgtttctagacatcagtggtattaaacaataccataataaatagcaattattttgggacgacctatacttaattagacactaagaaaataagtatatatgataccttgtagttgtaataatgtcctttaccatttttcattaagtaaagtatgatatttctcttaattaaattagtgcattgaaagctacacaagatttagttcaaattttttctcatatttcgaaatattaataacactaataataaaagtaacattatgtacatttatagtatcatgacaaataacaatgtcatatcattgtattatttttaccattggctagaagctcgttgatcagatcattgtagtatttaacgcctagtggattgacgcctcctctgagtgttccctctgatgatatcataagatgatgccattaatgattaaaatgattgtacatatatacatggaaaaaattgttgaatttattttgtatctgttattttcatcattttagctattttttattggaagggaaaaaaatgatgcgcattttgtatcttgtatagttattaaaatatatttttttaattagaaatcaaaatagagattttatttttataatcaaataactaataattattatttttatattgatcaaatatagttaaatttacaaaaatataaaataagagtatattttactacaaaaaaaaagcatataaaatagatgaattgtaaaattaaattaaggtctagagactgctaataagatactattttgaaccaaaaacatgttttatgtgggtaggtagggacagagcaaccaagcaggggcccttgtgttaatgagtgtagacttatggctggtgattcacctttcatgcatttacttttggtacacgtcacaagttatcgttgcctaataatatgaaatgtgttatacttta

SEQ ID NO: 194265 - DNA, 1297 bp, Cannabis indica
aaagctaagcgatctttacaaaaccacacccgtaagaaaatccaatttatattatatacacaggaacgaagaaaaaatacgacgagtcagatacatatttttctgcaaccaaccctcacaagtagtgcccaaaattcatacatgtgagtgaagtaatgattgtttatcagtgcatatggtgatgaacccaagttcgataacccaacgacctatgctttgatggaaggagctaccacaagggaaggacgtcaatgaaagcttcgtcgtcaactgggctcttaccgaggggattagaaggagacgagggagttggggcttctttgaatttccaatttagggatttagggatttaggaattgaaatttgattttttttaagttaatgtattatcaaatcgggtcagccccaacccaaaaaaaaattaaccggggcggggcgaagacccgataagagacccgattgtcctggggcgggactggccccgacccgatctgctaaaaagccctaattttccattcctacatctggtgaagctcgaaccatgaggttgatcttctttgatgtggatttcacgtcatgttgatagttgttaaagcatgtcctactattgtggaacatcaatgcttgattaataattacttcattttcttatttggaaaatcttattctcgaacatgatattggaaataaagccctgatatcgtgaagtttaataataaatgagagagatactatgctcgtcatttataatctcattaattactcttccgaaagcgttgcttgatgctatccaaagacttattgtattggatgtttatctcgtctggatgagtcatttgtctatcatccaactggcttaacttcgttaatgtattcggttcattatcttggttgggcctacgtttgggcctgtagtggctgaactaaataatcttagaattacatgtgttctctttttggaaacacgggtaacaccttacatgaagagataaaaccctatttataagacaaacccaagttcttaggtaaaaacccagacccgataggatttgatacatagaaataaggccactgatagagtaaaatacaatataatattgactttcgggcttggtaagtgaggcccaattgagatgtaattgttctccgtataatatagtatttttttatgttgacaagtggccacgcgccgtcgatcatgtataatactggttagagcagtggactttggacaaaaagtaggttactttttgtgctaggcgtatttcccaagcttgatgtgagggacaagccccta

SEQ ID NO: 194266 - DNA, 1306 bp, Cannabis indica
acacacacttgaaggtgttaaacaagtgcattttaatacaaggtgacacgtgcatatatatatatttatatttgtaggtttggtatcacatatagatattttgagatattggcaacaaaattactttaactataccttttgtaacactgtacagagcatattctatattggtacaccatttaactaaattggtatagaatcttcaaactatttcactcttatgacacctaattatgcactaaattttatactattaatggtgttgaattttgagtttatatactaatttggtgtacaacttttcctactacaaaatatattttagtgtcagtgttaaactgacacttatacctatagtgtcagttttatagaactgacacctattccatattgatagaaggtatagtgtttggtgacggttctaaaccgagacttttaacattagtgtgacttatggatatgcaatttatttttgcactacttcttcaaagatttaccacaattatattgaaattaggattcaccacaatgaaactcggaactagatacaaaaacatcatcgtcgtcgtccgcttaagatcaacaataataagcttatcaagtcgttaacaataaaataaaaagagaaaaaactctaacaacaaccttaactaataaggtccaatataccaccggttaagcatcaaagaattttaaaatttactagatttccaaaccaaatgaatatttgacagagtctacttattaatgactatcagtcaatgatcttccaataaaaattgaaaaatatcaacctcattatttaaataataaataagcaaaataacacgaacttttgacactctatcactaaggatattggagcacaaaacacactggtattaatatatagtagatatgagcgacaaagagaaaagttatgacactcttgcaagttttgcttgactcatacgaaaaaataccaactacccaaaagagaacaaatgatcctcgctagtctttaaatcaataacaactcctactaatctaagtgcaagaagactattattaaaataataaaataaatcaaaataatgaaaactattgcaaacgaaattaaaaatacctaaaaataaaggacttgacaaaattgtgtaccagactattaccagacacccccttttgacaatgattgatccctctcttctcaaacaaagcaacatgatcaccaaagcattgccctaaaccgtgtgaaccccaatcaatagataacacctgaacttccatcgaagacccaacggagcacaaatcactactacaaaaatga

SEQ ID NO: 194267 - DNA, 2573 bp, Cannabis indica
atataaaatacaaattcaagatattgtatataatttagaacattaagagtaattgaatgatagagaaaacatacctaattgatccattgagataaacttatttggatgtacaacactaacctactaatacttcctcctttgatctctattctgaagcagattatcatagtatacaattgtgatgagatacgtattagttagggaggagacctatttagaaaactttacttagatatatactttaataatctgcttcaggaaaaagatctagggaggaaagcttattaggttagtgttatacaaccaatcgacattatctcaatgtattagttagatatgttatctctattgttcaattacttagtgttctatatcataggcaatactttgaatatgtattctctgtagtatcacggtgaggccacatcctcctttttaattatgtggttaaaattaactacaagttgtgtgcacaaaaaaacaagtatacaagttttttaggccgagcatcactccaaaataagatacaacatacatatcaaatatttcccaaattttggtccttacttaatcttattcaccaagataattgcatttgtatttgacaattcaccaagatatcttggttattatgcatatgtatatttattcgcactacttgtgactggggtcatttgcttatttgatgaatttattgtatgatgaaatgtaccttaattaaagatatgctatttgttttcatgttattggttatttatttattttttttgcataggtcaagtaccactatcaaaggagatggggatcatcaattttgtggttctcctttctatcactacatgcaaacaatgattcaggagaaccattccgattgaactattgtcaggggtcaggttttgttgatatctctggcatcgatgatagtggggctgcactttggaaaatacttccttgtgagcctcaaaattatgatagtgatattgattgggacccttacaatcagttggttaaaaggacttcttacttagtgaacaagaagaatgattgtgccatagcatttgttgatggtgttccagagttcgttaggaagcctggaagtccttttaagttcaaagttctcctggaaccttctgcagctcaagatgtaggaaagattgatagccatcttctggaggattctagaactagtcttcaagataatgcatctaaggtcaaagggacaacttccggtcataatataaagcttccttccattaaaatagaattgattaacaaaatatctttaaccatcatccataaactttctgatagaagtggtgtgtttcctctcctacgtgcttccattgacactaccaagcttattgtacaagttacatctaccaagaccagggttataaccacactaatcccagcaatatatcactttgactcccaaagaaacttatggtgagtacttggactatacatattactaactacttctatttgtctttcatttaatcaaaatttactttccatttgatcaaattcgaataacttttcttatcttattttgagttgtaggaaagaaattctccatccagttgaaatattcctattctaccgttctagcttccaccccgagggttcagaagttaatttgtgtggggtacctgttcatatgcattgcagaacaaaggaggtcagcaatttaaacaatgataatttaaattccatggtcatttgagggctgttgacaactttgactatttttaacaattttggtgtggagtattgcagttgaacatatccctttccgaactttcattggatgtactcctttttgtggttgggaagttaaatttagctggtccttatttgttgaaaagctccaggattctggccaacggttgcatggtttgttattctgttcttccttaaacaccaaatatatctaactgaattttcacatacatatacatgctaagcatgttttccttccgggcatgtgtcctacagggaatgagtcattgttggagtggataccaacagttgaccttagtatatttgatcatgcactttttcccttaacaagcatattttgtcatttgaattgaatagaacacatgttggtattcttgaaagtaggttcaatgatgaccgaatggtattattgaattggaatcataatgtgatgtttgtgtgcatgaggatgagatgtggtcttgttctttttgttttcgataaaagatcaagaattcacgttgattcaatcatttgatcttttgaacttcctcctgacccatgatttgtgatgacacaggcatttgatggtattcagaagttgatatgtttttttatacaatatgacattgagtgcattaagttactggtctgtttatttgtatatgtgtatttatatatgtatatttattgaatttccataattccatgtataattctatattggtaggtaaagaacgaatcaggcataacccttctttgtcactttctcaatgagcggagtttgaaaatagccagaaatcaatccacttccatatttttaaggtagttctttaaaaaaaaattaaaaa

SEQ ID NO: 194268 - DNA, 1023 bp, Cannabis indica
gtggtatgtgttgtctgaagggaagagacaaagagggatgttgatgacttttcttttcttataaatgaaatgatcttcttcacactgatttccacatatatacacatatagagagagagactactgcatgcaccattaaataccattgttttttagtcatttgatttgtacgcaacacacagagatgccttttcattagtctctctctctctctctctctccctctccatatatatctatttaacacgtaaaactacttatccatcaattcatttcttaataaattataagatgatgacttctacttcacctgcatgccttggcttgtcctcaatcatccaatccatcacaccatgcatgtatatagaataatgattataattagttataattaattaataattaatgaaatataacgtatagttgatgtgattatatatttaggtaagacttaagagttaagaggtgcacgtgcgtgggtagagagtgaaagatatatatgagagaaagagtaatatcagaaataaatattgagatgagattgggacaaatgagaatagaaaaaaggattggttactttgcttctcaaaatcatctcagaccccacatacatatacacaatatatattattgtacacattaatgatatggacccgtgctgtaagagattttttacgactagttagcatataaatttgattttaaatacactaataatatatcactagaaaaaataatacttttttaaaattagtaaatataatataaatacccttacttttgttttgttttctttttatgtatatatataatatataatagggttagtaggcctatatatacatatatagtgtgatgtgatgatgtagctatagcttattaattaattagtactattccttttcttcctgcacataccatacccattaatttggcaaatatacacatgcctttccacttctcacttttcttctattttctactttccaccaagtaacactccaaaacactctctctctctct

SEQ ID NO: 194269 - DNA, 1054 bp, Cannabis indica
aacaccaacacatcctcaatgttgccagggccttagcttttcaatccaacctgccgctcatctattggagttacatggtaaaacaagaattaatttacgcaacagaaccccctccatcactctcaatgactaaacatcctatgaacttttgcacaaaacaaaactaaattatgctcccttaacaaattttagatgtcttgcttatgaatcacatgtaaccaacaacgaaaaattttctcctcgagcaagaccttgtgttttcatagacgatccagacaacatgaagtcctacacccttcttgatatccaaacaaactaaatttttcattcaagggatgttatcttttatgagtcgatatttccctaaaaaaaacttcagccattaccccaacattcatatatttttcccttccaacaatacttctttttaccctgcagatactcactaatctgcaactacaacatcaccttcccctcctgcccatcagcagccaccaaaaacctccaaattaggaagaaaaatacaaatctgctcacttgaatgactacaactgcacatcagccaattttttttagcacaactttccccatttcaaatttcctttcttatgacaggttacgtacaaaatttaaagttattgtctttgctccagcaaacttacctgaaccagcaacatatgttgaagccacacttcacaaaatatggaatacaacaatggatgatgagatagatgccttggagaaaaatcacacaaggatagttgctcccctacctgatggcaaacatgttattggcaacaaatgggtctatcaaaagaaattaaaccctgatggatgaatccaaagacgtaaagctcgattagtagccaagggttacaaccaataactagttattgattatttcaaaacatatgccgctgtggctaaattcaatactctcaaactactatttgcccttgctgccattaaaaactggcatctacatcacatggatatcaacaatgccttcctccatggaaaattacatgagaatgtttacatgaaactacctcaa

SEQ ID NO: 194270 - DNA, 1437 bp, Cannabis indica
ctaaatgttttcccaacatcaataaaaatatagctatgtctaccctcggtttggcaataatcaatcatcagagatgtattgcacctgtaattagaggtaagatcaggcaatgatcaaagaaatgagttactgcctaaaggtagtagaaggtcaaataggtacttcaagaaccaaattcaaaactttgtcactagtaaaatgtagaaaaaaaccacacacacagcagaattacaaaaatgatgcaaacagaacataatcgttcaaactctcaaatcttaattaatgttacagagaaaaacaaatttccattacactttggaaaattaaagttgccacaaagtttaaaaataaaaataaaaatccattacgaaattaaccaacaaaacaacactaatctacaccacaaccataaagaaaaaccaatgtgaagtgaagaaaatacctaagcaataacaccagaaagaccaccaaggcccactgctgatgatttctgaggctactagaaaggcgtcgatggatcgattaaaggaaagagattgcggttttgaaatgtacgaaaggggtttcgaagctctcaaactcactaagaagacgaagtcacgaactggggcaaagagaacgagagtgaccacgctaagcagtatcacaagcactggaaatgagacattgatttcatgaagaatgaaaatattttttcaattttacaatccacgaaaaaaatcagaaaaatacaatatatatataaatatatatcatatcacaattataatctatttttatattaccattgtatgttcttaaaacaataatattaataataataaagacaaaaaaaaaaagattgctagattcataacattacagattgaaggtggtttgggattctccaaaaagaagagtaataatgtcttcgtagcttacctaatttgtagattttggttgtgttggagaataaaccactattgatgagggatctagatgaaatcaaaggaagataaagaggcccaattcaaaaccctctaatttaatctgttagaggttatctttccctctaactccaagacttcccattactcttggacgggatgaacaagacgaagtcacaatcagttcaagaaggagaagaactcaaagagggggtcaccgtttcgatcgccagagccctttatcgcaaaatgggatgagtaaaatctgattgcaaagtgaaggtataggaatatatggttattcactctcaaatgtatatgttacagtcagtttttaaacctcataaacacaatatttgagtgtttataacagacgcaaaagggagcgaattgtttcacaatttttgccaattatcgtcagttttgtttttaccgtcactttagtaaatgacgcaaattctgtattattagtgtcatttagaaatagacgtgcccaatagtttagttacta

SEQ ID NO: 194271 - DNA, 1647 bp, Cannabis indica
atatgtatatatatgaaaagaattattattgcatttaaatattaatgttgaatgaatataataatatcaacaacaatatgaatcaaaaagattaaaataaaaaatatttcttttcattggccatgaacgactatgaaatacatatataaatatgtatacacacaaaaataccaaaactcaaaataatcaagatagatataaaattgttctgataccaactgttagtatttatatgaatgatatgaagtatgtggatgtgtatatgaaatatggaattaatggaatatatacacaagataactaaagaatcgaaatacatccaaccaatcttctttctaactttgctctactagggcatgaacctttagctttgtgctgtttacaatgatgggttgtggacgctcgaagaataacatagggatcgagaaaaaactcaactaagaaatcaaaagctaagaataatggccccacttcttcggatagggtggtcaaaaccaggtcgatggatgatattttaggggtgaaggaattggagattccaaagaccttagaagctgagaagcattggttcgacaatgtctctcacctaaggaaacggagacgatcttcaatcgacaagcagaggtccgacaagatttctcagactagctgagtgtggcgaatcaaactatgtaggatatcagtgttaggaaggcagaccattccccttaatactgagatctaatgtgataaaaaatctggaaagaagctttaatggcacgaaaaataaagtatcaacatgagtattcaatggttattgaaaaacaaaacacgactcaaagatctaaagtgaaaatccatctcgaggacatagcagatgaggtaagttattggaatccatctattgtatgtcgtgtgattggggctaatctccctgtcaatataattaatggattttataagagaatttaaaaagatttagtaatgaaagtgagaatgctcaatcgagggatattcataattcagctttagaatctagaccagagagacaaagcattaaatggtggctatgttagtggtcatgaaactatagaacccgaatgaagatttcacgaaggaggagattactaaggttcccatttggattcaattgaaaggccttgtcattaaatattagggagaaacatccttgttcaagattgtatgtcaaatcagagaacctctccaagtggatactgtcaccaaaaatagggataagctctcatatccccaaatcctcgtagaggttagtttagcacaatcttttcctgatatagcttcattcatggatgtatttgatcatgatgtagacttggaggtaaaatatgaaatggatccccttagtgtgctatagatttttaggaatcaggcatgacacaaaacgatgcaagaataaggaaacaaaaaaggcaaagaaagtctggcttcctaagcagatagagggaaaaccgtctatagacaaagatagtttttagctgggtttgaaggaaaaaaagggtcctggaatcaattctagttgcaacaaaattaaagaacaattttgaggccttagttaatgaacatgaaatggggaagaagaagattcaggaatgggggagtttgtaacagatgcaagaatggataataaga

SEQ ID NO: 194272 - DNA, 1422 bp, Cannabis indica
tgttggttaacattaacaatggtgctatcaatgtaggctcttccatggccagaacaagatatgcttgccactacttcagcttcctttgcagcttttctactccaactaacctcatttaattcaactctcttcaaaataaataacacattaacgcttagagaacataccaataacaacaccaacaataatattagtaacattttttttgcaataatgttaatttccatctttgattctgttaattatttttaattttctctcttaattatcaaagctatacctaagctcactactactactcacactctagatctctttaaatacacaccctctcttccaaaaataataatatatagttaatattcttaccaactactaaaatatagatacatgaaatttcttataaattttcaatttttttaagaaattggaaaattaaaaattagattcaaacactctactacattcattaagtataacaaattgtttgaatctttaatttttttttttaaaaaaatacaccttaattatttatgtaccaaaaatactaaaatacttataaatattaatattaaaataatcactataaatatatatttatatatatatatatttgggtaaatactattttagatcttgtgttttgtaaaagttactaattggactctttgtttgttaaattacaaaatagattctgtattttctaaaaattttatcaaaataaaatttaatataatccgatcaagagatgttacgacaaaattgggtacattttctgtatctattcatgttagaaattgttttaaaattgattatattaaaaaaataaaattgttgaaaattaagctcaagttctatttttaccattttggaaaatataagatctattttatcatttaacaaaacagagaattcaattaataatttttataaaacacaaaattcaaaatggtatttctcatatatattttttaaagttgatggacatggattgtataatggagaatcaatgtgtgttagaatattgaagagtagtgctacgacagaccatattgatagttagtggtgttgcttttccaagaaaaaggttatttaatttgttaaagtgagtaatgtaacatgtgatcatccaatcaaggtctccaaggtctaatttatttgtgaaatctatgtaactaagtacaaaacaaacaaaacaacccaattggtctgtctaatcactcatgtttattaataatgaaataccaactatacatcaaaagctaaccaactaacaacctttttgtaattaataataattaaaacatcaaaaggttagcttacttacttcattatataataccattagtttactgaaatagatttggagtaagtgtttatacagtcaatgacgaggtggaaattgaaaaaaaaaagaaaaaa

SEQ ID NO: 194273 - DNA, 1801 bp, Cannabis indica
tcttagaaagcgttactaaattgtatttcaagtttactatgcctcaagtgttgctaaattgcagcttatatatcttatgcagagttatgctcactgcttacatcagaaattcatacaaagaaattgacataaaactagatcccacaaacgagatgccattttactcaattttactaaaagatgaaaaataccaatatttgttttggaataagccaaaaaaaaatgaagaattagtgaatgaaaaaaccaaaactcttcattttcatagctgcaacacgcaaatacagaaactatagtccctctgagcataattattgacactttcggctcaaatcagtttattattactgattaatgcaacaattattcgtcgaaatctgttcctataaaaatctgccattttttttaggttgccttactcccttctaggaaaggtttgctgcttactttatcactctgcttcaagaagaacagaaatctcaatagacacgagctttaggtgggaatgtctcgacttcgtcatctaatgtgttcatgtgaactggcctgtaatctaggcgcactttctcattctcccaatatctgcataaaatgtcagccaaatttggatgcaccgtaagaaagatcgaatgtcatcatcaccaaaatttacaaaagcacaaatttacgaaatccagttagtatacatcttacatcccgaatgaaaatgttttaaactagacggaaatgcttaccccaaggtatgtttcatccagttttcatcatctcttgtctgcaaaataagaagaatttggtttagggacggactattatctagaaactataagaaaaggatatcaacttaaaagatggggaatactaacagagaagtcttcgcgcgcatgtgctcctctgctttctttcctggcctcggcagaatgcatggtaatacaggcatttatcaaaagattctccagctcaatagtctctattaagtcagagttcctgtcaaaatattgagaatcagttcatataacccgtctaaacacaaataagaaagctattagcatccttgtacacataacattaccatatcaaacttcggtctgttactttaacatcgtggaaactctcccatgtcttgtcaatcaagttacaacctgcaaagaaacataaaatttagaaggtaaacattatgacaacggatgatagaagaaattcaaataacagcattccttgccaagacttgaaggaaattatagctcgattagatttaagtgcaacaggtagcgactgatagtaagcctttgtaaaatagaataccttcttctaaagtttcttgtgtacggaagacagctgcattattttgcatgacacgttgcatattcaaccgaatgctagaagttggtgttgaaccatttgaattccttagtttgtccagccatgcaattgtcttctcaccagcatccttctccaaaggtttttgagtctctcctgcacatgcacaagctccaagaataagtttcgtcttcatatcggacggttacgtataaccaacaatttatataatagcaaggacaattaaacttgcctggtctatggatctctgcaactctatttgcacaagctcggccaaaaacaacaatatcaaggagggagtttgccccaagcctattggcaccatgaactgatgcacaggctgcctccccagcagccatcaatccaggaattactgtatctgggtcatcacctttaatagttaccacctgagaaatataagaggtgatcgtgttatggtactccaattgtgagataatatcca

SEQ ID NO: 194274 - DNA, 1294 bp, Cannabis indica
ggttttcttggtgttgtgcactttgttatgtttaacctggtagaaagagagagagagagagagtaatgcaatgcaatgcttgtccataattacgtagttatagtagttgtttcattgttttgttgctgaataatttcaatactgaaccgctgcctactgagtttattgaacttgtcgactcataaattatattttactttacacattgcttatgtacctatgaatatgatgattgatgagcccgattcagaaaaaacccacagatgaacaataagagtatgtattttttttttttgaaagcatttgccaaatcaaattttgttttgtaatgatccaaagaaaatgttagcactgatctaaatgttcttaaaaagaattgctaatcaattgattcatataaataatatttgaataacaggattcattatttttatgaaaagaaactattaaattcaaattagggatgtataattgtctgtttgataggatcggactatagtgtattttaactaaaatatataaatattgggttgtaaatatttaattgtaattcgttgaattaaaaaataagaaaagtttaactcactcaatgattttatcggtttagttgagttaacctttccctatttttattttttatttttttttatttgtttagttttttgtcttaaaaaataaaggtataatattacccatttcaattttcataactttttttattttaatacctacataacaatttacctcctcaaacagttctattctgcttcattttctttctcttcttcttatcttcaccaatttttcttcttctccagattggacatcatcttgtcatcaaattcaaatgtatatgtatatatatatatatcatatatgtataattattaatcaaagtcaaacgaggaaaataaatgaaagaaagagagatgaatgggcataatgaagagagacagagaaaaataactaaaatgcagtctgatccttaatctgattttttgcttcattatttgagataacaatttacctcaaccagcttttctttgtgttcttccttcttatctccttgttgtcccttcatcatcttcttctagtcattcatctgattcttcttttacaaagagaaacaccttagaatgaaatattgcaaacttaattttgatttaaactgaggatggttgagtttatgtttgttagtataattgtaagaagaaatgaatagaatgcaatttatctgtttgttggatatgaaggttaaatttggggagagccattgtgtaaaattaaaaaaaaa

SEQ ID NO: 194275 - DNA, 1317 bp, Cannabis indica
ttttttatagattgaataaaatataatgtaaacaagctattaacgtacaaccctatatctttaacggatgagtttatatttacccatgattttttattttcctaaaaaaaatataattcaggaggatgcgttggctaaacaaatatagatttttttttttacttttctcattgtaacgtttgtgagcaaaaacaggattgatacatagaaattgtgtgattaggtgaagttataaacacgcatcataataaaattaaaatatgaatatatgcataggaatcttttattaaagattatacaataacgacaagcaaagcaattaatttgtgtgaatatcacgtgaaacgacttttgaaattaaaagtatgttcccattgatatataaatattggtcattcttattttctattttatatcatcaatattttttatatacataatagtgtgtgctttttttattattatttttaagaaaattctaaataagttacagtgtaaataaaagaaattttaaaattttattgcatttgtgattttttatatataataagtaattatttaaattttattttggacataataaattatttaaatttttttaaaaaataaatattaaaagagtataaagtatggatcataaaaaaaaaatcttttagatatacagtgacatagattttctcttgaaatttgagcaagaggagatagataggatttcaattgttttcttggaaggagtcaatttttttttttttttaaaaaaaataaaataaaatatttaattgttgttcacgttaactttattttatacataaccgcaaatcctaatggaatgtggtcatttataattttatattcacttgctgatccacgttgagcttaatcaaacagaataagaatcactcaaactaaaaataacaaagtaaataaatatttcatagattgtttaattttgtgtaatttttttttttttggcagttagttgtaggcgtttattttttattttattttttagcctttaaatagttttttaattttttgtatttttacgaaaaatacttatgataacccaaataaaaactattttttttaaagggaaataaaaattattggagtaacctgaacaaatttaaaataaaaaataaataatagtatatagaataatttttttaaaatatatataatttttattaatttgtcaaatcaactaaaggacaataatgtacatcaagaggaacatcatctctattaaacactcaatctaaaaaagaataagatgtttagcaagactataaagaacaatgttagcagatcatttaa

SEQ ID NO: 194276 - DNA, 895 bp, Cannabis indica
aaaaaaaattaaaaagcttttcttttagttgagagtggttgtaacaaagctatagtctcacacatgagttgtggttacaatggaaattggctgaaaaaagaaaaagtggaatctcatcatgtgtggtgtgaatattttcttccatctgaaaatgaaaagtatttcaattattattaaattcagtactatatatatagtcttctctattcatatatgtgttagttccacagtagactatcaacaaaagatgagaaaaaggctatttcaatttcaaaagctagatttatatgtgtacataaatttaggtatgttgtaaactaggaaaataaaaaaaaacaatatgtgaaagaatgatgatcaagttttcagtagttgatactgatagtgatagatattattttcttgaaaattattggttattagagattccattttgagttcaaaatacatacaaatatagcctatacataaattatatgtttataaaattttgatgcttttgagatataaatgtatatatagacccaccatattgttgctttggtatatttatagataatcaatcatagatcccaccatatgtttcttttgttaaagttgggtttgcatgttatgtaaaagttggttcacttatgaaagtgatgaaaggcacattacaaaattaataattaggattaagtaacaaccatcaagttaattagtgaaaacctttctctttttcttctttgtttgagcaaataatgatactttttgtcgttttataacaaccataattaagaattgggtgaaaatgctatgcctctctcctctctattaacttaatttttttatcaaaattttttcgttcatatatatatgtttagattttgtccataattttatatttatatatata

SEQ ID NO: 194277 - DNA, 1324 bp, Cannabis indica
aacatatatatatatataataagttaggaggatgatgactaattatctccctatatagcttagctataataaaataataacaataatattgatctaatttactttcattaattaaaagacgagagagagagagatatcatcatattattataactaataataatattcaagtccaaagagattctctttggagagttgggtcttgcattacattaatattgccagaagaagagaaagtgagatactgtggaagattattggtagagaagttagtagtagtaatagtactattattattattattaatattggacaaaataaggggtttctgatcatgatgatcatgatcatgatcttgatgatgatgatgatgattatcaataatctgctgggttggtaaggtggactcttgttgcatctggatgcagagaatctcagcctgagccacagctagttgcatttgtaattgggaaacttgggtttgaaggtaagatattgcaccaacacatccataaactgggtcccgaactcttgcatttgcttcataaaccaaactgcttacagcatctgctctttgatgaagtggaagctcctgtgtttttaccacacaattagtttaaccccaacattttcaaacatataataaactcacacttgtaagacaagttaaacctagctagtttgaaaaataaagaaaaagttatacacaacaaacaaattaaacaacactatatatatacctgcaacattttgctaacattgctagcaccaaaaactttgtgaacaatggcaaacttgtgaggatcatcagaaggaaagtaaggggcaaagatgcaatctttggcgcaacggcgcctcaagagtttgcaagaagcacaaggagatgacccacccattaattattaatatgtaataagtagtaagaatttgaaaacaaattaaagatggctggaaggatagagagagattgtttattttgatgaagttattttggtatacacatatatataggtagggtctgtgggaatataagtagttgttgtatatatatagtagttgaagaagagaagaagctttgttttgaagagaattaggaggtaaatgtttatatatttatattagttataatattgtatatagctattgtctagagggcgtggaatgcttccacatgcctcactaatggaatggtcgcacatgcatcactattaaaataaacatatccaaaactcataataaataataattatattagaaaaccactaatactaataatatatatatatatatagagagagagagagagagagagagagagagagac

SEQ ID NO: 194278 - DNA, 972 bp, Cannabis indica
ttaagagttagggtgatccatgcaatacatacacaacgacccaggtgtcactagttcgcctctaaccatggtgattttgcaatgacgacaccctttagggaagagaaaaaagaacaccatccctttgattgtgttccaaccacctctcattcgccaccctttcatgttcaaattgttcctcatgtttcctttgctctctttgctaaatgtgatggtattcccgcctacgtatttctctcaaatggatggtttgacattcaacaacaaaaagaacgcaaaggggatgttatgtccttcgttataaataatgttttgcactgaaccacccaccgacctagctcgataatgacatattattctacgaacttactcgtcgtggcttggtttgtaacatctattaaaagtacgatgatagtttggagatctggctcctacatcagactcaaattcatcctcaatggaggaaataggaagtggagaactagaatcgtcagacatatttaactaaaagaagaagaatcttgaagcattaaagaagaaagatatataacttaaagaaatagaattttactttttataaactaaaaaagttgttgagagagtatcatcgtacatacctaacattaatgagcattaaatacccaaccaaacaatgcaaaatgtttttctcaaaaatatgtcgatggtttttcgatgttgtatcgatatttcagggatagtttatcaatgcgttgtcgatagtttagagatagtttctcaataattttcatgaatgcgatttctcaatattttgctttttaaatattcttatcgatggtatgtcgatattttttcatcactttgtcattaatattacaaaattttgtcatttgctttccatgactaggatttttctattattttgaattttttagtatttgtatcgatagtatattgatatcttatcgacattttatcaatggtttgtgaaat

SEQ ID NO: 194279 - DNA, 790 bp, Cannabis indica
actaatacttttagccacaaaccctttagccacaacacaagaataataatttataattagccacaatttttttttttgtctttagtcacaaattttgttatgactaaaagtaaaattttttgtagtgataagaagagggagtgagaagagaaatcgaagagaatatggtgatcttcaaggtaagggtctcctctagtttgaagtcttgatcacaacattgaagacttgattcaaggagggtgatattgtaataatatttttcattaattagtggtggagaattccttggaaggattttaagagggattatataggctctctacatttgtagagagagaaagttgaatttcttcaaaattttggtgttcatcttttatttctacactttatatttttctattatttcaatttttcttgattaattgtttgttctaactttttggttgaagtttgttgttttaacccgaaaaatttaaagctggtcgatttattgtgtgctcaactaggcataacaatctatgaaattaaaggatcaagaaacggtttatcataaaatacgatattttgaaattgttgatgttgttagttaaaatttaaagttacgatctttgatcaattttttattaaatcttaaggaagagatcaatcaggttgtaaagatcttatgcaaattaaattgcattttgagtaaaatagtattaattaaattaaatcaacagtattaaatataacagatgttcaatcagggtgctaaaaccaaaataaagattcataaaaataataattaaaa

SEQ ID NO: 194280 - DNA, 1319 bp, Cannabis indica
cctatagggattgcatcccctttaaatctaggtataatcgtatttttgggtggacagtgggcgactattccttgtgtggggaggcctatggtgattccgaagctcactttttctcgacctgtccaataacttgtgggttgtggcgcgaaagcaaatggggtattcggtgtgaggagccttgtctgtgttcggggaatgaggttgtaaaatggattattgatccttctaccatccctggttctatccaggtgtgtgatagggaagagttttctctctttgcctcggtcatgtatcaccctctttggtcgatcaggaatgcgaattatcataacaataccaaatggagattttgtgatatgaagaagaatatctgggatgaatttcactttcagtggaagctagtggaaagcgagagaggggattcatttgatggtgctcctcgccctgctgtctactggaagcagcctagacctgggagaatctgggtcaatgtcaatttccctactaaagatggtgttggggcgattggggttgtgacatgggatgaggtcggtggcataaaaagctctttatgctactaaagttcctctgttgtcggtcactcatggggaactggaggcgattggtaaggatgctgaggttcttcgcaggctgggtattaaggaggctgatatcctctctgataatcaagttgttgttcaggctcattctgctttggttacgcccttctggaatgttttctttttgttctctaaggctctgaccatgctttctagtaagaagattgaggtcttgtggatccctaagactaagaactcttctgcccatgtcttggctaaatggggattgtttaacaattgtaaggggtttcttaactgctgggaggtgacgcctgctcaccgagatcttaaatcattatgaataaaaagtttggtttcgtagcaaaaaaacaaattatttaccaaaacataagtagatatactaatcaattattaagtgtcacacgcgtatgatattgagcaccataataaaaatgctaactaattattgaatactatatctttatgatattaaatactttaaagtaacatgtaacaataatagttaaaagaattaaaaaacaaaaaatcataaaaggacaaaacaacttgtggagatgcatttatatatatagtagagagatagtagatatataatttatatcttactattataaaagtgtcataatagtgtgataatcataatgacaactttacatagtgcgataaaaagataattttaccatttgaaaagtcaaaataccactctctctctctctc

SEQ ID NO: 194281 - DNA, 2226 bp, Cannabis indica
tagggtggacaaagttggttatctcagttggaggctcaccggtttctatggtgaaccaaacagaaattgcagagctcaatcatggaaccttcttcgcactctctcttcttcttaatctctcttgtggtgtgtaattggggatattaatgatgtgcttagccaagaagacaagaaaaggaggccaaccatacctcgtgtggctgctggagggcttccaaaaagccattgtcgactgtcatttgctggacttggacctcacaggacacccattcacttaggaaaagagtagaggcttgatgttatgggtcgaaatctgcctggacagagctcttgtaaccgaagctttgtctcaattatttcaaggtgcaaagccatttaatcttgaaacttctcctactcatcactctccagtatttcctgaaccaataattgttgatcaaacaccaaagagacaccgttttcgatttgaaaatgcatggttaaaagaacccatgtgcttctaaattgttaaagattgttgtaatagagatggtgtggggggaattttgaataaatttaataaatgtgttgattctttagcctagtggggcaaggaaataacgggtaactttcgaagaggaattagtgattgtaatgctgagttgaagcatttgaagaataaaagggatgacatttctgttgctcgatatattgaggttagaaagtaatttcttgcaattcttaatcaaagagagatattttagaagcagagagctaaacaattttggttgaaagagggtgaccaaaatagcaaatatttccataaggcagcaagtaatagacggtgcaacaatcatattttaaaacttaaaaattctcaaggggtttttatggattgggagaatgggttagctgatgttgttgtgtagtattttacgaatttattctcagcttttgatacggaatgtagagaggtgattgattgtattgaccaagtagttcccgagttggctaacttggaattcacaaagtctgtcactgaggacgaagtgaggactgtcgttttttaaatgcatcttgataagagcccggggccagatggtatgacccccggccttctaccaaaggtgttggaatattgtgataaaagatgtggtggatgtggttcagagatctttgatacgggtgtctttgatgaagcttgtagtgatgcaaatgtggttttcattccaaagaagaaagggcctgagacaatgaaagacttgcatccaatagctctttgtaatgtgctatacaagattatcacaaaggttatgactaaccgaatgaaaccatttatggactctattgttgcagactctcaaagtgcttttatcccgggatggcctatatccgataacattatggtatcctttgaggtactccattatctaaaacgaaaaagataaggaaagattagttgtatggccttaaaattggatatgagtaaggcgtacgatcgtattgagtggaattttttggaagtgattcttaggaaactgagatttgttgaaggctaggtgcgacttattatgcaatgtgtttcaactactaattacaagattatccatggttgccacaagatgggacctattgttccaaataggggcattcgacaaggtaatcctctgtccccttatttgtttattctctgtgatgaaggcctatctgctttgttaaggaagtatgaacgacatgggtggatccatggttgcaaggtggctaatggtgcaccgcgggtttctcatatgcttttcgctgacgacagttacttgtattgtcatgcttctgaagctgaggctcggggagttcaagaattgttgaggaaatttgaaatggcttcaagacatgaggtgaatttattgaattcatctatatttttcagtactaatacctctactgcggtcagaaatgtaattagccagtagcttcaaatgaacattgcaactaaagacaacttttatctagatctcccaagtaccatgtctcgtaaaaaaaactacagtcctcgattatcttaaagaaagatttcggaaaaggcttcaaagctgggaaggtaagttcctttcaagagctggcaaggaggctttaggtgaagactatggctcaagcgcttccaagttatgccatgagcgtctttttagcttcctaaggaaattagtcgtagcattgaaagcatgatggagagttactggtggcagtcaaaca

SEQ ID NO: 194282 - DNA, 1408 bp, Cannabis indica
aaataaataaataaaaattttattatgaccgtgcaaagcaacataaatcgaacacgtggtcaaaatttagaaaatcaacggctaagatcatcccaacaagagctctaatttcattggctggaagaatgcgtcctcgaaatctgattggtccacgtcacatcagatgacatgttcccacgaaaagctttgttctggtgaagagacgtgcattataataaacgtaaggcttcaatactataaaaggcacggactaacgaaatcgaactctcaatctgaaatctctcgaaagctccattgaagaagaaagagctcaaaaacccaaacactaatctacgaagaagaagcagttaagcaccggaggaggttactgttcgtctccatggctggctcttgcagagctcgcgggtctctgatcgtactcgcaatcgttttctttggtgagctttttaactatttcttttgttattttcagatctgaatgtcatttcgtatgtttgtagtttgattcagaaatgcgatagatctagtacaggttaagcttgattagatttagattagagatcaactgttttgatctttgaattttgtttgatttcgtaagagtagtagtatggcgatgttttacgcattactttctttcgcattttctttgagtttaagcaatttgaaactcttggagatttagatctgaatcttagcattagtttatttatcagtaatgtgattttccttgatttgatttgctaattgctagtaagattattagagtgtgaaattgttataagtgagaagcataagaaattagactagttaagcaaattgattcgtgtatgtgctcgttgaaatgtgtactaaatttcgtaatgtaatataatggtatagaaactaagtagataggagcttttttttttttttgatggttagtagataggagctttgttacgaacattttggaacgtttgattttctgatccatatttctgatatggttgtctctaatgcatgataattatcgtacttctatttacgtattatttttcggattttgtaatgagtaatggttttgtattaacttttcaaatctgaatcacaggtggcctttttgcaattactattgccaaagaggaagcaactaaattgggaactgttattggtattgatcttggtaccacttattcatgtgttggtgtgtataagaacggtcacgttgaaatcatagccaacgaccaaggaaaccgtattaccccgtcatgggttgcgttcactgaaaccgagaggttgattggtgaggcagcaaagaaccaggcggccgtcaatcccgaaaggactatctttgatgtcaagagacttatcggaagaaagtaattcacttttcactttcttatttgtttgttgccttatttagctt

SEQ ID NO: 194283 - DNA, 1427 bp, Cannabis indica
aggtcaagttttatatttcttaacccaaatgttaaacactttttatgtttttcatctaactaagaaaattatcattataatttcattaatgaatactaaagtggatactagagaagattagaattcctaatttctctcatttatatatttgaaccaagtttattgttattctttttcttggtttaattttctatttattattttcaataattctaatttcagttgccaaataaaaaataaaataaactattgatacttgataatcagtcatcgtagaaataatatcggtcctaccgtattaaactacaaaagcgattatgtatacttgcatagcttgtattgaaaaatatgaataaaaaaatctaaaataatataaataaaaaatattaattttttggggacaaaatctaaaatattgaaaaatatgtacataaaaatataattaacaaaaagttagatgaccccgcatgccctcttaacttcacccttccatatatcttataagattttaatattgagttttaattatttattttaataataattataaaaagacccataccggtactatctcttgatagcgctataggcactaataaattataatgtctttggacttcttcaatcactgattatttggtggttccaaagtcaacatgatgtgacagaagaaccttgtcaattagttaaatacagtcaatttaaaaggccatgcatgcaatgtaattcatgagatcattaattatttacttgaaaagttaaacttattagttaccgctacctgctctcaatttaactgattctctcattcaagaagctacggattgcttattagttttggaattagtaattcgctgaaagcattggggataatttaaagtaattctgaaacagaacacgttaaaaggaattacatttatttggagtattagtaactatgtgcttcaatataaaattctagttataatttttcttatattttaagactgtaatattacaatgtagttaactgaacttttatcagtaatataactagtataattgatccctctttcatgccaaacaacttaatatatgtaatgatcaagagctctattacttttaaatttaatataattgcgcattttattaaaaaaaaatataagggtgttgatgaaaaagttatataatattgcagtgaaatgtctccgcgggtagcttacctgctatagttatagttatccagatttaattgattgtatacgcccattaattctgacttaagtatagcccgcttgcttttctcaaacaaataataaaaaaaaaacgagcacttgatgactaaaatattacaaattatacacatttgatcacgaattgacttaaagaaattaggaaacgaaaccgcgtgcgagtagaaaacttttaaattatatttatttaaaaaa

SEQ ID NO: 194284 - DNA, 725 bp, Cannabis indica
gatattttattatatgtatgttatttttgttgtattttgattgttatttttttatgttgtactttaatatataattttgttttttttgtttgaaataaactatataaaattttgatcaaattaacattgaaaagttcaaaaccccaccattcctcaccttgattggttagtgaattccactcattctttatgggtgcttaattagaactttatagcactcgaaagataaaacgaggaggactactacttactttaatcaacctagattttatttcatttcatgaccaaaaaggacattttaataatttatcttatttaaaaagaaaagaaaagaaaagattcgttggcaattgtattatatattgtactagaaatatatagccaatgcctaatattaatatattccaatagaacatttaatttggacaggtcacatcaattattattaccattttattataagtactagacatgtaagtaatagccacgtgttaaggatagcacatggagttcttatgaaactgaaaagaactcgaacctgtttcttggcctctcgttgtgttttataggtaaaacactttgaatttttggagacaaacctttcaataattccggcaaagggaaacaccgttgtttgactaataagtccaccattattatgctactaaataccatgcatccacgtggaacaatcttgagcgtttatcatgatcatcatcatcatc

SEQ ID NO: 194285 - DNA, 2595 bp, Cannabis indica
cgattggaggcagactttgtattttgaagcttttggatattagagctatcagggtttttaatggcttcccaggtgaataacgatggcgttgagaaattgttagctgcaagcaagtcattgagggttagcttagagaaatcaaagtccctagggttagctctacagaagacaggacctagattggaagagattaaccaacgattacctgtcttgcaagctgcggtgagacccattcgtgctgataaggatgcccttgtggcggtgggtggtcatattaaccgtgccgttggacctgcagcggcggtgcttaaggtttttgatgctgttcatgggcttgaaaagtcgttgttgtccgaccctcgaaatgatcttcctggttacttatctgtgttgaaacgtttggaagaggctttgaggtttctgagtgacaattgtgccttggcaattcaatggttggatgacatagtggagtacatggaggataatgcacttgcggacagtggctacctttctagcctgaagaaatcgctgaaaagtctgagagaattcgaaaatgctgagggaaaatctcggttggatggtgggcttttagaagctgcactggacaaattggaaaatgaattcaaacgcctccttactgaacatagtgtgccacttccaatgtcatcatcgactggggaacaagcctgcattgcaccttcaccgttgcctgttgctgtcatccaaaagttgcaggccattctatggaggttgatttctaatgataggcttgacaagtgcatatctatttatgttgaagtccgtagttcaaatgtaagggcaagcttgaaggctctcaatttggattatcttgacatgtcaatctcagaatttaataatgtgcaaagcatcgaggtttacatagcacagtggggaaaacatttggagtttgctgtgaaacacttgtttgaggcagagtataagctctgtaatgatgtttttgagaggattggagtggatgtttggatgggctgtttctcaaagatagctgctcaggctgggatacttgcatttcttcaatttgggaagactgtcacagagagtaagaaagatcccataaagctgctgaagttgttggatatatttgcatctttgaacaaattgagactggacttcaaccgtctttttggtggagcggcatgcatggaaatccagaacctcacaagggatctcatcaagagggtaattgatggagcggctgaaattttctgggagctctttgttcaggtggagttgcaaaggaagaatccacctcctcaagatggaaatgttcccaaattggtcagtttcattactgattactgtaataagctgcttggggatggctataagccaatcctaacccaggttcttgtcattcaccgaagttggaagcatgaaaagtttcaagagaggctccttatcaacgaggtgttgaatatagttaaggccattgagctaaacttggagacatggataaaggcttatgaagataccaccttatcaaacctgtttgcaatgaacaatcattggcatctgttcaagcagctgaggggaactcaacttggggatcttctgggggaccactggttcaaagaacatgaacaattcaaggagtattatgcagcagtctttttaagagatagctggggtaagctaccaagccatttaagtagggagggcctaattttgttttctggcggccgtgccaccgctcgtgaccttgtcaagaaaaggctgaaaactttcaacgaatcttttgatgaaatgtacaagaagcagtcaaattgggttatcccagataaagatcttagggagaaaacatgccaacatatagtgcaggcagttgtgcccgtgtaccgaagctacatgcagaactacggccccttggttgagcaagatgcaagctccagcaagtatgctaaatattcagtgcaaaccttggagaaaatgctaatgtctctctaccagcccagaccagggagatacaacagcttcaaaggtagatcaccaagtgggaagttcaataacggagtgcaaccagagcatcgtcgaactacatctgcagtcatgtgactataataatgccagagctatgacttttttttatctgaatgaatgatgagcctttcactttgtatataagttcatcctcagggagggtggggtgcgtataaacactatctgttgattgtagaaactgggccacaaaagtttttacttcttccaaatgttatgttatccattccattctttgaggttgccttacttatgagatggaaattttgttactgggttgtagaagatggagtctgcctgactatctgaggctaaggatctcgccaactcatggggacttccaatatctcatacatacaaccatctcaacttcagcgcctcagtcattcataattaatagtattgtttcaggtatagctatcaatttttctttcttttcgactcattattgtttcaataggcaggcagacaggcaccaggaaaaaactttatagttgggtagaattggtgtaaaattctttcatataaagtgcatctacaggtctagctgttattgat

SEQ ID NO: 194286 - DNA, 814 bp, Cannabis indica
caatattcagaattaattgtcaagtctcacttatgttaacgaatttatgagttaataactttataaatagttagcgatatttcataatagttactaaattaaattatgtgatgcctgatacttgattataccaatagtaatatgacacctcttgatggtgttaaacaccactaatgcctatttgcatttctctataaattaactaaagagagatagtttgtgtattgtggaattggaactagccgaggcaataggtgttcaggagactctcagttgaataaaggatcaataatggcacaatgtgattcttaagacaaattgtttgtgtattgtgaaagttgtaagaagttctatttctacgatatccttgtttggtcatgttattgaaagttgtaaacttttgtttgcaaatttgagagtgtttttgttttatttattaaacaatcagttaatatggtagctcataactttgttagagcctctattttgtattttgatcgtcacttcagtttggaatctattccaactgttttactaccttatttggtagcagaagtaaatgattaataaagttgatatttccattaaaaaaagtcattattaatagttattagctataattagttaattcaataaatatatattcatttaatattacttttttggtggctgcccactctcatctctgtgtgtacgtacatatctagtattgtagacacgggttaagttgtttaacataacacaagtttgagaggcatgagcataacaaactacgaaaattatggattttggcacgacatggaacagtgctaca

SEQ ID NO: 194287 - DNA, 1245 bp, Cannabis indica
ggtctctgatgaacaagtaaacaataattcttattacttctccaattttaattacatgtttatagatataggtgcatacaagtattgctccatatatggtgtcttctcttaagttgtggctaatttgtctattacatcagtcaatggtagtgtggttcgtaagaagatttggcatcatgagacctcggttttctgctcgatgaaacggggttattggcttgcaatggtgccttcttgtcggtttgttagattggattctggcttttgtgaaatcttaagtggcatggtatggcattgtatcatgctgaaggacattagaaaggcagtgagtgatcacttcttggtttctactttctattagtagccactggtttaaacttgaatcaattgttcattgtcttgtggcggaattcggtatggattctgacggggtgcaacgggtttggttggctttctcaactgtttcgcctgttgtggatggctgaagttattacgattctcaaagagcttcaactatgccaataggatagggcacttgagtcttattgttgaatatgattttctgtttgttaaaactgttaatgctaattgttagagatgcccttcttatttgtactgaattttttgatattactttttctctattgcttggttttttataatttttattaaagtaaaatgtaagatttgatattgaagtgcaccaatagcaatgacatttccttagtatttttcttgttgatattttattttagaaccaaattttattaagaaagtattgccctatattaaaaagatttcttcattaagacacgatttaaataagttttctcttttttgtccaacaaaaaatataattaattaagaattattatataatatctatgtagtggaaattgtcactctttatcgtccactctaagaaggagcataatcatgagacttgtgatattatacacaaacaaatttgctcaagtgggaaattaattgcactatgttatcattcatgggttagtggagactttttttctccctactttcacatttaatctcaaaattttcacaaatactacattagaattggatggtgtgtttcctataaatttaaaatttaaagattaaaggaagttgaactagatcaacttgttccatccaaatatgtcaagttggaatatcataatgccctactaacttgaatatcataataccctactttttctttatcaattgtacaaaatgatgatc

SEQ ID NO: 194288 - DNA, 2117 bp, Cannabis indica
ttttttcttaatttaattaattaacattgacttgtgtgtatggtagtaggggtggggagggttgatatttagctggggagttgggtattttgtgtgtttttggagtgattgaattagactcatttcggtgagttttttgagtttggtggttgttgagtcaagaacgaaccccccgttgtgactcatccttgcatggtggtaagaataactacgtatacgaatgaccgaatacttaattgagtttcaaatcaattactcggtgcaataacgagttttcttaacacaaggcaagggtggtggttcgggtattgactctggtcaaccctggtgttggctcaagtagcatttaacaaggttgaaaatatttcccatgataaaggaaaaaaaaaatatatgcattcttgatttaatttttattacttgatgaattccctttttaatattatttttattccatctgttcatatattaagttctgatacatcatatatttatttcctctcaatcttggtgttttcatgtacatgaatttgtataataattaattaatcttaaaattaaataatggatatttgaataaataatgttttgaaaggaaaaataaaaaataattgaagaaggcatcaatactaaaaaaaaactacaactctcgtactataaatataaggttgtaattttttaaaatagatcggcgattggaatagacgtgccgtcaggagaaggtatgtttggaagagtcgatggtataatgatgatattggtttgctgtcgatgagtgtgtatgacaatgtaaatgggtcattaatgaaggaggcagaagctgttgggagaaagcgttgcaatcaataaatgctggttttttggcttcgcctgatcaaatatttatcttttgatggcatccccttccgtttcatgctacaaaccattcatgccatgacacgtgtctggctacgttatctgagttcacagtaacggtgttttgctatataatgtacctatcacaggttagcttaacctaaggatttgtcacggtttggagtttggtaggggcacaacctaaagtatataatatgttacatctgtttgcatctatttattcaactattcatctccattccacgagaatctctcttcaattattcttatcagattattacactaagtttttttttttgtttttcctttctaattaactgaataagaaaaatacaaaaataattgaaacttctaattcgatgttttataatatcatttatcatattttttttcatgtgattttaatttttgttattattaattataatgaataataaaattttgatacacagcatatgcggtttggtttaatttctacgtaaagtcaaaatgtatttttaatcaaatttatagtgtgaggaaatatacaaataataaatatatgagtgtcctaagagatatgtataatataccagaatcagtacttctggaataattatgagattcataattaatattgtggttttgaatttgtgacatttgagtactttcttttgactattcatcaatttttacaaacttggcagtaatcttgtgtattaaagctgcaggaccctccttgagaacacaacgtacgtatattcagaacgagaataattaacatgataatgcaaattattatcaacaaaatctaattattaatatttacaactatttgttatatactatgaagaggagaaagtcactttgtaaagaaaaaaaaacaaaagacgatcgagcacttggaaagtgagaaacaaaaatgatgaaataggcatagaaacaaacaaaaccccgttattctaaatattcctaataacaccaagatatagatagctatggctagaccatacatatgcacctctctctctctctaactctttcttttctctctcatacatgcaaccaaatgtacacgtgaggattcacaggaaatctcccagtatatatatatatataatatatatatatgtttataatatcgttggtgtggacgaaggtaataaagtcaagacagtgaaaggctatccgaaagtgggaaggggatttggccctcacaactttaggtatataggacattattcatttggactttttccttt

SEQ ID NO: 194289 - DNA, 1278 bp, Cannabis indica
aaaaaagaaaaaaaaagacttacatacaaaaaattctgaaaagaaaaaaaaaattatttgaattaatataagaagaagaagaagaaaaatagagtatagtttaatggaatttgtttttgttttatttccctcctaaattccatattccaaaaataactatacataaataaaaaagttgtctaaaaagtcaactaagaaatcctataagtttacttgaactttttttcacttctcactaaaaaaaaatataagtttacgattattacagtcttgtagttacattatattttaaaattcaaggtgtatttaaatatagagtagtagttatatatgaattcttaatattttggttgacaaaatagttaataatttcacaagaaaataatattttttagtagttaatatttaaaatagaaaaatttagtaattacattgaatttttatgagagtgtgtaattgtaacccctcaatttatttcaattacatagttataatgtaattgtataatcagacaaacatgttaaattgtgtaattacttctcactacacgaaaaattaattactttccaaacacgcactttgtgtccatcaaaagtttaatttatttatttttgtataaagattaaatcaataaacatatcattttgtagttctgtctgtcgttttggtcctcctttgttgttttttgattatctcactgtcgtttcggtccttttatattgtttgttgcctttaacagagggtaatgttactgtcgtttaggtctttgtatgtcgtttgttgtcttcataattgataattggaatctcactgtcgttttagtccttctatgtcgtttgttgcaatgccaccgcataaccataacactaatcactcaccctttttttttattaaattcataacgtagaacaaagtacgtattatttaatatcatgaaaatatagtatgatcactaaagaaaaagtctaaagaaatagtgaacaattatatcgtgtatacataaagacaactaatataattttgatacgaaatctcaacattgtatttagattagatatataattataattaacatatggcttgaaagttgaataatatttagactcttgagtattagggtcgacccaaatagtgtgtgtctttaaggagaaagaaaaaattgggtctttattctaagaatatgtggtatttttcaaaattattataaaaaatcgtgtattttgtaaaaggaatttttgtttaggcctcttggactgaatatggactatttacataaaa

SEQ ID NO: 194290 - DNA, 3699 bp, Cannabis indica
cccaaaccgagaccaaatctcggaccaggtctagcatccggactgtgacccacgacccagactcgaactgggacccagacgtagaccaggacccaaacccacccgaaccatgaccaagactgggacataggatccaattatggattgtggacccagacccaagaatcaggccttagaactgggaccaagtcctagtatttagaattgggatcgagacgcgggacccataactcgacctagacctagacctatgacttaactcggaactcgagacctgaacttcgattaggatttgaactgaggatccaggccccgaggcttcgacacgacttgtatttagtgtctggatctaggactcagaccaagacccaaacccggacccacacctagaccggaccctgaccaggatcaaggacctaagaacagaacctaaactagaaccactaggaccccaaagcagtacttgcacctgaacctgagcccgatcccggacctagatcgagaccaaactcgaacccgaacaaaacccgaactcaggaccaagacccgaaacaaggactggaactggacctaaacccgaaccaaaacccaaacaaaagcctaaactgggagttgagacccgagacccaaacccagaccagaacctagacctggactgggatagggacttggactcagaccgggacctcgacccaaactaaaacctgaaccaagactggaacctagactcggacctaaactcgggatccaaacccaaacctgaacctagacctagaccgggatctaggattcaaacctcgataggggacctggggcccgaacccaaacttggaccaaggatccggacatagatgggggaccttgaactaggaacaaggccccagaattgtgaccgagacccaaaactcgactccatgcgcaagacacgggaccgaccccggaccaaaaacccaagacctaactacccgggacacaaccccagactcggacctaaacccaaactttggatttggcccgggactggaactggaataagaccgggacccaaaaccgagatctgaatctagaccagaggatttgacctaacccgtactcaatgtttggatccaggactcggacccagatctatacccagactcgaactcggacccacactgggatccagacccaaactcggacctggaatcagaataggactaggactagaaccaaaacctgggaacgtaacaagacccaaactcaaaacccaaacttagaccagaacccagagtgggactaggacccataccgggaagtgtaacttgggacctaaactaatatcgaggtctcggacccaagaactacgaaccccaacgttcgggaacccaaaacctcgaacccaaagaccgacgacccggactacaaacccgaacccaaatttggacctggacttggactgggactcacgacccaaacccgaaccaaaacacaaacttagacccggattcagacctaggacccaaatatagatgggggacctgaactcgagaattgggcccccgaactgggacaagaacttgtcctcaaaactttgatcaggatttgggacccgaccctagagcaaaacttggacctactttgggacctgagatttggaaattgatgtttggacttgacccgtagtcggtgtttggttctgcgactcggacgagaacccgaacccaaactcaaactcaaaccaggacccagacccataccaagacccagacccacacttgagacctaaaatcaaaacttgaactagaaccggtctgagatcttggaatgggactgggatgaggacccaaactcgaacccgaaactgaaaccgaacctagcctcggaccatgaccgagacattaacccgaacccaaaccttgacccgaactcaaataaggattagaaccctgacccgtccctagattaggaccaaacctacactgggacctaaacctaaaaccagacccaaattcagaccctcacctacaactggaccagaacccagacccagaccaagatcagaacccgggtcgcaaaactagaactgaacccaaacccacattgggatcgaaacccaagactcagacccgcacccgaacccagacctagacacaaacccgaacctagagccagaaccggacctggacccaggccaagatccgaacccaaatgcaaacccaaactcagattagtactcgaacccagaccccgacctagacccaaacccagacttgaaatcgtaatcggaactggaacttgactaggaccaagaccaagaccaggaccaaaactgatacgaaccacaccaatagttgtgatgaaactcgaaaccaattattgcaaccttaaactcaaaatttggaagtggacccgcgacccaatgtttagttaagcatgaaccttggtatgaaggaagacgacacaaatggtggtggaaattcgtttgataagtcagttgaacgccacattgaatactccttgataagtttgaatagttctctcaagaagttaagaagaaaatctctcaaaattttactcaaaataatctaattttgcaaagaaaacccgtagtcagtgtttgaatctgggacccttacccagactcaaacgcagacccaaactaagacccaaaacaagacccaaacccgtaccccgtgacctgaaattggaagtggaccgagacccaggaacaagaccaggactaggacccagatccagacatggaccaagtcgtggatttgaatcaaaactcagatcgtgactcgagacacgaacccaaacttagacacggacttggacccagacaagaagccatgacccggaccttgattggagacctagacctggaccttggacatggacctagattggggacccaaacctgaaattagaatcagaagtgggacccaagaccaaacccctgtctcaatcccagattcaaacccggacacggacacagacacggacatggaccgggaccgggacctaggatcccaatcgaaaccagaccgggacccaagattgggatctagatctgggaatcgtactaagacctgaatcgggacccatttcagaccaggacccaagactcgaaattggaacaagaaccagaattgggaccctataacgggaccttgacctagacctggaacccgatttgcacgcggaatcgaacacggactcgaacccaaactgggattgatccatgaactcataccttaactcggacttagacttgcaccaggacttgggacgcaaaacccgaaaccctggacctatgacccggaacctagaccagaacccaaaactttaccagaactcagacccaaacaaggacccagacaaacccagattaaaaattggacccacatccaatcccagacttagacccagacccgaacctgaactcctaccaaaactcagactcgaacgaacgactcaggcctggaccaagatctggagtgggaccaaaactcggactgggacctagatccaaaactagactgggactgggacccagactaagaacgagacccgcgacctgagactcggacctgagacttgagaattgaaccgtgacccagtcccagactaagtcgggactcgagataaggaccaagacccgaacacgtacatcgcactcagacttagaccctaacccagactgagacctaggaccat

SEQ ID NO: 194291 - DNA, 2525 bp, Cannabis indica
agaaactcaagccgtaaatttaaaaaaaaaagttaaaaaaatagtatatatgataattccctaaatttaaatctgtagcaaaaagaaaggaacaaatttgaacattcggagcatgtcaaatccgacccgaaaaaataacctaatggaacagagcgggtcgaatcatcaatagatttggatcggatcagatccggtcataatcggataagatctccatttacactgctaaactccaactaatggtcctattttgattggtagaataaaagcagttaacttgtactggattacagcagatcttaaccttccaaaaccctaactcttttgttctatctttcactgactcacactttctctcacttcccccacaccaagtgcgaagagagagagaaaaatcccaagcgctagggttttagccgagcttcagaaggtgaactagggtttttgccagagatgaagattgtagaagacaaaggcaaaaagccgaaactcgctgagaaaagcgacgaccaaaattccgatgtcatcgatgagaagctcgtcctttcaatcgagaagttgcaggagatgcaagatgagcttgaaaaggtaaaatgtcctctgcccttgaaccgatacattctaaaagttttaattcacaacccgaaaattgaagagatagtctttttttattattattattttactctgttttcggtgattatttggaaaattaagctaaattgagccgtatacatatgttatatctctgtatatgtgtatattatcattgactcgcttcttttgctgactagaattattgggtttggatcattaacataactctccttagacatgcgggaattcaattagaaatatgatgttctgggtcaggattgtgttttgtcctatgtatttatgcacacacacacacacatatatagtttaagctattgttttctctatcctcctattttagatagacaaggaaagtttgggtttgtggctgttatttttgttttgggttaagtgccctgcttattttgttccacattgcatttgaaagttgtaagtatgatcagttattgctactagcacatagaactgcagtaataagctgcttggagaaatgtattaaagttttcattgtttatctgaatatcctagatcaatgaggaggccagtgataaggtcttggaggtggagcagaagtacaatgagatacgcaagccagtctatgataagcggaatgatattataaaatctattcctgatttttggttaactgctgtaagtgatatgggtttctcctctaacatttggaaagagattatatgtcttctataatctagttaatgaattttttaaactaattatttttttcttctacttttcagtttctgagtcaccctgctcttagcgagcttttgagtgaggaagatcaaaaggttggggttttatttatttgtgctgcggcccagaactctgttattactgctgttgcttagtttatttgaatattgtttaatgtatattgtcaattcctatggctttaatacagcttatcaattataagaattaatacagtttatcaattacaagataagacaaagtaatgaattcgctagaaaggctctgtaaagcatttcaaataatttttttattatggtcttatacactaatatatatgtgctcgtggtttcttctccagattttcaaacatttaacttcactagaggttgaggacttcaaagatgtgaaatcgggttactcaatctcatttgtgagtttaccttatcttctctgcttagcttagaatccattttgggtcacaatattttatgatgttactgaactctgttttatactaagtgaccatggtgttgtctccattattttacagaacttcagccccaatccttattttgaggatacaaagattaccaagacttttacattccaagatgaaggaacaaaaattactgctacatcaataaagtggaaagagggaatggtatggtcctttctatcagtgacttaatgtcattaaaactttcattttatttgttggtattgtaactaactaattgaataccaatatcttaagggaatacctaatggagttaaccatgagaagaaaggaaacaagaggcctccaactgaagaaaggttagtttatttgtgataaacatgagtttacacagtaattctttttccgcaagctacgcacaccttcactagtaattgaattattcgtcgatactgtaaattaagcttttcttacaattgtgataagtttgttttcacttgaatgtttcctcttcactgacagttttaaatgacattactgtaatcatttcaaataatacatggttgcctcatagtcagcttctgcatgttgttggtcagcatggtccattaggttaagcattcatttttaagttttaagaattacgctgaaagcaagtaggagtaatttaagaaaaatgcctacttaaaattttctattttgcttgtctatcgattacaataataagctctagtat

SEQ ID NO: 194292 - DNA, 2003 bp, Cannabis indica
attattcttaatgaaaaataataattattacaataaaataataactattaattaattactcatatatatatatatatatatatatatatatatatatcaatcatattctatgtatagataagcattacaaaaatcatacataaaattttgaacggtgtcattaagttcaaaaaaaaaaattaaacggtggaaataaatatcttgaagggtattttatacattttagtgaaaaatgagtataatttggtaataaaaaaatcactaaaaatataagttggaatttaaacaaaatatgtaaaaataaaatagtatataaacaaagtaattaaaacaatttaattaaatttgtaataaagacaaaaataaaacgaagaggcaagcaagtgcaaggctagcaccgcggtaataagagccgccacgttgtattatataaataacccacatgtcacactaagattctcacccacctttgccatgtcacagttcccgccaaaactaataacttcaaccctcaatcttcacgccacgtgtccatttccccaatcccaactgtccacgtcatccgaatactttcaacttttccaatatgactacaggacccatcttaacggaccttctaagaaatcaacggctcagatcattttgatattgttctgtgatcaacttcgactcctataaataggagggaaaaatttgaagaaagaaagaaacaattcattcgatgaaggaaatcactgagaaaagctccgattcgattcagagaaattatcgccggagaaaattgaggacgacgccgccgatgagaaccttaagttcggaaaaaacccgattacggatccgatgattgtcgtaatagtaaaagattaatgcatcgaaagagatcaggatcatttaaattcacagaagccgtcgttcccgacggcgaatcgagtcgatcggaagaatcaccgccgaacatttgcaagacggagaaactcgatttcgacgatgatgatgaggaaatgaatattttcccttacgtatcgaacggttggatttcggtgataggaaggcggcgcgtgatggaagacgcggtagcggtggctgagatattagattcgtcttatcatttcttcggtgtttacgacggtcacggaggatctgacgtggcgaatgcttgtagagatcagttacatcgtcgggttgaggctgggattgggggttgcgatggtggaattgtggattggaataaggttatgaggtattgtttcatgaaaatggatgaggaggttggagggggaagcggttgcggcggtgagattattcatgatgtgggtaaagctatgtcggttaatacggtgggttcgactgcgatggcggtggttgtgggtaaagaggctattgttgtggctaattgtggtgattctagaactgtcctctgtcgtgatactattgttgtgcctctttcacgtgaccacaaggtaattatatcatccaaatatttgtttagaagagaaatttatggtcaaaacccttaacaagtatccaattttacttaatttttttttttttttggttgttaagtgttaattaaatcagttaagtggtgttgagaatgatgggtttgataaatagagttgatgtttttatatatatgtttcatgaatatacgtataataattgtaaatattatggattttgtcgtaaatatttctttaatgatacaaaatagacagtgtaagcttagtaatttttcgaaaaaaataaattactgaaaattaaaaaaaaaataccaacagtaaaataattgagattaaatattaaattatacactaatataataattttttgtgtactactattttattttttactatcttaactagaaattattatattgatatattttaatataggaaaccattaactatacttatagtgtgacacgttgttatgataaaatttaaaaataaatatttatgtaattctatagttaaaataagcagttatatatatatatatat

SEQ ID NO: 194293 - DNA, 671 bp, Cannabis indica
ttttgtttccaaagaaagaagagatcatcattatgtaggagttagctcgtagacacgatgttctaccaatatttttcaataaaaatcattcctttataaaataaaaaataaagccgaggagaaaatataaatatatgttggaaaagttagggacaaagaaaaactgacttctacggcaacaagggcaaagtttccagcattggcaccagtctttgcgccacctttgcgccaattgatgaggcgaagagcgtcaggggagtccctagccatgccgagagcgtcgatgagggaagtggctagaacagactccttgaggccataggagccacgctcgcggtccagattggggaggatgagtcgtacagcgctgaagtaatcggcgggtttgcagaagttatcaagaaatttccgaaacttggaacgcttcttagcagatgttttgctcctgagcatccagttgaagagactgcagaggacactgaacttggtttcctccgccatggaagttcacctaaaggtcgatgcttctatttatatggaagcttttagtttggcaatgtaaatggagaaaacaacccagagagagagagaaagagttgtgctgagagactctgaagcttgcgagggaaggacaactcaaacggttattactttttgtatttttttttttt

SEQ ID NO: 194294 - DNA, 1571 bp, Cannabis indica
tactaataatctcatacccaccctttactcacccctatatatattaacttaaccggacttttttaatcaatcgatcgtatttgcttaaagtaaaatttatcaattaaatgtcatgttttttttaacaaaaaagcaatagtatagtatcatatatatatatatattttttttggtctaatgttttcggcatattttggcttgcacattgagatggaccatttcatacaaaaaaaacaagaaaaaggttgtgtacagagtctataaaatctagttgccaagtgtagatttgacaatgatcaaggcaaaacgaatataatagaagtcgttcccacgttggagtatgactcctcttcatgcgcgttttgcttacctgaaggctgctaaccaatcactgcttgccacgtcgtccatttgccagattgtcattagcaaagttgggccccacctagagctgtcatccaatcatccgcttcaccaactaactcactgaaccaccctaaaaacgttccctctcacctccaaatttcaatttcttatttctctcaaatatttttgtctgatagtcttcagtctctctgagctgaccaaatctcacacattttaccgtgaaacccggaagcttcgacggaagaacctaaactgattctctgccgaggtctatttgctccggcaatgtgtgactcacgcgctctagtctcagctgctctttttttaagcttggttctagcttccgtctctgctcagaaatctggttccaagtctccatggcaaacacttagcggtattgtgtgtgtgtgtgttttctattgctctttgttattcttaatgtatttgatgtcgtacttcgaggacagattgttctctgtttggatggtgagagaaagaaaatatggaatattgaagttgatcgatttacgaaattgagtttaagccggaagacatgaaaatctttttatgtgatgagctgacctcagttattgatttgtattatttttgttatttccagggaaatcacctttggtgatagcccacggtggattttcggggacattgcctggttacagcgatactgcgtacagtttagcgttgatgactagcttacccgatgtggtgttatggtgtgatgttcaattaacaaaagatggtgatggaatttgcgcttcgaatgtcaacttagacaatggtactgatatttcagatgtttataataaaagggatactgagtacgttattgatgggaaatctaccagaggatggttttcggtggactttactctcaaagagctatcatctgtctccagtaagtataaacttatttattcttttagctcagatttacaaaattcagaatatgatctttgtgaatttgacatatattctaaagatagaaaagaaaaagggggtaaaaaaaccggtaaacttgagacagttttttggctactaggttatggtggctatacaaacccgaaaatgggatttaatgatttatttatttgttaaacaggttaaagatgggatttaatagttgaaagtatttttcagatgtgaataaatctttctacttattcttt

SEQ ID NO: 194295 - DNA, 1441 bp, Cannabis indica
atttaaaaattactaatatatatttaaaaagaaaatatttttgttgggccctaaatccgactttgaaggaaaactcgccatcttagacactatataagtctgtcaatcaatgtccacaatacataaattttaaatcgcaccacaaaaatgtcaaataatgagagcgaaatataatttatatctattgccaaataatttaacagcaagttaaattaataatgaatatcattataaaattcatgtattggtaacataatttataaccaatggtgtacagtgtgaataatttaatgaacactttagctaataaacttttgttagttgtgagcttcagtcaacagatactcatttaaaacacatatcaaacaaaggattttttgttgactaatcaaaatcttaaactttttaattaaagattttggttggtaacaacatcaaatcaaataatatataaagtaaaattattactttatacctactaacattgtcacttttgaagaccacatggtcaatagaacctcattccacatgattattacttattagaaccacatggttaatagagtatttggtattgtatattatatggtgttaattcaaaaaaaatatattttaaattagattcaaatattggctcctaatttaatatttacttaatttaattgtgcaatgtattaaaattgatgactagttaagatttttgttctgaatttttatatgtatcaaatcatgctcttaaatttttttaagttgttaaattttttttcatgaactattaagaatgttgaatttatggattttgtctaattttattcaatttcactaaagtggcgattgtccatgtactaaagtgtgccccttaaattttaatatctaccgaattgtatcccctgaatataaacatgtaccaaatcgtgctttctgaatcttcatccatattacttagacttctgttagtaaaattagataaaagtttttgaatcaaataatctcagtagttcgagaaaaattttaaacaacctaaaaaattctagaagcataattggtatatatcaaaatttgggagacaaaatcttaattagccaaaattcaatataaacatacaagtgtcactacaaaattaaatcttgtattaaaatgagagaattattaataaagaatccaacaatattgtaaagatcatatggttataatatgaaaataactaaccacaaccataacaatatttttaaatatagaaatgctatttaatttatagggaaagagtgtaacttcaaccataaccatattggggggactaccatatactacaatatattgcaaatatttgcatatatacatatatttttatctcatgttaccaagcaaagaacatccaccactttgagcaaaaacaatgatatgagttaatccatggtaagttattttaaattgaaatata

SEQ ID NO: 194296 - DNA, 1482 bp, Cannabis indica
ttggtagtatagaaatatgtgtaatagtaataaatcataaaagcaaataatgaagtgcttgttcggtaatcattaaaaaacagttttcagtttaattaattaaaactaaggagaaactaaaaatatttttgttgtgtaaaattagaaaaaataaaaaacacaaaatagttacccttaattaattatatgtagtgtagagaaaaagaaaaagaaaatctcaaataagaggaaagagatagatttatggaaaagaatttgttggtgtcataattaatcctaattggtagaagacagtgattatggaataatacgtggtattaccttagtcgtataataataaaggatataattattatttactaataattaagctatctgatcagcaacttttaataaaaaatcctgatgtggccaaatataaatctcattatatcagaataacatatatgtacgttttagcaacttagtactcaacccagattttaatttactaaattcgttccttttattttctatattcaacatcttataacgaggtctccctatatatttcctctatcactctctggtttcccctctaataatgtatcaatgtataattactgctacatgtgagtattattgtacttggtgcatgggtttgaaagtccaacctatatatattcgatcggtttgcaaagatgttattattagctattactttgtctactattggtccaattattcatcatgtactattttattattacagtactgccattcttagctcttgtcattgtctccccatctcctattttatttactataaattataatacagttatacgtaaactagattgtttatcatatagtaatatcatctactcaacattaataatattaattccaacatataaaaggttaagtaaaaaagagcattactataatattacacagttactcgtaaactagattattattttttaccttttctctgagtatagtattagtttaaaatgcgcgtattcatataatttatacaagcacggaaaatatatattattaattgttattaataatttgtctagtaaaaacaaaaaacaatacatttaattttgagtggcaattaaggaaatttctcaacttgcactcgtgagtcgtgatcacttgcttgacccatatctttgcatcatgtggtctgatactctgattgtcttttttttcttcttctgtttgagatctcatagaatttttatttcattttatatatattgagggtatagtcagataatgatataataacaataattgagttaagtgatgcatggtaatgttagagatagagtgcatgcagggggagacatatatataagtcaaaaaggtagacccagttaatattaggcagatggggctgggctttaaaggggtcccatatctgtttatttgaatgagagtgagacgacactgcattaaatatcatgtaccctataaatatatatatat

SEQ ID NO: 194297 - DNA, 3161 bp, Cannabis indica
ctaaaaaattggtaaaatgtttgctataataaaaaatacactgtcaaataaaaaataaaaataatactttgtactgaaaattagctcaataataaaattgtattttgactttgaattttttacaccagattaattcagtcttaaaattataactctgctagtttacacaattcctcctaaattaacaatgattcctttctttgattcatgttctcgagctggtaagtgtttctgagttgtattctggtagagtttcgattggtctagtgtgattaagaatatgttattcttttttgaatgatgagatcctttatttataagccggaacgtatgtcatgttatttccttcttctgttcaaattgatccacgtaaatacgcccttcttatctccttgcgcgcttttctttttactatgcttagcaagttccgctcttggttgtcacaagctcaagtcaactcgcccgtctttttctttttcttttagtaaaacggtgtatttgttcctgtcacattatattattaattggctattatattcgtaaaaataaaattatttttatgccctcaaaattattttaatccattacaattataatttttcttagtgtcaaaaataagaaaagctgctaaggctggagcaaaattgatgctcatacttaaaaatatatttatattatatatagagaaaagttattaaaatttctccgttcaaaaattaataaaaattaaaagtatagaaaaaataaataaatgtcacattttgagtgagtattataaataaataatgatatttaaaatatcaaggggaatacatgtgtttagttgaattcttggacctctctttgattatcaaagaagctatattttagtttattataaagtattgttatggagtatatttcttaatggatgttcatgaatataatattttatggttagtataatattagccatggtctccaacatttggccaacttatcatttaattaagtctattctttaatagcattttaattcacgaacttaagcatttgtcacaattaagttagtcatttcatacatatgagagtctaaatggagtttatctaaataacattcctttggcattgggaggttatttttgctagggaatgttaaaaatctcaataggcatattttcttcatcattaactgtaacactctagtaggttaggcacgtgacgcacgtcgtcatagtttataatttattgtgcactcttttactaatcaaaaatttattaaagaggatgaataattaaaacctttaaataaaattaaactttaaataaacaattactaaatactaaaagttatataattctgagatcttgattttgttttacaaacttaacaaaaatatttcatatacaaaagtatccctcgacgactaataaaatatgagcccattgttcagaagatccaaacacttcagatctaactatctcaatatgtacgattttcattcgactctagacttaattcgtggtttggcttattatccacgtatgaatctgtgcaccaaagtcctgacaggccaaaggctggcctgccatgcacctaccagatgcaagctggccgaccatgggatgtccagaacatggctggcctatgttggccacagggctggccaggggtggtcggccagcctccttgaggtggttgattgtcacttcgtcatcccgcttgagtattcaaacttctcgtttattgaagtactaagtagatgacttggccttctttattggcgagttgtactgctacatcccactaatgttggccacgtagacatgtcacgtcaggtgggcaaattgagataacattattgttttacccttctaattactcgtttatcctttggtaccattaattcactaatgaaagtataattttgatccaatctaaatttgtgcacaacattttagttccagaattaacacttaaaagaaaccaacattcgatctgctagaaaagtcaagattctatataattgagatcatgttcctagctatccatattattagattcctaaagcagaagttataaaagttatcttctataagaaattttaacgagtaaattaaagaaactaataacatgaacatgagttcataattaattaagattcaagctgatctactatcattaggtcttataataaacatgttgtataaagatagtttaatttcatatcgcccttgtcatatataatttctattaaatacaacacattcacttagatgtcatactatatcactaatttgaatcattactatatcactaatttgaatcgagattgtttgcactgaattgtgggtattaataaattgtactagcaaccatttgattaaagattctataactttaatatactgctagttgttttattcatagttaagtggttttaattctccgtacaatacaagtcacaacattatgtatgaatagagaattttttaatatttatatgtaaattatttaacatttaatattaataatttaataacattcaaacataaaaatgttttactcttatttataaagagatatatttataggcttctcaaggcatagattctaacaattaaatgtgcactagcttgttatcagtttggtttaattgagaggttgacccaattccaactgatattatttgtaatgacctctaggttttcttttcgttttaatcaaaatacattttttctcaaaaaggagttgtggtgattaagtgataggaacctcctagacatggttgtttttgtgttaattgtgatgttagtatatctagctagggagacttttgtgggctgggccaggtgattgcaactgaggtcaagcaagctgagtgctttcagaggtgttcttcttttaagctaagttaagttagctcatttttttttctcatcttgctattaaatataatagtaatcaaattcggttgggggtatttcttatttatgcatagtgttgtaaatacggactgaactttttaatacggcacgagcacgaagaaaaaacaaattaaaattttgtacttaagaaaaacaaattgaaatgtcgtttcttgaagaatgtcgtcgttaacttaggcggtaaaggtgaaggtttaacaattatttgaacaattaattatgaaaaaagaagg

SEQ ID NO: 194298 - DNA, 1740 bp, Cannabis indica
agagtcattttcccaaatcaattctggataggcactaattaacacaaccaagaaatcatggttacctactttggttgcttccatcaataagtgaaatggtgaactaattagactactaattgcagcataattgtaacgctctaacttcaaagtttgattccacagccttttcaccaatttttaatgcttttgattcctcttgtgcctctgatttgccaaataatttggaacatatagtacctgatcataagacatatgaaattaaccatactatttccattttataaaaattgttttcatttcgaagtattatgttatttcttctaattttctaaataaatgaaatgttaattataaaagtttaaataaaaaagttcctaaaactaattattatatatattttgaattttgttttcaacatcgtaaattatttagaccaaagtggatcataacacttaattaacactacaaaaaataactgtatttagtgataatatatataatttttttagaattaaatgtgactaatattttggaactaaatgtaattaaaagtaaaaatttttgtagtgtaataaacaaattaaactcctttctttttttggctatagattaatcaccatgattaaattattaaaattataaagttgaaatataaaagaataaaaagcttaattattatataataatgatttagtatattacttttaggagatgagaacaggtaagggggcttccgagacaagaagtgcaaaggtgttagttcttcttcactgtccgtactattcaccacacgatttgcaaatacaacatcttctaccatcgttagtgctaaatctgaaaaaaaatatataaataaataaaaaaaaaaatcaacttcttcaactgtgttaactaaaacaaatttataagaatttaatggacataacgtaccatacaaatcgttgtagatgcaattgaaaaaaattcccattttgtctggaattctagtagcaaaataatttgtaatttcaggttgctcatacaaatatgatgctacctctccatgaccaaatgaaacagcaatggcaaatgggctgacgtcagcaatgttcgaagtggtgatgatatctcttggcatattaacacgacgattaagaaattcttcaaccattttgatgtcaccggtagcacaagccaagaaaaaggcggtgttgccgtttgcatccacctctgcgaagttgatgttccccaaatgttgcttaaatatttctttaacaaactcggtttggctggctccggccgccacatggagaagagtttcccttctgttgtcagtccttaaaaggtcgttgttaatcagatcataattagggttttcattattgttattattattaatgatacgttcagctttagtgtagtctccactaagtgctgcatggaaaagggcaattctaaccgaccattcacctgttaataaatattagtcacttgtagtaaatggtataaataaaatattgataaataaattaatgctatttattatgatgatctatatatacataatgatattgtgaagtacttcataaggaagagggcgcagtttactcgtacgtgaagtgatttggggaggagtagttggatttgtagaagtagaagcctgatcatcctgaagattttgatccattaattgctatagcacaatgcaaagttgtgttgatataagatacaacttaaatgatcaaagtgttgtgttat

SEQ ID NO: 194299 - DNA, 1393 bp, Cannabis indica
aaaaactaagccaacaaaacaaaaaaaaccagcaatagagtctaacttctaaaaaaacaagaaactaacaaactaggataacacatggccatctgcatcccaagggtacagggaaccaccaaaattgaccaaatcgaagcacccaaacattccgtgtcgatttgcccagcgagccgcatcatgggccacaccatttaagtttcttcggatccaatgagcctcccacaagttgagagcagacactgcactgtcgaatttgagcagacactgcactgtcgaatttgagcagacactgcactgtcgaatttgagcagaaggctttggatgttgtggtgattggttcttaaggaggactggttgcactgaatcgcattgatcgcattaatggagtcactttggaaaatgaccttgttgaagcccaactcagaagccatttcagctcctttaactaaagcataaacttcccctgcaagtgagtccatgtaataggaatggaaagtataaatctttagtgtgtcacctttgtcattacgaaatatagctgcccctgccgattcataatttcccaaggaaatatctgtgttgcacattatccaacctggagggggggggggggaaaccagttcaattgaacagagcagtagccatcatgaactgaagtaagttccatgagacgttgatttatgcgatggatcaaaactggcaaaggttcatgcgtgttgtcatgagttagtttgtttctaactctccagatttcttcaaacaccgttgctgttcctcccagaaacaggtgaaggtgcattcgattagggcgtttatcttcatccgagaaccacaccagccaatcctcccaacttgcagccgtgagcgcatttgtacgcacttgccacatgcaaccaaaccatatggctcttgtgaactcacagctccagagcaagtgaagagaattttcttcatccatgttgcaaagagggcagagggcgttatccaaggcaaacaccatactaagcctagctttggtgagaaggctattggacagtattttccaccatatcatcttaagacggttgtgaatcctcactccccaaacggttttccatttagtatactcaggccggtttgtatcaatgttcaaggacaaacggtaggcagattttatagagaactcaccactcggttctggcaggcagattgtatcaaccaatactcaggctggaagtgatatattcagaatccgtctagtgtcatcgaaattaaaccactgtctaattaatgcaagatcccactcattatttctgatgaaattacttaccaagctaattccacctgtggcgtcaactcggggtattggttggaggcgcccacctggcacccaaggatcgaaccagatgga

SEQ ID NO: 194300 - DNA, 2243 bp, Cannabis indica
gacctattgtatgttctgcctcctttagcagaaactggagtttgcatcggactgttgttaacaatattaatatatccaggactgctagcccaatccctatgatcaacttcgttattctgtaatgcattcttccgctttaatagctaaacaacaataagccatataaactcaattcagtaaaaaggcaatctaccaaacaagaaattacttgttaaatgcacaatcatgctggacgactcaccattataaagaacagtcaaggcataatacaattagcaatcatgaggcttaagaatcaaattcaagaacacagcatgacagctacgtgagactagtactgggtaaaagataacacaccaagtgagcaagagttggtgtgaagaaatctaccatcttagtgaataacatggttaatcaaatttaaaggtatataagtacacacatttaatgataacatatagcagtacactgctatgaattaaaacactgcccacttttatagtactctataacaacaaccccagtttacgaaagagtcaagtaggacaccaccgcaccttgttgactaaaaatttaatgaattaattagaaatgcagtactaatctcttcgttcatgatgcaaaaactacatgaaaatgcacatgccatcaaacaatatgccttaaaatcataggacatactccattaccaggctcaacattgattcccaactcaatgaaaccctaaacacacaacgaaaaacatgagttgagatccaaacacctgagctcaactatttcaacatcaacattcagcacaattgccatccaaacaccgaataattgcactaaactccaccgagcattaagcttaatatcacaacaaaacacaaaatagaataaacaataacaaagataaacgcatcaacaagtaaaatcactagactaacaggggatcggacaacaatggcctcaggctcttgatcagcagctctgcgtccatcgctggagaatcgatgataatcatcaggaggaacaaaaggcggtttcgtcgacgtaaaagctaagtgccttctcaacggcggcacgatctgagcaccacctgaggcaaggggcggcggatgagcaggacgattgtgagctcgaccgccgccggacatggagaattgttcaccgacgaagaaaatgagcaaagtcaccgattgagagagtgaggagaagacgatctggttccagagagagaaggtagggttgagaagtacgtaagaggaagaggtttagggtttgggaatgggatctgagggtttagagagagaaagtggggattttagagagagaaagaaggcgttagagagggaaagtggaggcctggtttggtttatttgaggtttgggtttgggtgagagcagaaaacgagggaaggagggaattttagttcggatagatgtggagggaagcacgccaaaattaattaatttgtttccatatttatactttcgcccctcttctagtctttttattctactatttacctcttttctcatattatttttcattttagtccttctttttgcaaaatctaatcgattaccttatagactttttttttttttcttctttttactttttagtccacgaatcgatagtggagaatccaatactcgtaaaagttaaatctagagaaaattagtgcaaaatggtaaatttaccacaaattatatcatttgaaaagaattcatggtaaaagtaaatttatccatttactgttgatgaatatttgaatttaatcaccaatcattagatttgttttttcgttacaattaaaattaagattatcaaaatttcatacttaatttgtgaatttattttatataaacatacatatattagacttatttattattgtgtgtgatgattcttgacacaaatattccattacaaacgacaatgttataatcctttgccctctaatatggccttgtatactcacatgatcagataaggtaatttatctcgacaatatatatggaacagagccaaaaacaaaaaggtttaaataatttttttattggcattaattttttgaatggttgaataaatttaaaagaaaattttgataaatgtgtttacacgaaaatttggtaaagacagttgtgacctgtgaacatggagttaaattgagttaataccatcgtacattacgtattaacatatttgaaaacaaataatttataaatatgttatatgtaaattgtttttttttt

SEQ ID NO: 194301 - DNA, 760 bp, Cannabis indica
atatatacaactatacaccatattattatgtgcgtataagtacctggatatatatatgtacatgcactgataaaataatgtcgccccaccccaggtttccatctatatttattaatttatatatctttttttactcttaattaataataggaaaatttacactatacaagtacccaagttttgtaacttatttctaatttattgttaataagtacccaagttttgtactcttctctttgttttagttatacattttaaaggaatattgtatatattttgttttaattaaatatcagatttattttaaattaaatatttgatgaaaatgaaaaaaaaaacttaaataatttagattgtaaacgtgtcaattattttaacaatagaagttagtgaagtaccaaatgaaattttgaagaagtgtaattttgagtattagtactgcattttttaaaaattaaatacttattagtaataaaataaacaaatgaatatttataccacaaattttctaaaataatatgaagcttttttttgttatttagtcaaggggttatatagaattaaaatatgtaggaaattaagttgaccacttagaatgactttaccacttaaatgttcccaaatagacctcctgccaaacattaattggtatgtctttttaactatatacactatactagtatgacaattcatcactagaatctctataaggtttttcttattcaccttaatgtgcagtcgttgtcaaatatgatatata

SEQ ID NO: 194302 - DNA, 859 bp, Cannabis indica
aaactgacgagacatatgtatattatagccaacccaacccaattacacttgtctaaaacatggcctcataaagctcctctcgagttaattaatatggatcgatatttatcatgttgttactacaattaatttgttccttatatcacgattcccaatatatcaggattagatgcttatgctacttggctctgccacgtcaggtgggttcctccacgtggcttcatgagggtggttactgctctacgttttgatgcccacttgtccttaactgacttatagtggctaaaaagatagaattaaaatagcctggtttaactcattatgatatatatggaagaaatagaaaatactagagctcattcaagctatgccctgagaatactagagagtccgtgagaatataggtgaagtaattagccaattaaaactggtccaataccataggaaaatactattttggggctttcattaaatataggattagttagtaagaaaatgaattaagtaggttgatttattatagttgaataactaaggatggatgaggttgagtgtgttttttgttgggaggtgggggtgggatgggcggtgagttaggatgattgggctaaaacaaactgagtatggtaatgcttatcctagtcagattcttgaccaaagctttgtttcttttggagtttatagcagacagcttaggtggtgacacgtcttcattacaagtaatcaaaatcaatgtacctcaccacccatctaaatctaatgcataattcaacccaccccaatttggtgaaaagttattttttaagaaataaataagtaaaatcctagtaaagtgaactagagtttttttttttttttt

SEQ ID NO: 194303 - DNA, 2709 bp, Cannabis indica
  modified_base (539)..(539): a, c, t, g, unknown or other
ggagttggtcaggtattctcgtacactctgcttagatattaagttcatactttgagcactagagctctctacacgattagtagtgagtggaattttccgtctaagtcacagaatctatttcacgtgtcacccagatagatgtcacattatcatgtgtggagattttgtgagaaagaaataaataaaattgatacgtaagtgtgtaaaattaattaattggtgtagcggtattaatttaaaacgttaattttaacagaaaaataataaaagaaaataacgttaaaccaatataaccagacatatatatgttggagggaatatacaaatacatatacataaacataaacgcacatataacatatctatccttataaggatggaaagtcaatgagtctattctaaataaattgaatatacatagggttatcagtgacagtaatcttaaggaccatggttgacgaaatacttaattgtgattttaatttcttaaatggaaagacatagacttggtgacttacgtaggaagattacacgcatanagtgtgaacgaccaaaacaacaaattaaagtcaaactcccaactcccaagagaacataacaacaaaagagatgggaggacagaccattaattgcaagaaactgatcataataagtcaaataagcacctaaaatttcaaacttttccattatcatctcaatcactctcactgaatgatacataattaacaaaatattattcgttgcccttgtccccctccgaaaattctcctatatgtgccctcctttgtttcccccactctaataatcattactcctacggcctaattaatcaaacacaattttggtatatttctttagccggcggcccagaaatgattcacaaactgttgttgatttcgttttgccttcacctcttgttggtatcaaacctatttcatcccagcttcagtttagatttatactcggcatgtagtaacaagtaccgatgtgggagcatcggcgatgtggattttcctttctggggtgatggcaggcctgaatattgtggtcaccctaaactgaagctgggttgtcagggaaacaatgccattatagagattgaaggaatcaaataccaggttctagagattgagaaggaaaccccaatcattaaaatcgctcgagttgatttcctgaacaatgggatttgttcgccactatatggggacaccactctggataaggacatcttcgaatacgcaccagcctcagaagccatcacaatattctacggttgtaattctactgacaacatgtatggtgggtttgattgtaaccctggtgggaaatcgtttatattaccgggaaataatactatggaaaagattgatgctcatttctcatgtcgttcgaatgttattgtgagggtgtctgatcctgtacaaacttatgctgaatttatgaactctacgttgattgaagaggctctgaaagaaggctatcctgtttcgtacaaggtggagtttgctgggtgtgaaaactgtaggaaatctggtggggtttgtggatacgactggggagttaatcggaccacgtgttactgtcaaggtgatctatctccagtgctcaaggacgtatgtcccagcccaccggaatctggagacacaaaacttggaacaccgcctaactcaggtacgcgttgattttgactcattgctatctagtttttcatctggttttcttttacttattatgattgttgtacgtgccttaaaaaaacttcattttacaaaaggatggatctgcaaaacagaaatgtcctgtgcaaaactctttagtcatataacgctaataaccttatccttatcatgataaaaaaacttgcttataatactttagtaatattggtgatcattagtaataagcttatacttatacataattatattaattgattcaactttttgttgaagaaataagaacttataattaaggatcataaaactgttctctcccatggatttagcttgtgtagttatatctttgcttggttatcatacataggttatagaaaaattagatcgattaatctttttaacttgaacaattagattaatccttttgttgaccatatatctcatcattatagagcagatttagtctacataattacatttgaaaacagagcaatacaaatatatttggttggatttttgccactgacatttgtttctaaaagttaggtaaatacagtcatcaggaaaaaaggaaagagtcggtaaataaggctattaataaaattagaaaaatagttcattagcccagtctctttttcactctctttttttttttctagcgtgtgattgtgactgtactcctatatttaaccatacctcaacaatacttacttggtcttgttcaaaaaagaaaaacaatactaacttggtcaatattttgtttcaccaaacagcaatattaactaatatatttacaatttatgttagttgcgtctacttgcactctctgattattactatttaatgtgagaatcttgagacttatattagtcttagatgttagaataaagcattgtttagtgaccattttgcctaattcaagaacttgtctgcccagttagataacttgtcgctgtcgcctttgaatgtaaacgctttgaaaaattaaaaaacttttttatttagtattcctcgagataaataagctctaata

SEQ ID NO: 194304 - DNA, 2486 bp, Cannabis indica
aaactttacctgcagctcagcataattcctaaagaacaagttgcttgttgcggctttcccgaaacacgagcctgagagaccatgttgaagaaaagactgtcttatgaggagttagcattgaatatcaacagcacaaaatcaaaaattgatatgaaattcttttgtgcattgtttgtcttcttgcaattgtgtaatgattaatttgtaaaatattgaatttgtccttgatatcaaggacaaagttgttacaacattcaaatattccaaagtttgaatgttcagtcattatgtatgtaatgtaaagttggctcaggttctttgagcaaatatataaaataatagcagagcattcagcttattcccttttctttagttttagaatcatataatctgaatcattcatgctatttaattttattgttttttcttcattacttcattacaaaacgcacaacactactaaaattactattttaccttttggtaatcgaataaataatatgtttagtgtgatttaaaaaaaaaaaaaaaaacttgtgtgttggtcctacattactcatgtatgagtaatttgtggtgtttatattacaatgaacagctaccaagccaaaaccctatgataaaattttagtaatttgataaatgctatgtttaaaaaaaattacaatttaccaaaaaaagaagaaaaaagaaaacgacatcaaggggtcctacaaatgttggctagatacctaattcaaggtgaaaaaacacttgattaagaaatctaagaagaggaaaataagcaaatcttaggagccaagaaatctaagaagaggaaagctaggacaaaaagatgatcctgccataaaaaatctacacatttctctttttgttagccaaaaagtaagttatacttgtacacatgagtcatggctacactgagttaacaccctcaaatacagtacatcatctgcattttgtaagagtactttgtttgcattgatgccctaagcatagtttcattgagcataaaacagaataaacttttccttgacaaaaccagcccaataagtataaatgacaaagaaggtcaattagttactagattccaatgacaacaatttccgcctaaacaaatagttaaaatatatactcatttgtttcacaaggagggtccttaaacaaattacttcgtgctatttgaggacacctaacctttcgctcgtattataattattacacaaactaaaattccatggtgaattctgaaattaactcactcattcaattctttccccgtgtgtgattcaattaccattgaaccatagttttcacttcctaagatctagttgtgtattatgatcacccttaagttcaacctataagcatctgaacttaaaaattcacaatcatatatatctagggatacgcaatcattatgcaacataaaatacaagtctaaaggaaaccatctagcaaattaaaacatattcaactacggatataaaatttatacataacattgtgtgtttaattgatagcttattataataaagataattagttaatataataaaggtaattaataaaattaccgaaaaaacgttaaagaccatcccgtatatttcactaccatctttgtcatcggaacaaagaagctcctccaccctctttcttctagattctgtaaactgaaggctaaaaattttcaacattaaatactatcaagaattaatctcggccatcactcttatttgcctttaaataattagtcatcagcgacgattggaagaacaaagaaacaaaccacgagatccttacggctctctcctccttgaatccttgttgtcactgaataaaaaacaacaccggaacaagaaaattccatttgttggtggcgacaaaaatgttaacatctgtgaactaaatcaatcattggtggcgacaagaatgataacatctgtaaactaaaccgaaaagtattaagaaaacaaaacgcacacagagtacatggaataaaataactatagtcataaagaaaatccttgagcacgaaacaggccaaaaaaaagcgccctaaaacagcaaaaaagagaatgtaagaaataaatatgcaagtatttcgagagagaacttccctgttcagtgccatttgtcaccctattcaggtatatatatatatctccgactttcaaatgagcaagccatagaaatcttataatttcatcaatctccgccgttgttggccactagaagtctggtcgtcgtaattattacaattttatttgttttccatctttgggtgtcaggtctggatttatttggtcaatggagaacatagagtcttttgtttttttttatctacaacaaacttaatgtagtgtagatactacatttaatatagaatagcttgaatccttgtctaatatatctagtttacgtctattatttcactctgaaacttcaagtttaagctttgtataaaacctagagtagagagagag

SEQ ID NO: 194305 - DNA, 864 bp, Cannabis indica
acagttaattgttatctctgctttctgatgtaagtttgactcatttgttgtagacagcagtgactgtgtgatgggctataaacattttgggatgtaatatcaatattttgtagtataaaagctatttaagtttttctatttgaatgatttgtagtactgtgtcattttgttatttattcaacgccaatgtcattatttataataaacacaggcagacttatcaaacttgagtattaacctccatgtaggcattgtatcactatttacactagttatgtatatttatctgaaattgagtttggactttgaggaatcttctcatccaaattattacgcatgtagtaattgtttagaaatgacacgatttgtcgatttgatatcctaaaatatgtaacttctatcttctgcatctatttatgtataattgatcacttttactaattcatcttttttgtatgttcagtgtaagtgtactatggaatgattttacaactacaagattagatcctcgactccgaatgtcagaagaaacataatatatttctccatttagaaaataaaaatatccatttagaaaataaaaataaagtgtctttttcttcttcttttataagaactttgattcgatctagaactacaaagagatagaattgtttgagcatattatttgaatgaggtgaactttatttatgcaaataaatgatttatagattaggaaaatatgaaaatgtaataataattacaataaatggtagttgatttgaaaaaatttgcacatccacaaatatctattgtttataatttcccttgcctcattgaaaacctcgccgagagaaccgaatgggacaaaactcggtcaagaaa

SEQ ID NO: 194306 - DNA, 2731 bp, Cannabis indica
ttaaagtttttagtttttttttttttttttttgtatttttataaaattttacatagaaaccaacgaagcaacttatatcacaacttaaattcatatagcaacctacataaaaaccaccagagcaatccaaaccgtaaagaaaaaaaaaaaaaaaaaaagttaaaatataatatatcccaatatagggtaattcccaatattttaattaaaaaattaatttattttaaatttataattaatttgagtctaaaaataattttttttacccattaataacctgttatagtaagtcatagaaaagttacatttttaatataactattgaataatcccccaggacctcaagatatcagcatagtaaaagactttttatcttctgtagataatagaagtttgacattgcataccactacctaccagtggtaccaaccccaaccttggggcaaggaaagaatacaaataagatcatggaattctaaactaccaatttggtaacaaaattaacatttcactcctctgtaacgtttcacagggttacaagctctgttagacttcaggaccagatgcaaacaagctcacaagaccctgaaatacttgagctgataattggtgcgcttgaaggcgctcgccatccaaattccacacactctcattgccgaaagaagtaaatgtaaatgcaggagtctgtagccaacatgatgaaatatttaaccaaaaagaaatgacctgagaacacaagaattcaaagcctggagagaagacataccttgtgatgctcgacaaacttaaaatttagcggttttccaccttttcttgcgagctgggtcagatgcctgcatatgcgtaagtcaaacatggtatcaaaatccacgagtaaaaggatatttcagtaaggaatgtggtaattaatcagatactactacataggcagtagtcagtgttctacattatagtagttgaaaatggagtctttatcttaccagagataataagcatgaggacagtctttaatcaatatgagatgtaagaaaccatctgaaaggtgtgcatcagccaccagaccatctggtgctctttcatttcgatttgaaattatggcagcaccgacactaatataacgccccttggatttcagccatcgtgtttctcctggatgtgagtagggtgttgagtggcagccagccctgttcccacgatttgattttgatttacagactttgcagtttacacggcagatcactctttcggatacacttgggctaccaaattcttcacttttgacttccagatatgctatttcagcctgatatgacctgaaccgtatggaaaagattagtaagaaaatgttataaatcttatatgtatatttttgaatcacaatagtcacaaatcaccatgtatcttataatgaagaatcctggaccaaatacatgtatgaatccctacgattgagttgtatgtcttccggagaattgacaaggaagttcatagtcacagtaccatgtcataaacagtttagctaaattctggtaagttaagcaaaataaaccagcacatacctatgccttagaaacaccttcgttccagcataatcataacgtttagggcccatccaacgaagcttttcactctctgtaatgacatctccataaaacccatacctaacacaatgtgaacaagaatttagggggggcgggggggaatattctcaggttttcattaatcaagccataaactctttccatgaccacaatggtgtgtgcttgacagaagatcaaattattaaccatggataaaccagcatttgtaatgtgatagcttttaatgcatcatgaaaaaagtacaaaccattgatcataagttcataacacactctgtaacagaagatatctgccaaattaagaaagtacaaactaacaccacaaaagaaattacaggattagacatggatgaatatgggatcataattttaatgcggaagagagaacaaaagtggcacattaacccttaatgaaaaaagaagtgcagagacaagtcactatgccaatgccacatgaatctgctaatagagcatgtgatcacagtatgttaaaaagagaccactgctttagctcagaagttttgattttagttacttctagattctctaggaagagaggtccagcagattttatgagccctatgatttgactatatgtaaataagaaccccttgaatcattatgcagatattaatgtggaagtacccagcaaaagaagccgcatagcgtacataaggttcaacctctgacacggatgttaatttccaccttacaacttgagcaatatccaggcacacccttttacccagcacaatttgtaaggcagatgtaataggatctcgagctccagtggtactgaaaaagaaaaatcaagcaatatagtcatttgaagtttaattttagttccaaatcattgcaaaaatataatagcatttcactcaatcaagtgtcatttgtcaatttaccagttatcatactttttgtttctgcaagcttcattagtatgttagcgcttgggtaatttagattttatttcctcttgacaactttctatcaattttaaattatgctctaacatattaatgttaataaatagagaaatgtaagaactcatttcatgttttatgacgaggtctatagcccaaacagaatcaacaaaaaacaaagtaatacctgagaaaaaagtctaga

SEQ ID NO: 194307 - DNA, 1017 bp, Cannabis indica
atatatatatatatgggcttgataatattgtttacaagatattaataaggtggctgcatctatgatttgtcttatatatacatatataatacattcatgttggcctgtgggctctcacacttcattattgacaaatatatatgtgatatgtaccaatcacattaataaacctgtccaataagaaaatgtgtatgatatatatataatcagtaatttattgttctcatatatataaatatacatatgtcattaataaacatattcatatatactgcgataattacccatttgaaatatatatatattgttcataactaataattatacatataatatttataatatatagttgtttagatatgtgtcaatataatcagtaattatttacatatttcagttgtcatgtttaaggagatatattgattgcatgcatttaaaaatgtacaattaagttctatctacatgtttgaatatttgtcatttccatgccaataaaaaaattaaatatataataactgtgatcattaaatataaattaaagaaaatcaacaaatactaaatattttattttgttctttgattgaaattatgttttcggtaagataaaaataatattacagtaaacataaaattaataaataataaataaaccatataatgtagagacctccaacaatattatagaaattaacaatgtaaaaaatatatatttttgtcaagatcatatatgtaatagaaatattatatgatcttcatcaaagatttcccacttgaatgtgtaccacaatgcaatagtatcgatagaaaccaatacaaatagtatatatgtcatgtgcaaaactaatgcaaaggatttggattggaaaaataagtgtcaaactccattagtatttttgcttctatatatttaaatcgatataaaggatatactatttaatgatgtagtgaaattttaatttggacaaagcaaaagatgtaattctataaactgaatcataatctctatttttttttttt

SEQ ID NO: 194308 - DNA, 2629 bp, Cannabis indica
ataagatggaagacctaggtaacgctcatggcatggttgaatcgacatgagaagaacttgttgcaaattagcttgaattgatggtaaagtgctcgcggcgaaaaagacaaaatagactttaccacattcaatttttggcccgaggcacgacaataaatatcaattgaattcttcatggctgtagcagaacgcatgtttgcacaacaaattagtaccaaactatattaacaagcagcttttgaaaatttcaagggcaattcaagcatcaagatataagggaaaagaaaaatcttcaatacaaccaaaaaataataagaacaaaacaaatcccattcttaagaaaagtattgaaaccaaccataaactaaatattacaacctcaagataatgtagccattattagcaaagaaattaattaagacagagtttacaagacttgtgctgaaaagttttgagatgactctcctttggctatagataatgtcttcaaataaggacaaatacacaacagagtatctctcaagtctgattccctctctggtttacattcagtaaaaactctaagatgttccaatttaaccaaaggagtaccactcacactcttcatatgtccaattacattcttcaatttcttgggaaatatgagagccttcattcaaagaaaatatgaaaaataatcaaatatacattaaaataaactaataatataaaattgaaatgaaataagatataataagtaataaacatatacatacctcaggtttgtcaacatggattgttaccacattccatgaacaattgagatttataagaaaattaatcatattgataaaccaatctatgtcataatgcttccgccgctcaacaattccaaacgttccattcaacaaattggatgacaccattgaaataccaaaatttatgttaccattgtaacaaaatgatgctaattttggagctgattcaatcacaacattcatttcatcatcataagggttattcacatttaaactttccaacttttgattcgagattttaattctcttcaacctcccttcactccagttgcttaacgtcaatttttcaagaagaggaagattcgaaacgaaacgttctaatgttggagactcttccatatcccaataacaagttaaggaaagatttttaatggtcttgcatgaagagaattttaacttgtcaaacgaaactcgttctagtttcaaagattcaaggttttttatttcgatttgctttatcattctctcagcaacactttgaatcttaacgagtttaatctccaacaacttgaggcttaaactacgtatgtgtagttgatgtgggtgaaaagtgttgtaataacaatttaacaacaatttttcaagtgaaggggttcctaacatgagtttatctattacaaatctattcgcaatatgaacattaatcattgtaagtgattttaatgatggaaaagtgaatacacaatatctatctaactccactccattcaattccaaactagtcaaaaattttgcatggagtactaatgagtttggtaagcgaaagtaattttcgccatactcatctggttctcctgcgtttaagcaaagacttacatgcttaactcttctcaaaactgcgaaagctaaccatttatctatgtaacgacctgtttttctcttataataacaatccatttgaagcttaaaactgtttaagaacgagtcgcgaatgaagtacatacctctcttgcggtgttccaaacaaaggtctatataattgagagccttttcttgttcttttacagttttgtaatttgtagttgtaatggagaaagagagatcggggattaaataccacatgagtttccaacgatgtgaaagaaaactagttgaaacgacatcaatagttggaagaaacgacagtatatgtagaatgattgcatcaggtagattcgaaattctgtcctgaaaatcatctaatgcttttgttgatgatgatgatgatgagggcccattttaaaccctttttttatgattatggtaagtttagattcatattatggcttattattttatagtgtcacacagtcatgtaagagattatgataagagttattttcggaataagagtagtaatatttgcatcaaatttaatctattagttttgagtgaattaagtcaagagttggattagtcaatcagttacattagatttagacgtggtcttgttttttttttttggctttatatggctatttgagtggattattgttatgtaaataaagacaaaaaagtcaattttaaaaataaataataaataaagacaaaagacaaaagacttgtttggtagatatatgcagaacaaaggcataagctattcaataacaattggaaactattttggttctttaccaattttgcatattttcctcttgataataatttaaatatagcatgtgtgatgagataaaatacagtaattaatgtaacagagcagcctctatttagcttaatttgattagtttgttgtgttagactatatatatagtgtatgtaatatagcataatcaaaatgatatgaaaatgcggaaaaataaactgtaaatcatatcaaataatatatgcaaatg

SEQ ID NO: 194309 - DNA, 1659 bp, Cannabis indica
ctagctatattttctagtattaactaaacataaaatttacatgaagaaacatgatgtagaattgaatagctcaatttatattatttatatatagtggggatggatggaagttatagtgtgttgaggaacttaataatattgcttcgaaaacaatgagcttaatttggaattggaattatgtccgaaggacgtaaggtagcttcttatgattaataataaagcaatttaattaattactttaaaggtcaatttctttcatgcgaagctttctcttcatcccccactaagaaaaggacaaccccgtttctccctatactttcctcttattttaataattcaaatttacttttaaaaataaataattcaaatttatttcatatcatatacttctcattctcaccacttcaaaaactcctacactaattcatttacattttaaggccaggtggcaactgttaattggaatgtagaatcgtccacatgtcagttcagtagtactagctacatctttcgctattgttattgttaacaattacacacaacacacgcacatgcacacataacaataatttgaagatcaagccatatatactagctggtacatagtagtactactaattaataatgaaaattataattctatattcatatattatatatctataatctaattaggatataattgttttatataaactccaatcatacattgtttccttttaaggattaatggataatccctacagatcatacagtagatcggatcgatatttatatatctatctacaaatacacgctgtgttttaaatatacatattatatatagatatagatcgatatcataatatatataattgtaggtaaattgaattatattcacagtttattaaaacaattatagtatttagtttgaataataataataataataataattataatacaagacatatttaagaagaagtatcaaaaaaaaaaagtaaaaatattcaaaagtataaatagtttttttttttttttggtacataaatgatagaaatgcagtagtctaggaaaaaggacctaaacaaagaattggtgagatggcgacgaatagtagtgctcaattattgtagcttttctcacttaacattaatcatctctctctctctcccacataggccccagaagtcagaacacaacacatataattaatttctctcttgatatttttggtactcatcattaattaaaagtacaacaaaccatatatcagtcatgagaccaattcacttgtgacacttgggagtatacaaacaattactccataagagtcagactcagacatatatgtgccatgcatgcacatactctttttcccatatgtgataaatataattatttattatacagtctgaaaatgtaaaaatatctataaaagtaaaatgtgcttttcaccactggcgcctatgcttctttctttgcatgaaggtggtaaactaactctttattacaatttttttttccacataaacacgatattcggcggctgacaagaacggtaaataaactttctacattttattacccacaaaaaaaacgaaagagaggggaggagaagttctatgcatctatgtacacatttctaacgttaattttttgttttttttaatttatata

SEQ ID NO: 194310 - DNA, 3077 bp, Cannabis indica
ttagttatctttttttaaaaaaaacaaacgaacaatatacaaaaataatttgtattcataatattttattttttaatgagatttacaggtcaggccggaagatatttttattagaaaaagtagtgtttatttttgaaaaaagtcatagattttttttaattattatattttaaaatataaaagtttaaattaaatggatataattgtccagaaccaattgtccttgttgttatcgataccaaggcccataggcccaataggcccaagcccaataaaagaagtaagaaaaagataacctaagccttaacggcacccctctctctctctctctctctccagaaaatctgaccggtgccgaccctgttgcttcgattcacggcggctctctctctctcgaaaataacgaccaccacacagcagctcaccttctctctcttgcttcctgagcaggtcagacatagagagcagtaactttacttacactctggtatgtatattctttctttggttttcaatgaatgtatggggtttgttatgatttcgaagctttatgccgattttcgaactgggtatgtgtttgttttggtggaaaatgtttaaacccctgttaaaaattgagtcttcaattgaaataaattaagagttagtaaagcttcaggtagaaattattatcattagttttgttttctcaactctaagattagatcgaataaaacaaaaaattggggagaaaaagaaacaactttctgtgttatgaattatgatctcatagggtctgattgtgtgtatagttgttgtagttgtatatataatgtttgataaaatgactctgtgaatagttggcttatattttgaagtgtacagctttgtttgtttttgcattatgtaaatgattgatcattgttttcaagtgagtgcagattttgctcaagtatgattggtcttgtctttgtgttgtgttgtgttcatctcacaaacattgtttaaaatactaaatattgaacttgagttacttatacttagaccatctccaatagagtgctagcatagtagtttgaattagctttccaaatagtgtgctaaattcggcccatgttaaaaattataccaaatttggaacaagatattgcattggcactcgatgaatatagctttttaattacggttttaccattgatcactaaagagaagtaaaaatacatattatttttattacaatattgtcattaactattttttaaaatctttaatttattgatgatgattaataatattttactttttgtcatgatttgcatctttcatcttacattttgtgttaaatttaacacaatatttacatcttagattgaagatggtcttatatatctgttttgtgtatgtgtgtttgtgcatagattattgtgaatttttatgcaagcgaactacacatagagcaaggatgaaaggtggaaggaagaatttgaaaagggatactgaagaagtgagcttaaattttgaagatggccatgccataatggaagtgttgtccctcagaggttctaatctcattgaggtattcttgtaaataacttctacttgcaatggcttttattctcttagtttccatttgtggtggtctatgtgatcatacagaaaactcaccttgatatgactgtggtgtaattataggtactagattcacaaggcaagaaatcattggccctttttccagctaagtttcaaaagagcatgtggataaagcaaggtgtgtgtctgtgtgtgttgaaataatgtattatgtataagtgtgtgcatagattattgtgaattggttgatttttccatgagttgctataaacactgaaatacaatattcaactgaaagttttcgaaatacaggtagttttgttgtggttgatgacagtgggaaggtgaaggctcttgaatcaggcagcaaggtgacatgcattgttactaaagttctcttctatgaacaagtgcgtgctcttcggaaattaccagactggtatgttttttttttttcgtttgttttgttaccaatttggtttgctaccgctagtcaaaatcagaacttggcatagtagttatgtcgtagaagatccttttttcggtcaataatatgtactgaaaaatacatactatcctttcttgatttgttaggtatttttgtttactaatcttttgatgttagttacaactcttctcagtagacatggtcttattgaatcaaaatgtttagaaatttcattttagtctaaccaatgtgttgaccttgttgtttttatctctactatgcaggccagaagtcttcaaatcgactgttttggatgattctaacggaagtcgagagggagagacttcgcaacgagaagggaatgatctcgtatcgagcgatgatgatgatgatgatgacgatgatggacttcctcctcttgaagccaatacaaacagaaatagaccgattgaattgcaagaggaatccgattcaggttcagactcggattcttgacaattcattctttccattgaattagaattagtgagataatagcaattttatatatagttatatacattttatattatataactatatgatatcaaaattttgaatcagaaaaggtgctgaaatgcacctttttattatactttgttctagagtcaattcatttattcctactatatattctagctactcacacaattacgtaatgattcaaatgcactaatttcttttgtaaagataatcatagaattatgacaatacaaattctcatgcaatctaaacgagacttgatattaaattacagcaaagtgatattatatgtcacaaagatgctaagtactgtgagtaacttatagcaattctctttattttttgacaaaagactaatgcaaaagtaactttttttccacatcaaatttacacttcaaatccatagtcgtggtctctattgtgcaatatttagcacatatatacataatatttgtcttgaaaattatatcacattgtatatgtagtaagaccactttaatgggcaactcctattctagatgctctaaagcgttaatga

SEQ ID NO: 194311 - DNA, 1207 bp, Cannabis indica
gtagctgcttgcgctcatcatggattggttgtaattaatatactaagttcatggctcgtatacactactttcctactttcttttcaatctgttttagaatgacaaatcacgacgtttacaataaaaaacaaaccctaatcatgaaggttcaccttttttttctttcttttgaaatggagaaaagatactttgttgtagctagctagggagagaacaaagaaagaaagactcataaaagctacacttaatttctttatatatgttattatatgcattgtaaagtcatctcttttattaccttaaccatgaaggagcaaagcaataagctagtaaagaatcttaaaagctgctttagatatttctttatacacaatgtaatgtatttgagagcatgggtaactgtgtggccaacacaattccaataagaaaaagataagctctctataatttcaatatagagtgtaccactcctatattgttgatgttaatgatgtaaatgaatatgcgtaattttttttttaagaaataaattaatttaatttgaattatcaatacaatatatataagttacatttttatagtgttagccactatgatgctttttttattttaaaacaataaatataaattgtcaattttaaacccttttattagtattattagacaactaatataaggattcatgatgcacaaatttgtcaaatttgtcactaatattaatcaaatatatttggtgcctggcaaatgtatgttatatatatgggttatatatatatatattaatgatgcaaaatgcaaaaagtcaataagaataaaaattacacttaccatccttaccaaaaaaaataaaagattacacttaccataaatatgatattacataatcaatatgcagatcattcaatgattcaaaagtttaaaaaattatttatattaagaatttttcatgattagaatttagaataatctactcaatttaaaatgcagaaaataaattgggaaaaaatggtggccgaaatctgcaaacaagagcatttgatgacctatgtagtgcaacaatgttacaaagaaatgaaaagatttatataaccaactcctttatttattgttaaggttttagcaatattagatattggaaaattctttaatgtaccttttaaaaggaatgcactgatatatttttatgtattttggtatttgaaataat

SEQ ID NO: 194312 - DNA, 1742 bp, Cannabis indica
tttttccttttctgcaacattctcttttcctgtgaagaaaggtaaccaaccaagaaaccatgactatggaggagttgggtttgggttggtctttatatcaagaggtgggtcattttccatatttctacatattaaagttgtcatttttctccaatctcttttgttttctcttctgggtattgtaaattttgctttttaaaattaccatgttgataatttaaccttagttttttcgtctaaaatggcttcttctttgggcattttaaaatggttattccatttcgtactcttcaagctaaacattagttttagtacttgtgagccatttcagattgaatcattgcctccaattatttttgagttttacctccttttcagattgagttccttctactgttgcattctcattagaattctcccttttgcagttatcgttttgtccttttttttcccctcatttggctcttgtgattaatgttattttaccatacaagtagcagtacatattttgttcatacaaaaattctttaagatatatatatatatataaatgtatataaatattaaaagactttctctgtcttgccatggtcataacatctattggtccaagcttattgttgtatgtcgttattcatggaagcctatggtatgctatggcattaaatttttagggcccatgttcacaatttttgttataagggtaggtttaatggcgactatcaactttataatatcaatttctctttttcttaaaaataaataaataaataaatgataataatgatcgtttgaccaaaaaattggaatctcaatcatatttttatttgttatgttcttcttcctaactttgaatttgttgttcattaactgattttatttcttattcttatctcaggcttctcagcaaaacataagcgcgttaaattataagctgcagcgcaccaaagttgagctggaatcagtgaaaatggaggcaaaggcacaaatggaaaagaatgaggagtacctgagaagtttacttgatttcttaaaaactgcattgaaagaaagagatgaagcaagaaatcagctgcagaaagttcagtttatgttttgtctacctcaaactgaaaatcctatcttaatgccttctgccaaagcaaactcaagcataacagaatctaatagtctttctgagacttacaatcaccattctcatggctcttctcctgttgaatcggttttttgatgctgctgctgtttcttcaccagaattttccaacattaatatggatgactcaagccaaatggggttctccatgtcctctgttcctgccccacttaacattgatccggcttctgttgtgattgagaatctttccaaaggaaaacctctgcctgagaaaggaaaactgttgcaggctgttttgggtgctggtacactccttcataatcttctcttggctgggcctcttccgagttggcgcaacccgcctcccttgcaacccttcaagattcctccagtttccattaaaggtaccggtgaaggttcttcagggtataatcagaaaccagttgacaactcctatgtgcctcaaaaggctgttcaatattcacagtcatgctcagcctccatgttgaatttctctggtggcacttctagttctagccttaataattctactgtgttgtctatgagttccagttataatgaccagatacctattgtgaaacggcaaagactccattgaaatcatttt

SEQ ID NO: 194313 - DNA, 1586 bp, Cannabis indica
tatagtttttcataatataaagaatgctagcatagtttttagtgtactctttattttttaagcatatattgtcaaatttcccttaaaaattcaacatgaaaacttggtttctcgactcaacacatattaccactaatcccagtcttttggaaaaataacaaaacatatagagataaatttccatttagtagagaaaatatggattcaagctagaatcattcgaaccaattgcacacctctaatcaagaccaagtagctcatattattattactaaagttttatttctaaattaatagttcaagtttctgaaagacaatgacaacaaagcctttaccttccatcattgataagcattcaaactaatattgttagtaaggttctcttgtaactaattttctgttgaaaacagttacttaatactatttagttcctaactgccttgtattctcctcattataattaaaggtctcttctctaaaccaattagcaacttttgcaacccttagtggtacattctttttcattgtgttcaagatagtgtttgtatagtgcttgaaggggagtattaattggtataactagttaggaattagttattaaatagagtagctagtaagagtattaatcaagtgcttagcttgatgtgacaatataaactgtttcggttacaactttgttacttagtttagttactagtttccttcagtgtattgttctttctaattactcttcttttactaaaactcttttttttacgaggttttactaaaactctttgctcgttctatatatatgtacattaatgaaatattagttgtgtcacaaacatgtactttacgtacaaacaatgttatcaaataaatcaatgtctaaacataataatcaattaaggaactcttctgactttcagtaattaattaattatctaaagatttagtaagaacttagaaaccctaatatccatactagtttttgttcattttctttagttgatctaacattagtagatcaagttatcaaaatcaattattaggaattatacataatcgtttctctacttcttatatatgttcaatccatctagttgttccgtatatattaggattgttcatcttatagtctcactttcatttaaaatgaatgttacaaattgttatttcttccttaaaagataagatggctttatataatacaagtttcatatttgtttttaatggtggtgatattaaattaggttaggatttttcatcctaaactttcacttatattaaattgtgtttcttaaacctaagtcattaaaatttattcctaaattattaaaagtgttggatttatcaatagaatttttaaaattacaaaatggtacaataacacaaatatggcccacctcacatgaacggtgatatcagaattgttagaaacaacgttattgtaaatcttaatagccaataatagttcaaggctgtgtgaagttatttcacaatttaactctaaaaagctttcaaatttctttgaaacagactaattgtcataagagcaatccctatcgtattaaatatgtatgttaaaaaaacaaaacaaaaca

SEQ ID NO: 194314 - DNA, 867 bp, Cannabis indica
tatatataatttaataaatgttaaaactcataaaatacaattttgtacatttcaaaatttataaaaatacaatttaatacgtgtcaaaattaataaaataattattgaaactcatgaagacatagtacatatcaaaattaacaatttaataaatagacaatggccacaataaattaaatccaacaattttaattggcataaaataaaaataataataaaaaaagaaactagtgttttgctctgtttttatttaatagtttttttttcctttctctctttgttgaaactcagattcatatttcttacatcgaatcggaacgagttgagttctctgactcagtgtcgggggtttctctctctgcatggacggtcattactcttctaccagctccatctcaacggtcagatttgaatccagtaatcacttattttcacgcaccatcaatgatcttcatcttcttcttcttcttcttctctctctgtcagttactccaatttagaattcaatttcttattatatatataatatgatattgtgaatcatttgattttatgtattaaattcattaatttattttttattttttggattggtggttagatcatcagattcatcaccattggatctggaattgttgacgattatgatgatcatgatgattacgatggttcgattgtacggacagcaaacatggagaagaagaaaaggactatgaagaagaagaagagctctgagaagaagaaaggttattagtatcgaacgacgtacgttgaatgggctgtggaattcgaaggttgatgacttacctttagtaactactttgccgttgacggagagaccgtaatcaaaacggacgtcggatcgat

SEQ ID NO: 194315 - DNA, 3386 bp, Cannabis indica
tcataatgcccatttgaaagctcatgaggaaagaagaccccatatgaaatttttagaaaatatcaaaatgttctattaaaatttcgtaggagacccatgtgaaagtttatgaagaagataaattaaatttcagaaatgtgtttcaaattattattatgtcgtttactctccaattattattatgtcgtttttgaagtgaatgtcgttttaatgtattgttgtcgtagatagtgttaactttaactaacaacaactaccaagtaaaattagggttctttgattggagggtttaatctgaatttgaaatttaacaatcgcattgggggaagaaaatgacgatttcactgggatcttctggcatcaaaaccctaatattccaacttcattctcgagcttatcgaattccctggtacgatcttaaagtctttatcttttgattgaaaaagagcacgttgaagttttaaagattcaatttttatcattagaacccaaatttgtaattatatttgaatttgtggtgattttaattccaaagtttacatttttattattatcattttcagggttaagaataatagttcaatctcatgtttgaagagtagagattataattcctcagttcctattagatacaatcctaaaaaagcttctaaaagtaatgaaattgggaattctgagctaatcaacaagggttcaaaaaagaaggaattttgtgaattttcagaagcaataactccatttgacaatgtagtaggcattagtagtaaccatagtggaaatggaaatgaaaatggtgtgcagaaaagaaacaattttgattcgaagccacgattcgaacaacatctaccgacgccttcttttaagtttttgcctaatgagtttgaacatggtatgaactttttatgtcaagttctttgcaatgctgcaactttgaaaactggctaaaacaacttagatttattcttgatttttgtttgtgagtagataatgtaatggaagaacatgaggaggtttatgaagagttatttattgatcgagagaatagtagtgatcgggataatttacctcagaaaaatcgaactaagctcgatgctgagaaactggtagtaaagttactagcaatgaggttagtggtaacaaattttgtcctgaatttttgatgtaagattggtgattatctatagtttcatacactgtagaatcttttcgatttgaaatcttggatgtttttgcagggctttcaccgctgttgaactaaggaaaaaattgtgtggaaagaaattctctctggatattgttgatgaagtgattaatgactataagtgcaggtgcatttctaagaactaagaatatcattatactacatttcattaatatgtacatttctttgtccaattgatcaaaaaattacaataaaaatctccaactttattgtttgacactatcccacaacgaacctctcttcctcactttcctcttgttcaaagaaatttctgtttcgttccaaccataataaccacttccatacttaactggggtctttcattaatgtataaggggggagttttaactttaatcctcttccaccttactcctttctcgccgaagagctgagggtattttcgcaaatggtggtattttattcttagttcagttgatttcaaattatagaaactttaccaagtagtgacattctttaaacatgttgaatgaacaaaatttgttgtcttgctcaagtttgttgtttgtttctgttttcggtagagggttcatcaatgatagcatgtatgcagagggattttgtcaatctagatggtcttcgtcgagctggggaccacaacggatcaagcaagtaagttaatctctgtttttaagttaaattttctactttcttatgaaaggcatacttctaattttaacagattttctatcacttggagtccttactcttaactaatatttttctcagctggtagctctaagttcaagcttcattttttggagtgaaaaagtttgcttacgcttgttcagattcattttttacttgaaatttagaccgaaataatttgtgaaaatagcctaatttttttgggcatcatttcaatcttgccaaatgcccttttttctacacaacaagatctgatttaacatcatttttatgtatgaaattcttctcaaagattgaacaaaacttacttgaaacttattgaccgaaataattggctaaaatagcctatttattggcatcattttgtgaatagcctacttttttggcatcatttctatcttaccaaatccccttatcattatcttttatgtatgaattttttttcaatttcaaaagattgaaccaaagttatcatttttctgtttatttaactttgtttagtaaatcatctcccttttcaggcactttataggaagggagtaagtaaagacgatatagagaaagcaatacaaatagtctttcaagatggagaatccgaagaacacaaagagacgagtcgtggcctatcagagccatcgatggatcgtttgcttgttcaagcctcgaaacaatggctacgagggggccaagacgtgcctaaagagaagaggaaatcaaggatcattcggtggcttcagtaccgcgggttcagctgggatgttattagcaccatagtaaagaaactagaatccaatagtgagtgacccatcttaagttcatatagctatgtgatagacaacaaaatggtgtggcccatccacatttatgtggccacaaaaatgaggtctcttcttcagctgttgtcagttgcaactgcaactagtctagcctagcctagttagttttttcttccatagtttagactaaagacagcaacagctgatgttggtggtgggatctcactcaagtccaaaaaaatctctgaatggaagctttcatagtggtgttttataacactgtgtggatggaagataacaagaagtggtgatgatgatgagataattatggagctatagtgtattgcacttgtattcttaagtccatttcaattacctatttaattgaaaagttttttgcagctaaatcctttcaactatcgtttcacttgtatttgacctttcaagtttaaattttgacggtaaaatcttccaaattactgaactgttagcaaatttaaggtatcatttggttactagctattatagatgatttatgtgtataattttgtacatgtgacaagtttatattgatgtacttaatattattatttcaaaattcattttaaaattaaataaaattataaataaaaataaaaaaattcaaaaatatagaaattaaatattttaataattttaataataatattaagtagtactaatataaacgtagtcacatgtag

SEQ ID NO: 194316 - DNA, 1290 bp, Cannabis indica
atatataaagatggattagttaagggtgtaatcttgaaggtttggctgagtaggaaggagacgataagggtaaaagttattaggagtagtctgatgaagtgttgtgagttgaagaacactgcttggttggtcttctgatccaccaaatgggaattgatccaaaatatgactcattcctcccattctctccacttcttctatctttctcacatttactacttcattctgctcctcatatgttgttgcagctgcctgctgctcctttaactatattgtcattttatataattattattatatatataaagacataatcatttgtatatatatatatatatataaattaatatagtgtcatgtatatattctaaccagatgaaacatgtgctcattatcttgccccagtagttgctcctatgtacagttcaaaacgtatatatgatcccatcatttcattgcaaatataataattaattgacaaatatttgagatatatattatatggacacttataatgagatttcacctttctctcgagattctccatctgctgctgtaagatttcaaactgcacatatataacaatactcttacaaattacataacttaatatcactgctcatttataaaataaagaaattgttgagagagagtactggtccaattataaaattagttaataccatataaataattatatatgtaagattccaaattatattattcatcccgtttatggactatcactagtactctttctacttctaaatttatttacatataaattaattaaccattactcttcgatcaatgatcgatcgaagaagagtacttttgcttaattattgtccaaaccatattgtctatatacataagtacttatatataaagaaaaaaattgatattatctatacatatatagaatatagcaattcatataaattaatatataggataatgaaataattagataaattagtgaaattaaagtaccttgcgagttcgaattttatgagaggaatgctctaaaacatgctcgagttcattcagctcacccaaacttagtgaactcaaatcttccccaatatagcgctgtagactcagttgaagattgcgggtttcgctcatgattcttctcatttcaccatgcatttgttcctacacaaattatttagtttaactcttacttgtatatttatgtgtattataattaattctagtttattaataggccatataagattctttttgaaaacagaaaggtaatctaattataatatatatatatat

SEQ ID NO: 194317 - DNA, 1288 bp, Cannabis indica
agaagaaggatcaataccctgaaagttaaagttcaaacaaaaaaaacaaaactcataagaattgaatgtaagatgtaaatgaacaaggaaaggatagaaagggaaagatagttacttgggagagaaaagggggtttggtttgtaacttgtggcgattgcaaatgaagacgactttttcattggtaaagttggtggcattgaatgcaaactggaatagaagagaagtctttccactgcaaattattcaccataccataccataaaactcaacacaattcaagtcaaaaatagaataaaaaagtaatgaaatgaaaaggtatgtagggacctagaaggagggcctgagagaaggtgcatagtattattagttatagattgagtttgagtgtggaggtccatttgcctctttgtctctgaggagattaagaagaagctctccaccatagcttcagctgcagcagggtctcgctctcagtctcagtctcagtctcagaccatcaccagtcaccctcttcttcttttagcaggccaggcctagcaattcaactcttgtcttctcttttaaggtccattctgtagtgggatttagatcccccaactgaggaaattacactacccaactcaactcaggccactaatttggcccaacttgaactatttctgattcattcggatgcctctataatttaacacctaactaaatatttaattctcagcataataataataataactaaatatttatttaaaagaataattttgtaatctaagtaatctatatttcttctttttttttttttaaacaaaagtaatctatatttcttaactataaactaattaataattgagacaaataaatttttttttttccctaagtgaacatgtatataaattggccaagtcattgagtaatttttcgtaaaaaggaaaaggaaaaaccggtctcagtttatttctattattttaactttcagtgagaaaataataagatatcccgggctcctttgtattatacaatatttttatgtaaaactatatgtggtattaatttttatggacacttaaatatataataatttagtataaattaaagtttaacatagtattatataaaaatatgatatataatctaattcaatataatacaatacaatacgacttaatacaagccctaaataattattttaacagtctcagttgaaataaaatattactaaatgttttattgacctgctactcaaaaattaaagatatgaaacacaataatattcaatagatgtatacaatt

SEQ ID NO: 194318 - DNA, 1174 bp, Cannabis indica
aatatgtaaaactataactaatataatgttgttatccttctataaataaaaacaaaagaataaaggtaaaatattgtgagcgttgtctaccctttaaaattgctctgtggcagttatggttttcttttagttttttttgcttttttaactactttcttcatatcttctagcctataaccgttccagatcttgctctatagtattctccccttttgtcatttcaggtatccgattttactctgttacaatcattatggattcctttatctatgatgtttccaatgctctcactgccagggaaaaaagaagttgttaacatctgtaatgtgactgctccccctccaagtcctacatcaaatcgaattctatgtagaattttctctaatcgtggtcacaatccaaagcagttccataacttcataaataaattttgggttgggcattttcctgtggaaatttctaattatgatgaaaacttctacatgatcactttttgttgtcaaggagacttacttaggattctctctaaagaaccatggcattttcacaaccaacatttggttctctgcctaccaaatattttgggtaatgcttctttagactcggttaccatctctccttattggattcaggtgtacagattgccttttctaagcaaatctgaggcccttgcaaagatcattggtggattgataggtacttttcttgaagtacatgaagactccctgaatgaaggatggggccccttcttaaggcttcgggtggctattgatgtgtccaagccacttcttcgtggtcagttggttactttgcattggatcaaagatgaactttggcttgatttctgttatgaacgactttcggatttctgttatgaatgtgggattataggtcatgtgtttgacaaatgctctcaattcatggaaaaagttgataatggcaaggaacccgatctcggctatggtccctagatggaaggtgctactcttctgaaatcgtcttatgatcgatatatacagacttttcaaagtctggtccttggccttttgttacacgcttggtgcagacactgtcaaccaaattatactcagtctagcagccatcagcaactccaccactaatcacggatcgtgacgagggtaaggcagttctgactcatgttttgccatcccct

SEQ ID NO: 194319 - DNA, 846 bp, Cannabis indica
tttttttttttttgaatgaatcaaattaaattatgggttgtataaatacatatggtccaatttatcttatgtaataaataagtgttttctagaaaagtttgaataaatatccttaatttgattgataactaaagcaacacatgtcaaaataagaagaaaacaatcaaagagaggattaaaacctccactaagaaacactacattgacttttggccacaaaatgccattaaactttaaaccatctaaaatggaccttgcttaaatagagagtttcattttgctatgtctttccaaattattcaaaataaaatagctagcaaaataaattaaaggacaagaatttgtgaccttactatacttttcattcttatttttctaataaatttctatttaaatgtcattttatttattcaaaccaatggttgacaagtgtttggtatattttactccaacacaacataaaaacatatttttaaaaaataaaaaataatagcattgtgttgatgtatttgtttttagacataaaaacaaaagtaataaattattttactaataatatgtgcacacataaaatgaactaaaacactaaagctagtgacctagtagtatttttagtcaattacatcttattaaaacaaaattaacagtttttttttataaaaaaaaatagtgttgttttagtgtatgttttttaaatttattgtttcgtattaggttattgagaataacttaatttgaatcaatataattttttttatatttatataagaaataagttaatttttttttttttttttttttgttataaataccaacttcatttaaccaacaagaaagagcaacaaa

SEQ ID NO: 194320 - DNA, 2155 bp, Cannabis indica
aaaaaaaaattgaaaatctatgagtacctgcaaggattttctataccaagtgcgaatttccaattattaaatctccatgggtaagtactaagtttattttaaagactcccaggttatgcaatgtaatatataaatgcttaaataaaaaaaagtttattttaaagaagacaagtgtattcttttttaagcacgatgtctaagcttatactcatgactagtttacaacatggtcatgtggctctttactatgcagtttattgttgtattagctctttttttttttcttgccttagtgtagatgtttgggctgtaggagcaggactattgctcttgtggtcaactaccggtggccttgttttctttcaaacttgtctgatgcctattacctacaaccactagatcaatggacactccgagttgctcactacctaacatggctaacatactgacggtacactaaaaaatagtttccttcatcaagtgttatacttgagagagacattctcacattaaagtatgaaacaactgttgattatgttctaatatctattttatttatattatatatgtttataaagaacattgttagctaaagcaaacacactttaaagtatagatcaatagtatagatttatggtgtttattttggctcacattgaattaatatatgtatgaatatttgtctttaaattgctattacaaccatctgtagggtacgatcttaataacaggacacccataatatattatgtattgtacatgaaaatgtcagaagcaagacttttatcttttcacttttatttttgtaagatattgtagatattatggtgtagatattgcctttggatggtggggaggctaacaactttgcttaagagttgtgtatagtgtcttcgattattataacttgtagattttgttgtctttacaggaagaaccatatatggtatcttcgtcttccattatcatttataggaacttacaatggcgtgttaggcctttttgactttacatctaaaatatcataaatttatggaaccccactattacaaagtctgtaaaacttctccttttaaaactagacatttccatcctgttaatattaggttaattaggatttttactttctgaagtttgacatgtaccaaaaattatgcgcccctgaacttttaaggtcgttaaacatacctcataaactattgagattgttggatttaaggacttttgtctaattttagtaaaaaaaaaagtctaacatggatgaaagttcagggagcgtgatcaagtatatatgtcaaagttcgagagacatagtttagtagatatcaaagtttggagagcatggtttagtacataaacaatcactaaaatagtaaaattaaaataaattaaacaaaatgccttaaatctaacaatctcaatagttcaagaaaaatttttaacgatcagaaaaattcagggggcatgatttgttacatgttaaaattaaaggtgaaaatcctaattagtcttaatattataagaacaataaccttatgattattaatacactaagatttctcttttgtctgttctaaaatattttatagaaagaatatgatttaattttcttttcatgtatatgatttagtttgagctatttttctgtacccatgcctatgatcagtaagacaaatttatgagaacatgaagcattgagatcagcaagacttttatcctttcatttttttagtaatgaacatgtatgtgtgttgtgtgtgcaatatatatttgttagtaataataaaatacatgaaatgttcattttcactcacttatataatgtctaatggatacattgaagaagatctccctttctttggccaagagggattgcttgaactgaagaaaattgttgaaaggtttgaagaaaagatttatagtgtcgccacaagccaggtgcttctgtatttctgatcctttttttttccttttcacttactcaacccgttgccatccaaccctgctaatagcatgcccatagatccatacaaagaacagtgttctttatggtatactcgattgaatgaacatataaatagaggttctatttaattcactttagttaacgaatatttttaacactgtttgacttagggttgtacaaaaaaattcg

SEQ ID NO: 194321 - DNA, 3128 bp, Cannabis indica
cgctcccatcccgggaacaacgaagattgagaactttgaccagaatgttggtgctctgtctgtgaaactcacaccagaagaaatggtcgagcttgagtctttggctgctggaggtgcagttaaaggtgataggtatgatcagtccttaactacttggagggactctgaaactccaccactttcttcatggccgtcatccgagtgaacatgtaatcctgatcatccaatcattgccatctctgagaagacgacatcttctgtgtgtgtttttgttaataaaataagaaaatattttcagtcaaaacgggtggcagatgtcttagttttcattgtgtgatttatatatgcgtgtttcagttcttctgctatacctatttcctttatttgcttcaagtttgaatatgttgtcgtatgtttgaatttaattagcatataacagcaagaaaatgaaggtttgatcagtactctagctatacgggagcatataagtattgctatgtctctctggttgaggactttgaaagtgaccctacaatgtctctcgatgagaaacataaacttccgacttctctgtgttaaaactgagatacataccactactcacaacaagaaattaatgagacttttctaccacatttttatgatgctgacaaaagctatgattatgctgcaaaactaattttatttttatcagcacatttttgcactggcaaatctgtattggtattggaatttttgccagcacaaaacgcaaatcgtcggtaaaaataacttttccgagggcctaaatgctctagtaaaagttagacttttgccatcaaaaatatatgttagggaaagtcttacttttaccagaacattaacgcgctaggaaaagtcttaactttttccagcaaaaatgtgcactgaaaaaattcttatttttaccagtgcattaacacactgggaaaaatcacaatgagcctaaatacgaagccttaatagtcggcctcaagctagcacatgaagtacgagctaaccacatggacatattcaacaattctcaactggttgtgaatcatgtcctaagtgaatacacatttgatgtccaataataatactctaagtttacataccatatatatcaaaagttttacagcttataacactgtatttaaaatgaaatacaataggtcaaacttatcattatatatttttgggaatcagaataaagtaatagagaaatgtaactgaataaatgaataatcaaaatcaatatttgtaatatgttgtttactaaaactactcagaaatagaatgatagtgatttatcttgtttattttatcgaaaaaagtaattgaaatgcttaaatttactaaattacccttttgagttaaactataattaatatatatattttttttggataattaaccattttattgaaaacaaaacaaatggattacaccattttagtagccacaaagggggctacatcccttaaacaacccacagtctttgccttggcacatctggcccaaatcgcaagtgcatccgcacaaaagtttaaacaacgagaaataggagttaaactgaccacattaaaacttttacacagagctaagcaagcatcagaaacagggtaagagccctaggcgaaaggcaggtaacccgatctgaaagcctgcactgccactaaggaattcggttgaatatgaagaatagaaatacctctatccttagcactgcgaagagcaagcaggatagcctgcagctcaccttctagtacacccgagaccttgataaaattcgtgacaacccaagcactctccaaactctcccccacaatttccaacaccgctaaaccaacatcaaacataaccacaaaagcatccgttcgaaggcagcagacatcccccaaagggacctccatagagctgcagagaggcaccgaaatcatctcacaattatccaaatcagacatcacaatcaccatttcagtgtatctcgcggctatatccttgtcgatcaaagcaatgttgtagcaaattccttcaaaaaccaccctgtttctccatttccagatagtctcacacaaacagacgacaaacaacttcaactcattctctttaattttcgaccaccaagacccaaaatcccttgtagagttccaattcatgcactcaattcaaattccccacttactcttgaaccacagacccctggtgagattgcactggcaggataaatgttcaactgccatgttgcaaaaaacacactgtcatttttcctgctcaataaaacccagccttgccttaaaaggtagacactgagaccaaatttttcacaacaggagctttaagcgaggatgcatcttaaacctctacaggtctttccacaattgatctggatgtctgaatttgtggcattggctcacccagtacgcactcttgaccgagaacatacccgactttgaagctttccaaaacagaacatcttcttcaccattttatggtttgatgctaaggatagaagaggcaatatccccatcaaaataggccctgataacgtccacattccaatctttagttccttccacaaataaatctgaaaccttcaaaaatgcttgcgttctattatagctgaagctatccttaatctcttccaaagatcttcccaatatccatggcctatcccataaattcaaacttccactcccaatcataaaaccaacaccctcttggcatatggcacgagcctcaagcatgccttgccagccacgagaatcacccccatgtctaccaatactcgaagcatcagaattgtaacaatacttggaaatcataatgcgcagccacaccttatcttcgcccttgagaatcatccaaaacaatttcgcaagcaaggccaagttgatcataacatgaaactttctaaatcccaatcctccacacctcttcggttggcatatttcagtccagcttttcagggcacaataacgatttttctccttcctccatgccccaccaaaagagcaacgaatctgtcaagctcatcacatatcgattttggcactttagcggtttaggtaaagtaatttggaatactctgcaaaactataatatgttaaactataatatatgatagt

SEQ ID NO: 194322 - DNA, 1762 bp, Cannabis indica
aaaatgcacaaaaaaaaaaaaattgttttcagtgtaaatatgaaaaagacccttaaaataattatagtaataaaagagagaagagcaaggaaggtagtgtacctgtctataaacagaagcatctccatatgattttcttaattccactacatacaaagaagggctaatctcaaacacctgacaaagttcacaagcaattatcattaatttcaatacttcaattacagtaaaatagaaaattaatatcaatggcttgaatatgagatgcatcaatgaagtgtacctctgctacaactgaaagacaacccgaactgttagggcccttgtgctcttgcattactttcaactgaaaaatagagattgacaagtaagtgagtaactccatttgatctgaattaatagtaagtaatcatattaacaagaattcaaaccaacctttccgtttttcttctgaacacaaaatcccatctctattacaatatcctctatcctctctagcaattcttttgcggaataattggatgtaaatctgatttttctctctgacacatcctgaatcagcacaaaattggatactactgatgttagtgattgtttgacaatatgtaaaataatgaatggttttaaagccaaccactctttacctctttctcaaagaaaccagaaaggtctagacacgaggacattccgatgagttgaaaggcattgattaaaaccggggagtctgaagtcctatctcttcttcagatgtctggaacaaaagaatcaagtttctgttattaacaccaatctcccaaaacaatagtggggaaaagaagagtaaaataaaattccacgggcataccacatggtgaattgagcagggatcgtcgttgtcagtgtatgtatcttcctcttcttcttcttcgtaagcatttggaggagcatagcactgctgaaaccattcatctgatttgatgttttccattgttatccgggtaacgggattgggatcaagtaattttcctaatcatgttctgcgcaccgggagataaccattttggtatcagtgtctcacccttcaatatctgaaatcaatcaaaagtgaaatgagtacacataataataatacaaaatgaaaattaatctaaatggatagttggttaattaccttttgatagagtaactgcaagatttctatcaatcaaaaggaagatatcctgtaaggattacatacaagatgacaccacatgaccatatatccgaggtagcaccatcataccctctattagcaagaatctctggggcaacatagttgggacttccacaagttgtatgcagtaaaccatcatcctgaaatgtaaattttataagtaactggacataaaaagttgcatacttgattatattttttcaaaaaagggataaggtaaataaaggtaccctgaagtgttgtggcagtgcgctgagaccaaaatcagaaatcttgatgtcccctttggcatccacaagaacattctctagctggaaatgaagaggtccaacattaaaatttaaattaaaaacaagaaagatgaaatggtatatatatttttttaaaaagggcaaaagagtaccttaagatcacgatggaaaacacccttgctgtgacaatagctaacaccatcaattagttgttggaagagcttcctgccttgagcttcagtgactttacccttatttgcctaaattcatattaaagggagtgagttaataaagagtgaaattaataaaaaaaaaaaaa

SEQ ID NO: 194323 - DNA, 1110 bp, Cannabis indica
aaaaatttcccaataaatttcttgtgaacagaacctaggttgtcttaggggtggcccaccatcaggatctgagaaataaataaataaataaaaaacacgagttgtttgagtacggagtaacggaggttttacctcgacgtacacgatattgcgtggacaatcagatcagtgacatcatcaccaccgccgaaacgttttgaatctccgccttacgtcgtcgttttagagggtgtaccaacccgttcccaacacccgcgtcgcaccgtaacattttcctttttctttctcgaccggcgagtgagggtagaaagaatgttttagaacaaaggtggtgagtctggtgacgacgattcattccgagtcgactcgtctctgaaacgccctcttcttcgctcgagctcgagcgagtcggctcggggggagcgaataggtcagtggtagcttcgctcctgagtcttttcttgattcttgattattttcttggtgctgagctaagaacgacggcggcggtcatgagaactggttttgttaaccgtcggatggttcagaggttccggcaggttgcgatctcaactgtgggatcattgaagatcaagctgctcttgtgctgttgtatcgggttttcgctcatcgcagtggctagccgtgcgccggccttcttgggatggaccggctccagtatctctatgcctccgatctctgattcacggttagtatggtcatttccactcttaatattttcgaattaagcagttaattaatttaattaattagtatttaagtccaaatccgagttcttagtattcgaatggtaaatttttcgctggatttttttttctttttttctttaaaaaagaaacttagattaaattctgttttttgcctactttggaatgttttctagcacaaggaagtggcgtaaaatgatgatatttccagtttagaaattttcttttattttatcagaagattaacttgaattttctgttaagaaatggggttcacatcagtttgtttttgacatttgggtaaaattgttttgtaatggccaagttgacaaatgaaatttggaaatttgctttttttttttttaaaaaaaaaaaaacgaaa

SEQ ID NO: 194324 - DNA, 1977 bp, Cannabis indica
tggtaaaataaattctaacactcaatcttccaacgaaactctagatcgttgggcgaattgataactaccctagaatcattctctataataataatattccagctttcatctttagaaacttccaaagccaaccagcagcttggcacttctccacaaatagcatcaaaaaactccattctagccatatgcacccgacccacacaccactccaaggtggtttctagccacaaccgcaatgcacttgctttccatccccactttaacatcacaattaaacttaatccactcttgagggagaggctgccatccaactaccagacacggagaaggagtagggaaaatagaggctctgtaatcttcataagagtaatgaatagagtcaatacaatgatttatattaaccagtcttctattgtgtaccttgtcattttgagttcgccaaattatatcaacgataatcgaagcataaagaaacacttcatctgtattaatgctttgttttcctagtggcctgatgaatttaacccagtcccacatttgaatgccagacccagaaatggggaatataccccacggggatgaatgccataaataaaaagccaaattacaagagagaaataagtgctctatcgtttcctcatcacccccacacaaggggcaggccacatcctctaaatggagtctcttagaaagaacaacacgaactgggaaggccttagagaggatacaccaccacaatatcttatggcattccaatatgttactattccacattttattccagacggacggtgcaacttcataatgaggagccctatctaaagcttggataagataagccgatttacacgagaagcccccattactcttcttggtccaaatccacctatccttaccctgatcggaaggtccaccccctttcaggatggccaaacagattctttgtcgaaaaggtaattcaatttttgaatattccaatcgccgtgatccgtaagaagattaaccactctgttaccacccaaaactataacaccattcgacttaggatagaactcctttccatgtgagatccaaggattctcccaaattctcgtatcttttccatccatgatctttacaagcacctttcttcaaaatagctttggctttcaccacattttcccaaaactacgaatctgagtatttgtacttgtaggtaaagaaatattttcctttcatgtacttcgcttccaagaccttacaacaaagagattgactccaagttaacaggttccactcccacttagccaggtaagcatggttcatttcttgagtcttctagaaacctaactaaccccgggatttgaaaaggcacaatttatcctaagcctttagataaatctcatggtttcctttctcataaccccactagaaatcacaaacgatgccatcaatcttattaacaagatggttcgagagttttgtaatatgcatggacagacttacagactcaataagagtagctcgcctagctttcgaaataataatttccttaaatttcccatctaaaatatatataatttaaaacttttatatcccaaataagattttatgtccgttacacttgtgggtttattttgagcttatgaaaattatttgtaagttgtacaaaatataaattttttcataattaactaaaaaaaatataaaaaaatttaaaaaaatatgactttagagaattaaatatttttatgaattataaatttatatataggtgttgaggataagatagaataggcagttagttggtttggtagttaagtcagtttattctgttatgacagttactcattagttgtgtactggtagttctctctgttctactctataaataccttatcatgtaattactgtcattcattgaataaagcaagattactttctttctctgttctctctctctctctctctctcgagtacaatctcaacttggtatcg

SEQ ID NO: 194325 - DNA, 735 bp, Cannabis indica
tttttatttattttatttctataatccaaataattgccccaattcattttaaaactaaattcataatccctttcaatcagacccccatacctctctcttccccctgaaactaccatacctgccactgcattatctgattttaaagttacaatatttataacatgttcttcttgttccaaaacatccctagaaagcatcattagggacatagcaaaatcttcctctggcaaagtatctgaaactgaactcaccaaatctgaatcaacatcagcccaattaggtattcttcccaaggcattgggtcgacgattctatttggatcgtcatcgcaagtgggtttattgactctgttttgctttccttgtcttgaatgttgacagagccattatcggtggtggggaaagagaacttgggatggacgaagggggcctaaggatcttagggtttaaatagtcagggaggtctgtagtggtctctattttggtcgagcgtcactagaggtggttcattggcactgatccaagagcaccaatggagagagaaaaatctaagaaagggtgaagaaggatgcgagtgagtgagggtcgaggtttctgggtcttcgtctggggtggtcgagctcgagtcacgaaaaacaagagctaccccgccagggttggggctgcctatggctaacagagaaagagagagatcacagaagagagaaagaagggagaagaaatgaagagagagagt

SEQ ID NO: 194326 - DNA, 2041 bp, Cannabis indica
cgacccgttctagaccctaacccaaacccaaaccaggacccccgacccaaacccaaattccaaacttgaagcgagtctcggacccggaccctgacccagacccaaacctgggcccagaccccaaaccccgacccgaatcctagactcggacctaaatctcgcacactagaccctggactcaaacttgaaacattgaacccgtccaagggcctcggtcctagccctaggttttgaatccaagtctagggtctggattggggtccagggttgaggtccgggtccggctccaggtctgggtctagatctggagtccaagttcgggtctggtgtctcgggtcggggtctgggtccgaagtttaggttcggggtctggggttcggtgtccaagtttgggtttgggtgcggctccaggtttgtgtttggatccgagttcgggtccgatgttcggatttggggtcgggtctaggttcgtgccgagatccaggctcggtcgggtacgatataaaataggatcaagtcatggcatggtgtaaaatattgatattttttagtaagaaaaaatctaaaaatagttttaaaaaacttgtgctaagcactattaaatttttaaaatgacaagatactattttctattctctcacttttataaacataattctaaaaactaaaaactaaaaattaaaaccaaagccaaacaacctaagtacttttagagctatttttaaattttaagtatttatttattaacaagaatctaacaaattaactatttataaactaattggtgaaaaaaataactatttttaagtacatataaacaaattttaagtatttattaacaacaataatccaacaaattagctaattttaagtatgtgtggtcataattagtggtttcacactttttctgtgaaagagttggtcttcataataagttcaaatcctccaataaaccaaatagtaaaaaaaaagataacttattaacttctatccttgaattaatagatatttatgatcccaatccaatcaattaacatattttttgtttttttcttcaatttataataattaataatgcaataaagaccaaatgtaagagcgtagccggcagcttgctctgttgtcaactacagcaaatggcagctgtatgagttttttgttatgtttggcattttcccatatttttatatttctatcctaattaattaatttttcccacgaaaaaataatacaaaaagataataaatttaattgatcaaattaattcacccctgcatgtaatcattctcaactaaccaaccaatttcatataatcccatcttaaaaaagaagggataatataaatctaacatcatctacataaaattctagcaaaatgaataaaaataaaaaaaaaaaaaaaaaaaaattgaataaagaagaacaaaaaaaaaaaagtacatgccttcgtagattattataaacaaatttcaatctcgacgggaggccaagggagcgacctcggccaagggagtggtcaacggagtgggaatgggtgagttcctacaaataggacacgtaggatgctgacgtagccaagggtcaacgcaggtcaaatgaaagagatgaccgcaatcgggcaacaaccggagcaaatcagagtcgttataatcggccaagcatatagagcaactagaatccgacgtagtagacgactggtgatgatttcgaccgttggatcccttaatcgtgtggaccttagtctgattgtacataactttaggaaagctctccaaaacggcgtcgtctaacccttgctcgacctgatgattatgattatgattgtgattatgatcttgatcaaagtcgtcgctactactattggtgatgaccacgagggctgcggtcctgtttggggacctggataagcgagtccttgggtgcagaagtagaataacagggttacgattatgataacactcaaaactccaactgagactcctattccgtatctgaacccgctacgatttggcgaaacgtcgtcgtctgggctcaacgggtt

SEQ ID NO: 194327 - DNA, 1793 bp, Cannabis indica
aaaaataaataaagagagaaagatggagaactattgacaacaatttagttatgttgttgttttttatttgatattattttggttatttaaactaaaatttgactcattttaaggaaaaaaaattaaaatttgactagtttacacactttaaagtttaagttgttattcatattttacatgaaaatattttatatggtaaaagcagacttatagtatatttttaaaaaattacgaataatttatggtataaaattaaaatatttatttttattttcataaagaaaatagtattttatttggacaatattaaatcatatttttattattttaaatttcttaaaaaactatattttctagtggtactagctagctacttcaaactaatgttcagacttggttgaaagttatgttttgttttgaagaagaaaaattccaagtttggtttgcgaaattgggttgacaaattgcataaagaccaccaagtggatgaaatggtaagaattggtagtggtgaacagttattgaaatgttaatgtcacaacctctgtccaactcaccaaatcctaacaagatagctttgccacatcatcagcttacctgtccatgtcaccatttcattcccttccactcatttttttctaatcattattgtcaggtattagtggtgcttaacactttctgtaagtggaacttcacgattgattagcgatattcacttaaagttattttcttaagttatatgagatctgatacttaattacaccaataacagtatgacaccgaggaaagtgttaggcaccagtgataccttcgactaattctctttctaaagggcattattggtgcctgtctcccgcctcgatatcttttagcactacaggtatgacactcaagagggtattaggtaccaatggtgccttttagcaattctatttcttttaaaagaattgttaaaaggcactactagtgtctagcatattcatcggtgtcatatcgctattgatatacataaatattaggttttatatcttaaaaaaataacttttaagaattatcgctaactaatcataaagtatcacttatataaggtgcccaatgtcaatgctcttcttttaatacctttcaaccactaactcatatgaaaatttgttaattgctatgaggcatcatggtgaggtgataccttaaaaatagttagtagttttttatagtattttttaaaataaaataaacaacattcgatattaaattgcactaatagtgatattacactttacaatagtacgatgggtgccctttatcatagagtggagaagctcatgtgagttctcttagtccatcttcaatggcctaacaaaaactcaaatttgatgaattttatcagtgaaatgcttggtatgctatttatatagatgtctacagtgtcccaatattatgtacactaccacaaatgtttttttttttatcaaataaacactttatcataaaactaatgataatataatgtatttataattaaaacttttgaataaaatactgttataataacgaatatatttttagagcaaattttaatattgtagttagaatataaaagaaaaagtactaaaattgtactatgttagtgttgatttaacacttagtgttgaaattgcttctagtattggatattgctaccctattgctccactcatacaaatgtacaaatctagggaagcacatttttctcgtagggatggaaccgtgcaaggatcgttcctaacggggctggttgggacgagaatgttattctc

SEQ ID NO: 194328 - DNA, 2218 bp, Cannabis indica
ctctctctctctctctcagatatggcgtttctaagtgggtctctcccttttatgcaaagttttaaataaatacttaatattggtactactaataacctagaaataaacaccccccacccccactaactatacaaacaatatttggtatatgccttttttcttttcaatttgcttttcattttcactagtgtaattaaggcatgtatatatctaaattaccccctttaatttcaatttattatatccaacttatattttaatttaatgactaatattaaaaaaaataattacgaattaaatatttaaatgtaatttctaattataaatatatttaaatttaagttttagttataaataaatatctattcttttaagataatgacacataaattatattttttaaatttttgtaggtaactcaacgataagtatcaagtcaatagctatatgacaatttctaattgatctatgtaattaatctatgtaattaaattttatttttatttaaaaatttaattaaatataccaataaaaatataacacgtggatattgacttgacacttaacactcaagtacttacaaaaatttaataaaataacttaaatatattacgataaaatattaaacttaaatatttatctattaaattgtcgccatttaaaaaaaaaattgatgattggaacttcaaattagcaagcttattatttgtaatattattcctgtattagaatactatgttgtgtacacttaatataaaaaaaaaaatgataattatgtagtgatagacatcatgccaaatgactaactcttggttacaaagtttaaagtattttttattttttcttaatttgtatttacaaaaatgaaaagaaaataattttatagttttcaaaatagtgttaagttaatgtttttttaataaactatttttacattttttcttaaaaaaaatattcaatttaccatatcttgagaacccatctccgaatttggcacggactccagacgtcggcccctggacccacacccaaatcctaaaccctgaaccccaaattcagacttcataccttgccttgaccccaaatatatggacctgaacttagacactagccttggactctcacccgaacaccagtcgaaacctcgacctcggccacaacttcaaacttcggccccaaacctggacgggccactttctcgaactcagacctagacttggaccctagccctagactcagactcgaacaccagccccgaacctcgacctcgaccatggcctcaaaccccacgccctacctcgaaccttgccccagacccaaaccaatatagatatggacctaaaccttgtacccgaccccaaaactcagtcccaattccattcccaaaacccgaaccccaacctcgaacctcagccccaacctaaaccaggaaaaaataatgaaaaaaaaataattttcaaaataaaaaataacattttgatgattgatttttttaactcaattttctaaaatttgtttttcaaaaatttgttcaactattgtatttaaaatgcaattgtctctttaaaaaaattaaaataattttaagttataaatcaaaaaccatcattgtctcaataaaaaaaatggtcaatacaattcaaatttcgccaataacaaattaaatcccaattaagaaaaaattacatcataatatagggaagcattgtctatattcttaaaagcatctgtaataaaaaggaatgttaagaatgtttatcaatgtcatcatttatatttttttattattattttactaaaataagaaaaattgataatttaatatttatttaataaggattttttttttttacacttgtaaacagatttttttttttttgttatttttacgaaattctatatagatatatccctattgcaactagtagcgctgcaacttaatttttaacaaaaaaatcgtatagaaacttttattacaactagcgctgcaactattttaaaaattcaaaccgtaaatttaaaaaaaaaaaaataataaggtaattctattatttaataacaatataatattattttaataattttgagagataataaaaataaaaagtgtaagtagtaaagaaatatagtagttagtagtagtagtagtatagtagtagtagggggtgagtgatgggggtgatccaccaaaaacgagacctgaaaagagaaagggtct

SEQ ID NO: 194329 - DNA, 2454 bp, Cannabis indica
tatgggagtctgaaaaactcagatgaaaaacgtcaaatgaaagaagggggatgttcccctcaacatatatctatatatcaaaatcgaagtatgggaattctttccaaataaactttataaagtattaacaggaaaagaataccatctttttgtagaaccatctttttttacccaaccaagttaccaaattttggtgtttcgcaacatgcacttgaaaagcttgacaagacagtgaagtgagtttttacagaaaactttatatcagagaacttacttcagagcggtaatctttctccacagctcctactgttgctcctggatgacgagctcccacaagcatgaatgctgaaatccatatcagcttctctagcatctgcttttggaattcttccttgccgagaacctaaaattcatcaaacagaagaatacatttacttggattatattactttctgtgaaaacacccatacaaaattaatttccagagctctataaataactagatttgttggatttccactacaatttttttttttttttcaaaactgttcaacacgtacactaaggttttttcatagaaaaaattaacagttccagctttttcacaatgtgaaaaataaaccaaaactcatccttaccttgcatgagagacctccagcttgcaatctttctgcaattgcagttgcccatttaccatatgccgctgtcagtccttcaggattagtatcagtctttccatcaacaggaggttccccaagcttggatacagcaaaatatgccaatacttgatcagcatcaacaagacctttactttcaaaccagggctccagcatcccattctggaagaaaaccaaatctgctagattgttaaaatccattggctgtccaacaaactcattaagtccaatccaaaaatatatttgccagtgcaggaaatctcaattcgagatccatattcccatttgacaaactaatatgagaattgttagagaaactatatattaaactagtaaattagaaaatacatatccatccagtagtaataaatatcagataattaaaccatcaaaaaaaatttaattgtataagcaatgaactcaatgagtggtgccgcttgcatttcttgagcaagaaagggaaaaaataaaaagaagaaagaaagaaggaacatttcagcacacttgtcatcaatcatcacatggatctgctctaaacattaaactgaaggccctccatttaaagcaagcttgttaatgtgtttatggctgtcatatcattaaaatacatatggagtaaaagtaaaccaagttcgaatacaagcacggtatagtagaacaaagataaaatgaattaaaaacaaagagaatgccaatggactacattattaatatcctgaatgatttacagcatagcaattgattggttgatgaccaaaccagccactattgttgattttggtggcttcaacattgatggttaaactaaaactaatcttgaattcatcggccactgatgaacactgttacttcgaaagttcaacactcccccttaagttggtgtatgatttcatatatacgagttcactaagacagttaatgagttattacattgatcttaaattgaattacgaatgtgtgctttcaagggcacttcatgacttcagtcctgacaattgatgtcatctatagtctataatatatctagtaacagttcaccattggtgcatgtgatatcacctatgatctacagcctacggccattgatgcataaagtgatatgacattagtactacatcacccttgggatagatagggtatgataactctatgttaacaaagtttttagcttcttttttcttttcttttttgcattaattagctttgttctaaagggttattaatttaatttagtttgattagctttaaataaacgaaaaacacattttgattgttttaaagagtatcaaggaaaattaaacatctaaaaacttcatacaccaacttgagagggagtattaaaatttggaactcacaatgacatcaactaagaccacttttgaccaccaactttcaagctattatatcacaatcaacaacaatggtgaatatatggtaatcaaccaattcaaccattatgcttttccaatcttcaacataattttatgttgaatttgctatctaattaacaatgcagttcaatgggcatattctcacttgattttttgtttccaatttgtttacactgttccactctgttcatttatcgcgcttgcattcttacactgatttgactctaaaaacaagttgaaaacttcaaagtactcgaaaccaacaatcaaacaattcaaccatatggaatcaacaatcaacaacacaatgattaacatggtaataaaccaattcaaccattatgctttaccaatctccaacataatctcatgttaattagctattc

SEQ ID NO: 194330 - DNA, 804 bp, Cannabis indica
aagaaataatggttaaagttttttttagttttttttttttttggaggagaggacaaaaaaccacttttaggaagtgagaaggggatactcgccggtgaagagtaaaagcttaaaccggcaagagttcaacgagaaaaccacttgagctcgccgaaaacgaaaacccgagccggtagtttcaaaaaaagatattaacataaaaccagagaaaataacaacattccggtgaaagatcaaaagttgaaatttcatgaattcgaacctgaaaacagtagatgattggggaattgatggaagaaaataaagagcgaatcaagataaattaagctaaaagactgagaagataaatagtagaaactaaaatgagaaaattgaaagcaaaccaaggaagagaagaagaagaaagaaaatttcttaccagggagagagatcttaggtcgtagataccagatctgaaagtttcagcctctaaaactgaaagaaaattgaataagaagcaccgttcatttcggaccgtcggatcgtgatcgttgaaacacagagatgccaagatatagaaatatcaaagttcagagaccgagagagagaaggagagagagagtactggtgactgactgcccgtaattcttccagtcaggtttagggcagttcggtcagcgtcttaatcttggtaaaataggaaggatcgcttcttgagctgcccgaagaggcactaaggacaagtgtgggtttcgcatatttaacttttaatttaaattgttttatacaattaataatgtttattttaaaataaattaggaataa

SEQ ID NO: 194331 - DNA, 2139 bp, Cannabis indica
caagcttagacaattgacaatgtttcaacacataacctagcgtacggaaatcattaggcttagatcaaaagatcatttggaatggtctttttctaaagtgtttatttacatagaataagataaaaaacaataaaaaaaaattagtacaaatacggtcgttacaaaattttaaatattattaattaatttttatgattttacttacagaaaatacagtcgtttatgttgtactctaattaatttgttgttgttttaattatatttctctattacttttatgtaattttcttgttattttcatattgtttctataaaaaaaaaatcgtaaaaatgtaaaaaaaaaatatctttaaacgttaaaaatataatttattttataaaaattgtattttatgtaattatttcttttctaaatgtgttgttgtgattgtaacttgtttcttattgccctatctttggaagttacattacatttaaaaagaatttttttaaaaaaaaaaatgggattagacttcatttgaagactcgaaatttaaatctcataaaactttatttagcacactttggtgtccaaatttcacgtgatattacaagatttttttaatatgggcctcccttaacaacatttctaatggtgctaattaagtaaacaatgactcccatcattttcatttcatgaaaaaaggggataaaacaaaagaaatatgttattcgacttgtgcttaacgaaatgatttaacagggatatagatgaattgaatgaacatgtatcacaagtttacatcacaatgacctatttacaagatcgtggctagagatgccaccaactcagtatattacaacttttcaagcaatgttcttccctattctcatccctcttatttgattggtgagacagaaataccataatgcgaaaaaagttaaagtccacaagagatatttgctcatggcgcctcagttcttaaattttgcagtagcggtgccgtgtgtagaaatggcgatgcaaaatggctctgcctgatagcaaacaatggaaaatgaaaagccaaacgtcagaagctggctactatctttctatctacatcaattaaaaaatcaatgcatcaaattcagaatggagaaagaaactaaatgtgcagttatgaatacaagttaataaaatggaatagacaacgtaaaacacaaaacacgatttgttttggtcgaccgtagttcaccaaccaacttaatttctaacatgcattatacgagtcagaaaaatgaaaatgaacaacaattcactaacaaacaaaattgataataaaaatttagtacgtactgtatttactccacatcacgggaaggcatgtcatgagctagaaagcaaccgatgaaaccgttgtgctctacttgaaccatttgaagacctaccctggctatggcacaaactattttgatgcaaatttttccgtctcctttttgtccggaacaaaaagtcttctgtatcaagaacataggaaacctaatacacaagagttaaaaaaatcacaaaactacaaacaacaatactgggaagagagaaacagcaagtacaaaagaagaaaaacatttcgaaaaggcttacctttgaagatatgcaagcaatcttgcattccagaccattggttacttgaagtccttccatggcctgagaggtagaagaaaaatcatcattactggcatatttgcgcttattcctgcaaaaaccaggaaactctatcagaaatggctaatgaaattggcaaagaaacaaattcttgcaagttttgaaataagtcaacaaacctcttcaagaacatcccagatttctcctttttatcaggaagaaccgagaggaagtcgttgtataaataagatgaaaaatttgggtccatagatacagcagtcacttctggcttatcatgaccagaatccatgagctgaatggacaagtgtgtagggatggataactgcaaaataatattcacaagaatctttgaagttgacatttttactgtacataaatatatacatatacatatacatacatatatataaaactctcatctcgctatataatttattatttactgttttataaaattcaaagagttagacaaatatcactgataacttacacta

SEQ ID NO: 194332 - DNA, 1673 bp, Cannabis indica
caaatctagcatctaacattgttccggctatcaaactgcgatttagatcttgattttccttttgaacctttgtgactttctctcttctcacttctaccccttgtaaacaatccatcactacttctagtattatttaattcactcctctaattcaactctttcaaattcaaagttgattgcacatcatcgagtgtggtcgattctcttccatacaacattgtatctttaaagtgcgcaaaagaattcggtaaagaattgagtaacaacaaggcttgatcttcatcattaatggtgacaccaatgttttcaagatcaagaatcaacttgttaaaattatcaatctattctacagtagactagtccttcatctaaactggccacaactttactatcaaagtttctggatgagtactaagctttttttattttaattttttctagagtaacataacttgtaaccataatcacaatactaaattttttactaaaaatcaaaaaggtattactagggatagtgtatattatattatattaatatgtttaataatagcatgcgttaaaaacagctttttttcattgataaagctaatgatcacatcttttaatgtactactttttagcaaaaatttacaaattatactaatttaatttgtttctgtgtaattgcacagttccattcacttttttgttatatatatattcttattgtttgtctttatatctggctatcctattatataatatataattatatacttatggtcgtccctgcaaaataaaagatacaaaaatcatttgataattgtgtgggttaggaaggaagaacactattaattaggtcccatataagcctcataagattccttcaagctttttaaatagtaatttatataaatattttcagattattctaagatcctaattttggaatatatatgaaggggctacgagctagtgaagaaaatcaaagtaggatcttactaaatatcaaaaaaccacatttaatttgtttaaaaaaaaaaaaaaccacatttaatttcttatggggaccaaagtgttagcatcatttattttattttattattaataccatattaaaagaaaatgtattattattaccaaatccataattacataaatctaatctgtgtacatagtttcaatataagatccacacctttagatttcatgatctttagtggtgtcattgtgatcatcatctgcaaattaattagtaccaaaattaggttttaaaaagcttatatttgagcaataatgtaagagataccaaaccccattaaacaacattgtagataataaatatttaaattattaatttttgggtagacaagcacgcatgtaacataaaatacttcttttttttcaacataaaaaacttcaaagtatatatttatgtatttatttcctagtaaatatataactatacattaactaggaattattaattatttagcataaagaaattgaatatacatacaattaagtcattatgtctcccttcatacatgtattaaaatttattatacgtatatatttttgtactttttcttaataatgctaatctaacacttttataagtgtcatatcgctattgatataatatcgaaactcagactcatgtaatttaatatagagaaattacttcatatact

SEQ ID NO: 194333 - DNA, 2252 bp, Cannabis indica
atagtattagtagcagtacaactggtgttattacgctgaaaactttgatgatcattattattggcggccaagttcgccgagatggaggggctgtcgagctgagggaggacctcatgatgatgatgagtagggagatggatatggtctaccgaaggcagaggatatacgagttgatcttgatcatgtacatgtactgatgaagaaggaatgaagcagttgtggaaagcagtactagttgcggcgacattatttggattatgattaataatatcagccatgttatgtttttcttccacggaaggagaagaagaagagtaaagaggcctcatcatgtggctactactactgttttctctttcgtagtaattaccatgattccacatttcataactttgtctttgatgatgactagggcttggctttctgaatgctcgacatacaacccaaccttcttcctgcttccccacaaaaaccaatgaatattaatttttattttttcttcactcatacttaattagtactaccctcaaaggccactttcactctaaattaattatataaatctttattatatatgtggtgatcggagcagaaatattaaaattttagaaatgcaaattacgcatgcagagacacccatccattagtcaaaaactttttgatgaacatccatataattatattagtcaagtttaatattctacttggagaagaaaaagcaagtcaaagttttccttgtaattaaacatgtactactatagctttggcatggtgtttgtatttgattgcttgaggatcgaatacaatttttctgatttaccaaaaaaataaaaacatgtactactaataataaaatttacttagctttttcaagagagccaagggtatcactcaaatttaatataataaattaaaattaaatattgatgtttttatttattatttattatgtccttttcttatataatgaatgaagattttctatgcatgggcatgctctagctagcacacgcactagctactagaaagcatataattcaacaaaactaaaaaaagtttagtcaatattgaaaaatatatagtttatttccaaacgaaattataattagttgctcacaaaacatttcgaagtggaacaatgaaccgatacactgttcaacatcatatagagacatatttaaaattttttaagaagacttataataaagatatgaataagctatatgcttgtgtcatagttgcgtgtaatttgtatcatgcaaaatattattattattattaaaatatttatatatatatgagatgtatctactattgaattataatgtatagtattaacaatgtgtcatgatctgctagtagtggtatgatgataattatatcaaattaatcataatgaacaattacattttaattttggttttaactatggaatgaaaaaagattagacttgcctggggtggtgcatgctcggatggtttggaggcgatactcatgcatgatccaatcagatttgcggccattgggagctcgtcccttgtagaagacaagggtcttcctcatcccaatgattctgttcttggaaagcacagctttgtctcttcctgttagccttaccagaacccagctgccgtcgctctgttagttcgagttcctgtcgggtacttcttgtctttgtgactaaagaagtaccattcattctgttcatcgtaccctaggttgcatcgagctgcagtacggacgtacaaactcaattaatatatatatatatatatttatataatattatcatctagtgctctatataaaacagtgtcgatgaataaattaacaaacaatatagcatgttcgaactatatacctttttagaaaaaaaatgaagtttttgtgacacaaatgtcagactaaataaaagagtgatgtttatgtgtgcgttctcagtttcttcctactaaaaagtgcctttattgttttttcttctttcaagattcctatagctccaaaaacgtcaaatccctatatctatatgtccagagcttgctatatgtatatgttggtccaataattaagtattaatcccatatacattaatataataacttttaaaattgatgtttaaaggtaatagccaccattaatgtctaataatgatatgtatatatatttcaatatatataaaatagttgctatacataatgatcagattttatacatgtgtctcctataatttcatgtaagctgcacaagctcaa

SEQ ID NO: 194334 - DNA, 818 bp, Cannabis indica
atgtgatagaattttaataaagaataaatactaaataatgattttataaaaaacaaatcaaataaataaataactaaaacacataattataatatcgtcaaatatgtacataaaatatttaccatgcaattaaattataataactaacaagttacatgatccgagattggactggcaagctggtagcaactctctcttcttcgaggacgggagcttcatctgccatttttgttgaaggtcaagctctactttattgcctcacctagtgttctatgataagactctctatgaaacacattgcatcaaattgtctttaacttgtcacaaaggttaaccacttcagtgcagactggtcaaccctttcaggcattatcaatggcatcatcaattccttatctgtcttttctagtacatcccttcattatgttccaaggaccttgaacacgttggcgcataacgaagctcgggatgctctacgctatgataaggatcatgtcaagagggtttgttgactctcttgtttcaagttgtaattgtacctttgtcccctcctttttgtcttcaagctgttacaattactacttccaaaaaaaaaaaaagtaataattaagttacataatagagctactacttcacaccaccaaaaaagactttgatggtctatatataatactatagtaattgtgatcaatgtgtgagcttattgaaaacatgtgaaattttaataatcatatatacatatacttttaaataaaattgccaccatatatgcaattagatctacttttaatttgcttttaaaaaaaaaaagatttagt

SEQ ID NO: 194335 - DNA, 1379 bp, Cannabis indica
gtatcttaaagtagtgtatgacttgtgtttctcttttactacttttacaattatttttgtttatttcgaagtaaaccatattccgcctgaaggcttctggcttatgcctctcctcactttagcaagacacccttcaaatcccaactaagtttttacgaacattgtctagaacggaaatcacatcagcttaatcacaatcttccaaacaatatgattgaaaataataaaggcctagaatccttgaaatgcaggaaaatcaagcaaattgctagctatatccccgtaaaagagtgaaccacataatcttaccttgtttcatcaaaaaaaaacataactttaccttgtgcgagaaaaccatgatcctcaacaccaaatccatctataagcatcttgtgttatacttgaacaaggaaaaccaatttaacagtaccatatagcaaaaatgaaaaatgaagatttcataacgagaaaactcaaacattaataccagttcattgcttgattagatcctacttagaggacttaaagagactagctgaataaagacagtgaggagtagtaactccaccatcagttctcaaagctaaaagtcaacttaaccaaaataattttttttagctcgttcaaacgattttctaatctaccagttgagtgtcaagaactcagaattcaccaaagaacatataaaattcacttcagaaataaactcccaatccatcttacaccaaaatcaatgacaacaagtatatactgtagatacttagaatcctataataaagtcacacaggctaatcccgttatcggaaggaactgattgctgataaaacgatagtaaaatgcacaaaagtattaatagaataagaatgataaaagttccaaggagcagaatcgcattgcctcgtttctaagtttttcagatcctaacagcactaaaaaaaattcctataaacctaacaacactaatttatttcacttaattaagaaattcggcaaaaacaaaaaatgtagaaaaaagtaacgaatgtaagtggatatagaggagacctcaagctcggcggatttcatggcgatcggaatgcagacgagaaaaatgccggccatggcaatggcggtgttacgcttccaatgtacgggtctacagttgggacctccgctcatgctccagaccttgtgcctaaagtcagtggcgtggccatgggcaccttctccatgtccatgttcagctcctcccatcttgatcactccttaaaaaataaatggatcagaacatcaactgccaaacaaccaaaaccctaatttgaattatttcccccattgaaaaccaaattacatagacaaattacagaattgaaatacacttaattgaatgagtgaagtaa

SEQ ID NO: 194336 - DNA, 910 bp, Cannabis indica
tccagctaatccccccatcttacaagctcctattttgatggtaaattctatgtaagatacggaagctagaagttcccagcccggaggaaatattatattgttatgcggtcaagcctcaacccatgcacataaataataggaaattagagttttataagctggagaagtatcaggatgtgcgttgtcccactagcttcacgctgcaatctcctgacctttgggaatactggttcttctctttaggtttcccggtgaagatggtgccaaacctctctctggactttaaaataccaggtatgagcttttgcattttttcttcacttgacattgttatgcctttttccataattacgactgaggtggtttttattcatcggtggcagcacccgtgccttgaaccccagagagtgaggaattaaagaaaagattggctttgtacagatccttttgggaagaggaattgaaagtagaagacttagtcaccccccaactactctgggaacatggactcattgccaagtcccaaagtgttgacaacatcagcaatataggtttaggttatgctcaacaaattatcgttgaggtctccaaaatcatgaaagggcccttgaagaggacaaacacttgatggcggattgggcattccgccattctaaccccctgactgaagaagaagaactcacaaagagatttgttattgcatactcgaatgagggtgctcttggagccaatatttcaggaaaatgtaaaaggccatttcgtttatttcgtacccccaacctcaataagataggtgaagtcattagggatcagagtaatcacgtatcatctctagacatttatggtagatctcttcctgtccatatctttccgggctttaaagagtatgcaaactttgtggttgggaaac

SEQ ID NO: 194337 - DNA, 1068 bp, Cannabis indica
ttattatttattataagacatttttattgtgattgtgcaccacgatgataacatactcaatctttcgagtcgaagaagataagagcttcagcaaaccactcttgacacttcactaagaaggaacactagggaataattaagtaaaaagatacttgagaaaactaaaggttactttttcattgaagcaaagagaatataatatctttttgaaagactcacgtgttacattacattacaattcataaaaattacaaacataatacacttcttctattaaattattaatattatttatataaagaaagagagaagtgagtagtgagaaatgactagggagcagcaaaagcatcgtccacccatgatctgttgtggttgtggggaagagagattttattattgggtttagaggagagagagactaccctgaggagggcttgaagagtggctcgcaccttgttcactcgtttgcgttgccgtattcgctgcaaaacctcttctttatctaagctttgggaggagtgagctggtttcaagtataggtggctcgtgatccctacttcatcatattttttttcagactcttcacataatttcttaccttttttgcttatcaacactgtagaagccatataattataacaactaaatataaaactagaactagaaggagcgaaaaatgaacaatatatatatgtggggaactacttctcgacttgaattattaatattgttctatctggtctaggggtaggggtgtatttataaggctggatttgggtttggcacaatatttcattgtttattggggaatgggcaacgagtaaaaaaataaggtgggccggtggctgaggagagagattcgaagtggtattggggaatgtggtatcagaatcatggttttctgacatagtcggtcactttcaaccttttcctcagtaacatgattttaatgggcttttatgcaaaatattggcccagttttgtttgttgctgcttcctgaactactgatgccaattcccaacccaatcttcgtagaaaataaaaatggtatattaatttttgttatt

SEQ ID NO: 194338 - DNA, 1152 bp, Cannabis indica
cgtgtgtggagctcttattgtcatcatgttgtggccagcatggctaactcccgctgaggtccggtttgacaaaaatgcccatctgtgtgaatgtagagatcatcccaccattttatcggaatctttccaaccttaaggaactcgcctctaaggcctccccagttcatgaaatcccctggcattgaagatgtagtggactgagtacgttacgattcagggccacgattgacctcaacacctcaatcttttcgggccttttcctacaacgacagcgtctaaaagacctatggatacaatagcgatatgaaaaactccccaagctatgctttaaatgtggcacacccatgatcgaagatcctgcttcaaatcgccaaccattgtcaaggatgatcaaggcaacttttaccccatgtatggggtctggctgaagaacgatgctaagaaaaaatccactttcaccactcctctggccaaatggttccaggattggattttgcaaaagcgcttgggaaaagacccggtcctctgtaaccaaatacgggttcacagcggtttttatgcaactcccctggttaatctgtcgtcatgagggttgttatacaagaccttattgatgctgcccccagaaaccaatctatacctttcaccaagattaccatatcagggaaagaatttgaaaaagagttgttgaatatcattacccaatgctctgggttgggcacgtctgaagtagagactaccattttgaaggaggacaacttatgtgatggagaaaaacaacaacagcctaacctcaaagagaaacatagtactttggggcctcatctcccttttgttccttatagtatgagtagtcattgtcaggaggagactaggcccaataagtccaaactgagccctcaccctatacaacatccccacttggatctcaagcccgtgtggttaattggccttcttctaactgttatgcccaacctaagggtcgtgagcttcctatgggctctcttaccgtggacaaattccatagagagtccactctattcgacccattgttagacattgaagattttagagttaatgaacatctcactggcccaaggaagagaaaagctttagacggtatacgattctctccgtccacagacacatagt

SEQ ID NO: 194339 - DNA, 1396 bp, Cannabis indica
aaggattagaagctctaaagaaacataaaaaactccccactctcatctcaaaagtgtgagaacaagtcagcttagacaaaatatttatttgggtcaaacttgaagaagtgatgggttcaaaagaatgatttcattacattctactttgtttcatttcatatttaacagctcatgaagttggaaaaactaagttaccaactgtggttgctgtggtggtggtggggcatttgagttgatattacgacttatcaatccctcaaatatagcataaaggtccttgttgtctggaccaaaaatctcatcaaccttttgtagagcctcctgaaatagttttttggtaaataaaagtaaataatctgaataagaaaagggtaataaaatgaacactgaaaaaggaagagagaaacaaaaacaagaattacctcttttgtttgcttgtgagaatttagttccttcacatttgaaaggaatgcaccaaactgttcataagacaatcggctcctgatggcaacaaagtaaaaaatttaattagcatagaaacaaagtgaaaatttgtgaagcgaattcaattagtggttttttaccaacctgacttggcgaaaaaattccttcccatcaacccgggttcttgctgaaacagtttaagttcgataaaagttttaaggaatgcttatgctgatttactattgcttataagttgtgtaaagtaggttttgaaactaaccggtatgtgaagctggatcggctccataatgacctgaggttgcagaaccaaacctatcttcaaacatgcctcttgaagttgagaatgagattgcatgacgccttggggacacgggcttagatgtttttgttggggagaccgatgcagagacaattggaggcgatccaggaggtgttagacgaggcgtactagtctgggatgctaagaggagaccaggtgatacgcgaggccttgaggttgccattgtaactaggagaagcaggtatagcaagtttattttcaagttcagaatcagctcaagagttttgcatcatctagtaaagtaataattgagacacaaaatttgtatttaactagtaccatgttcatgtcaaaatgggagtaaattaagtgtttctagcctcactattatcatcattttttcttttctttttcacagcttgagagtgtagttttacactatgatccataacatgaagttctgaacatattaagggttcataccttctgtgtcacgatcttcagaaactgaatttcctacttcagagaattgactccgcattgaagatgttctagatatacctgaggcatcatcttctgcaacaaattggacaaaaaaagttaatatgaattactttgtgtgcctattcaaatgtctaaaagatggatttt

SEQ ID NO: 194340 - DNA, 1164 bp, Cannabis indica
taaattcatatcttattattattattaataattataagaatttataatatgtcgtgtttttgggcttgtcgtgtgtcggacttttcgggctagtgtattcatgcttaagtgtcgtgccttttgtgcttctcgtgcttaaggacatattttttgtatcgtgtcgtaccgatttgtagcatcgtgccgtgtcatgcccaagctcgtattctccgtgcctagttatgctcgtgccaatttcgtgtcgtgtaaaaatgtctgacctgtatttacagcactactgaccgacgacaagccccaacctagaacccgaaagtccagagaaccccgagaccttggagcgacgaagccccaacctagaacctcaaaaccttaaattcgagatccccaacccttgaaaccaccaaaattacattgttgatgccttcttttgattgttttgatagggaagatgtagatggttcttcaattggggctcactggttttcactttctcttgccatcaccgccttctttcgatttccctttcgctttctctcgccatctctccaaagtcatttggactttcaaatatttttttttgttttggacgaaaagaatgtgtgtttgctctaatttgttttacttgtttgtttaatttaggggaaatggcagtagtggtggttatggtgtgacggtggtggtgataatggtgggagttgtgctgtgacggtgatggtgataatggcagtgattgtggtgtgacagtggtagtgctaaaggtggtcggttgtggtgcgaataataacaatggtgtggtgtggtggttatagtatgatagtggtggtgataatggagatggtgtggtggttatggtgataatagtggtgggtatggtggttatgatgataatggtggtggttgtggggtgagagtggtgattggtatggctcaaaggaagaagaagaaaaaataagaagagaagaaaataactttatttttatatgtttggcttctaaataattttaatttaatttttgttatattaccctacatactaattactatagttattaataatagggatagaaactcacgtaaaaacgaatatagcaacataaattacaactaaaatttatataacaacccacatagaaatcatatcacattagcaactagtagaagaac

SEQ ID NO: 194341 - DNA, 1147 bp, Cannabis indica
attattattaccacaagagtctccaccaccaccacaacaaccggaatcatcattctgattcttctcccaccaaccaggaatggagcccaatgcaatatcagcctcaaacgacgtaagaagtggctttctaaaagcttcgccccaatcaatcgacagtcttggacaagctatctgaacccatgcctcaactgaatcctcaaacaacccaattctcgccgggctaatctccgacatcagcaccaccgtgtaactaaaccctttctctttcatcttcttctccaaatgttcaagaattctagggtttccttgccttcctaatgtccccagaatcattccccaattcttcgcctctttcgctttcgtgattgcctttcttctcgtctctctcattcctttctgatcgtattcctccaagaatagcttccttatgtacggatcgtaacggaatgttctcactcctggattcgcgatcatcatcgcttctagatggaatctcccatccgcaacgaatacgattacggcgtcgttttcgctcatagaaggtgagatttttggggctgtgcagccgagaacttccccggccgataagggtttcgattgggggatctggaccgtgaatccgcggcgttcgagctctggtttagcgaatcggattgcagaggcgaactgaatcgttcctgcgaggacaatactcggagtgaatcggaggttgagatcgatggtttggattagacaatcgacgtcgattgttatgtcgacaaagacgtagaggcagggcacggcggtcacgttgacggggaccaggcagctgtggccgtagtgaatgagtagatcagcgccgagagcggaagcagctaaatcgtcgacacagcacgcgccgtaggtcacgtcgccgaggacgaagcagtgtgacgcgccgccgaaggtggagatgatgtctgagaggacgagcgagtacattagaagtccttcggggagctgtagcgccacgcgtgaggcgttcgtggaacgaacgcgccacacggatttgtggacctcgaagttgtagttggaaggcaagagagcgatggcggcgttaagggctgcatcgttgagtattgaatctgggatttggctcttgacaaatcgtttgggaaccctcttctgg

SEQ ID NO: 194342 - DNA, 1625 bp, Cannabis indica
gggactttgaatgattcaccttcctttcccctgaggatcagattactgaaagtagtgctagctttaatagaggtgattgtcttaaaaatttggttgcgtaagagctgtaaagatttatcttgctatgttaatagtaaaaatcaagctcataatgtgtcatgccacaggtttctgtacctccagaagctcttcaatctctgtggactgatagccatcgtaaatcatggggtgccaagttaaatgcatcatcctcagctgaagaccttctccaggtgagttattggttcttttcatgaatgttctaacattttcatgtcttctttagatagccattgtggtggtggataacaactttcgttttctcatgggatatgggaaatagaagtccatatattcccaagttgttgggtctgaagcgcttcttttggtgctttttgagctttctttattccatgcttcacttgttttgcataagtcgaatgttaatgtaccttgaaaaatgtatattaagtatttttttctctgtcctcctgaaggtaatgtgtctctcatttcaggttctcacattgttggaaagtgccattaagagggagaatctattctcagagtttgagaccaccaatgaacttctggattccttgaatccaagaagatacattgctcctcattctacctgtctcgaaacaatgacagtgcttccatgggtacccctaacaacagctgctgtggctttgagaatcatggagttcgatgcagccattttttatgtaccgcaacagaaactggattcacaaaaggacaggggatctggaaatgttattgtaagttatctgatactgctatcagaacatattggagcaccaaaaagaaaaacttattaatattatagagggaaaatggataaattatttttgataaatgctaaaaggcaatagtcgtacctagtaccatccacagtatcatatcgctattggtagaattaagtctcggatcctaatttaataactaataactattatggaatatggccagctatttacaatgcgtcactttataatggtactaagctctactggtgcctattagtaatgctcattatttataattgctcgatagaagcttgacttagtttgcttttttgttaaccataagttactcatgctatgatcaatttagtaagatcccatgtagattttgttaaccagaagtcaagcttacatgtgaaagtatatttgtagtaataatcgtagcattataaattaattgtatttatctgataaattaatcgtagtctattatctgataaattaattgtattcaactggtaaggcgtatatactgagatgaagtaatagttatcaggatagattttggtttatatctgtgtagaagttattagtatatatatctaattttgaatatgttactaatccttttcctttggttccccagaagttgtcttcaaaatatgcattaatgaaaaattcgtttgatgatgggataaccagaactccatgtcaagttgacaatctcaagaaagatagttgggttgatcttggggagggactgcaaaactctggcttcaaaaaaggagccgtggaaatggaagagcgacggggtcggta

SEQ ID NO: 194343 - DNA, 1938 bp, Cannabis indica
aaaaaatcaaatttcccttttaactaatggaaagatgtgatttgttttttttttatttttaaaaaatacaatttttccactaaatgagtaaaaaatagtttaattttacaaaatggggttaggagataggaatttaactaagtgaaaaatatgattagttttcaaaaatatagttatttcgcaaactgctcaagaactttctcgaactaggatagctcatcgtctaatcgaaggacatgccttgtcaaaccatgaattgctaaagtaagtaagcaacataggataaaactgcccagaatatttagataataaaactataacacccttaaacagcacacgaaaaaagttagagcttcaagttgtaacactgaaaaactaaaagtaactcattaacatataaaaaatggtctacaaaacatctaaaaaaaaataataaagaaaagtgaattaacaaaactaataaaaaaattaggagataagaatttaagtaattaaaaatagaattattattattattattattattacttttttgttttatttaaatctaattatattagtctcctaaaaaaaaattcgaaattattgaccgttgttgttatttatttttatttatttttaattataataagaagagcttaaattcaaaaaaagggaaaacggtcaaaagaagagcttgggcaaggcaacgttcgatttaccgttgctactgtacgcccagtgtcgcatccatggcgatgacccagagtctgcgattgctggcatttcatggagggcttcttcttcttcttctactactactacttgccctccttgtgtctgcgattgctcttctcaagctctcctttccatccccatcggtaatttctctctgttcatttttgtgatattagatctatttcagtttctctttcatttgatcataattaacatttgttttttatggtgaggattttagtttatttgctttggtcatggttcaataattgaggcaatttgtttccctcagtaaagagagtgttgctgatgggtgtttcactcactctgatatagttgactcacgatccatttggttcttggcaggggaagtgaatgggaatgggatcaatggatcgacggaagaagatattggaaagaaaggtgacaccttttacttttattttcacaggacaatagaatagaatagaatacaattggggcttttattttcaaccaaccaatcttctctttctcttgtatgaatttatcaacaatgttctcttgtttgattgttgttgttctatctatatccctaattcataatcttcttagagaagagattaaattttgggttaatagaacaaaagcttttctttcatcaaaaaaagaacaaaagcttttcataatcttcttagagaatagagagtggggtgggtgtgggttttacattacttttgttttgtttactgtgagtgtgagcttccacaaggagattacttaagcctcctttagtctcttgttttttcgaatatgtctaattaaatcaacttaatactaggggtgtctctgtcagtacacatgggttgtcgagagctagatctagttcctggttatttattctcatgtaaggacaaacctgactcttctcttcaatagtcatacatatcattccttgaaataatacaacatagatattagatatattgtatatagttggatatataccaccaaaatataaaaccatcaaagaggataagcactcaaaacactaaggttgggtttgtgtatggtgttgctttctttcatactatacaaatataacgtcaccaatagtactaatctatcttaaggaaacgactgcatgaacatggacacatacatttgcaaaatcaaacaaattctgccagtttaatcatgctgtctctcacggagtttcaaagcaaccaaatacctgtcaga

SEQ ID NO: 194344 - DNA, 549 bp, Cannabis indica
ctctctctctctctcacacatacctaattcctttctctaactcgcactattggtttcaaagccaaaccaagtgacatgagtaatatacatgcactcaattcttcaacttgctaatctcattagaccttaattattaaatcacaatcactttgctccaaaaatttttattattaattagtaacaatatgtttggcaggatggaatcgagagagtttacaggggaggtttttatttatttttattttcttaatagagtttagagggattgtttttttaagagaatactttgttattattagtttaagagataagtcattttacaataatagtatttcagtggaggtaaactcttcattcaagagagagttacatccaactctagagtatgttaagctaaattatgaacatccatattgatcaaacgttttacatgaacaatagtgactttagggagaaagaatagaatacgagagatatctacaattaaatcattaaaagaagaaattgtagaacaatgtgcatttaaaaacattctgtaaagtccttttt

SEQ ID NO: 194345 - DNA, 779 bp, Cannabis indica
aaaataacaaagagaaacatgagttgggaccttagttctgagaggatgttgctgaagctgcatcaagtattgatttaacccttttttagcaatcgaccccatgtttgatttctctaatttggttgcaaattgaagagtttgtacagcgactagatcagccagcaccgggagttaggtaggtgcctatgaccaaaaataatctcactcacacacacatatatatataaatgtgtgtctgtggaatctgaccggctggctgagcttttgtttgatgattaatccaagagaaattaatatgcgctaattttttattggttaatttgtttgtacatactttaggatttatattacattgaataatatatatacatatatatatgttataaatatttattggttaatttgtttgtacatactttaggatttatattacattgaataatatatatacatttggaggtatctttatcctaggaggacattcggcactaacctatgtcaatcaaactacatatgaactcacccagtgatcatggaagagtgtgaaaggccaacagtcaacaaggccacttcatataacactcactctttcctcccttcacacttttgagtattgaatttgtgatttaaaaaattgagaaagattgtttaccttttttttttttttttttttttttttttagtaaatgatcaagtgtgcacattatatccccaactcttttagacttaataacagttcaggagaccatacatattcctttacttggtaaacaagttaa

SEQ ID NO: 194346 - DNA, 569 bp, Cannabis indica
cggggcctacctctggtgacgtagtaagcggtggaacttcaagtggggctgaaggttgctcccggtccggcaccaccgtgggaatctccggtgcgtgaggatgagctgaaaacgaagatggagcggataatatcaacctttgcgatcgagtgtaagaagtaattgtgggtttcgaagcactagtcttatttgtgattgggaagacatcgtacggacgaaattgaagccttcttctcaggacggcgttggagattgcggagatggaacacatttctgcagtttgggttaaaatgaattcaagccattaattttctatcgatggttttcattcataatcattatgtacatttgtttatgcacaaagggaaaacgacaacattaaccatgaaaacgataatcgaagcgtgcattgcgtgcctacgtgtgaggagagctacacgtgtttgtcatgcaagttactcacttctatgtatcacatcgcatatgttagtgttggtacggacacctcgtgttcatccgatccaatccgacttttttgttcgtaacaacaatccaactacgtactaacg

SEQ ID NO: 194347 - DNA, 1141 bp, Cannabis indica
atatattattagaaacttgttataattaaataagtaggtatatatgaaaaacaaaatatgagtacgtagtactagtggactgaagtcttgatcaccaacagctccaaattatatataataattgtggtttttgagtgattgacaaaaacaactggacaacctaatcaaaacttaccctttcttatgaataaaatgcattcatgatcgaccaactattcccttcacgtggccccttcactatatataaatgtcaaatttgtagtcttaatggccttgtacctattcatcactttggtttcaaccaattaagaccacatgatgaactttatcttctcaactataaagttccattttttattattattattaattaattaatgtttagttggaaattccacaaccattccttttgctggtccctgacaaattttcgtaattttatttgacttattttcaactatacatatagacttgtagtattatatcaacttaattttattatgttatagttatattattcttatcattcatatagtagtccattgttgaaattaagatctcatcatgaaatctaaaccacactaatccctttttaatttcttattgaagtattattgcatgcttaacacattttatctatgtatatatataatgctaacgcctttatatttatatgtatatgtatataaatgctcaaaatatagaagataatagtgtaatattattagttaaaaatgatccctcacatgtagtcatgatcatgatcataacatatttccttatctaaatattgaaaaaatggggccaaattggcaattgtactatagagctagctagaatattcaaaattaatataaatataaatatcttttttgtgtaatgtgtatcacgaaaatgctttcgtcatttctaaaggtgtcaatttctaatgacatgacctataacgtcatctcaccacaatcatggtaagatgtagtaatacacaattggtcaagattaatttttttaaagaaaacttaaaatttaattaatacagcaacaatcaaacgtttgaagaaccatagaaattgtatcttccacaagagtacaacctgatcaagaacaggagtatgagcagcacaatgcgtaacttgttagcagt

SEQ ID NO: 194348 - DNA, 2652 bp, Cannabis indica
caaaagtgactacattttaataaaatattaagggatacaaaaaagaagtattacttaaaatattaccaacttttgttttaacaaaaaaaaaaaaaagaagattaccaacttttatttaattaaataaattaattaaatgcaaaattaagaaaattaggaactgtaattttgtagatacaaaaagagattctatacctacagaaatacacaaattggtttgtcaaataataaaccttgttatttatcataaaaacaataaccttgtttgataatttcactacttgaagaaaaaaaaatattcatataattagtaattgaaaccgaaaaaataaatcaaaacttttacttacattatttagctatatataatcttacccaaattgccatttccgaaacaaaataaatctctagcaaaaatttctgaaacaaccttgttcatatgagagtgatgataataaagtccattattcttattgaagccataatatttcggtaccaaatgactaaaaaagtttccttagttctccacttcaattttgtcaatttctcattaatccatccatgaattttacttatcaagagctatgaacacaatttttattcttgatttacatcaatccagctacacccacttgcctttcttatcccattaaactccatcaatcttctaacttgatctgcttcttctaaccttccattatctctataaatactagatagcagcacataatttccaggattatctggttccaacacaaaaagcttctcagcaacttctttccccatttcaagattgttataattcttgcaagcgccaagcaaagctccccaaatcgaagatttcggtttcattggcattgattctacaaacctgctagcttcatctaatcgacctgcacgaccaagcaaatcgaccatgcaagcatagtgttcatgtccaggattgataccataaattttggtcattgaatcaaaatattcaaaaccttcctccactagcccagcatggccacaagatgatagaacagttacaaaagttacataattaggcttcattccctctcttatcatttcctggaatgattcaatcactttgttcacataaccatgttgttggtaagctgagatcatagcagtccaacaaatcacattacgatccttagtttcttcaaaaacacaataagcatcaatcaagcttccacattttgaatacattgttattaatgaacttagaacactcgaattctgaacaaacccacattttattacctggtcatggatcaaaatcccttgattaagagctgaaagggaagctgaagcattaagggctgaagagtatgaaacttcatcaagtttcaagccttcccttctcatgatccaaaaaaggttacaagcatcttcaaacttgctatttgaaatgaatccacttaccataatattccaagacacaacgtctctaaaagagtctcctcttatctgaaacaacttaacagcattgttaaacccccacacatttacagtacatatcaatcaaagagttgctcacataagataatgattccaaaccatgtttcacaacaaccccatgaacttgtccaccaaattccaaggtccccattttagcacaagcactcaacacattcgaaaagctcacttcatcaggagagaccaaactctccctaataacctccttgaaaaactcaacacccttatcataaaactcgttttttaaaaaccccgtaatcatagaattccaagacacaacatttctatcaggcatttcatcaaacaccttctctgcagaaaccatatcaaagcatttcgcatacatatcgatcaaagccgaagaaacaaacaaatgggtttcgagcccaagtatccaaaccaaagaatgaagttgttttccatgaattaaaatctcagtttcccacaagctggcaaagctgcagagaaagtgaactgattcgggactaaaccagaacacctcatttgtctaaagagcaacaaagctttaaagggttctccattatggaacattcgggtgacgatagtagtccaagcgacgacgtttttggagacacggtgtgcggcggtagagaacaatagaagcagacttcggttgatgaagccacatttggcgtaggagttgaggaggttgttgaagaggaaagagatggagatgaagtcgtttgtgatgaggtgagtgtgaatttgggagacatgtttgatgttattagtttgtgtagtgtggtttagaagattgttgaagagggtaggagtggaatctggtgatgatgaacctttacctctgtaatggtaaaatctgtagaagaaagtaataaagaaagacttggttttgggatatggagggaagagagttataatcataattcatcatcataacaacacattacaatagcagtttttttctggttttatttttttatctcaagaactgcaagctctgtcttgatcttgatgtgaatttagtgttcgctttgttattgttttacgttatattgtattccacaaatgatgattaaaacgatcaaacttttgaaatcttgattctgctgagaagagttgttagttggtacttagtttatttatttatttcattaaaaaatagcgaaaactgcaccacaaaaaatg

SEQ ID NO: 194349 - DNA, 1776 bp, Cannabis indica
agtgttggaagtccaacttgactcaatgtcaacctttttgtcttgaaccttgaaaatcaacaacattctaaacccttagctttattctcatcttttcactttgcacgaccgatactgttttactctacagtattttcatttattagctcttggtgagatgggagacaacatggaagattcacgtgcacaacaaggagcggaaggagattctcttgggacccctgagaatgtaatgaatattgatggttcccacccacctccccattcctctgtcagtattaatgatctaaataatggtgagagggggaaggaaaagatagacaaccaggcatctaaagattcgactaaaggagaagggctggtgggacagtcacagaatactgggaatggccaaccctctgatgtggaagtcctacgatcaaattttctcgagtccatgactttagacctcgaacaagatttcgacctaacagcagagcttgtaagtacaggggttctcgtacgtttcttggataacaaaggagtatctaaatcgagacttaaggaaatcctgaaccagatatggaaactcaaggggcattggaagttcaaaaccatgaaaccaggcatatggggaattttctttgacaaacaggaagattgtacagcagttctacgaaataggccttggataatcaatgggaaacttctcattattagagagtggccagaagatggtgattggtacaatgtgaatatgcgaaatgcggttttctgggttcttgctttcggtcttcccacaccgtatcttaatgcggtcaatatccgaaccattgccgcgaaagcagggaggtttatccagagcgaccttgcaaacaacaaaacagtggtcagacggggatttctcaaattccaggttgagattgatacctccttccaattaatctctggtttctttttggatatcaagagggggagaaaggaatggatacaattccgttatctaaaactcccgaagctatgttacaactgcgggtatctcggccacgacaagaaagcatgttttcgacctacttaccttgcatacccccctctgggtgcagcggttccagcttatggaccgtggattaaggcggaatcggcggtgtttagttgctttaacactcgaaaccaattggaatatttcagagcggaagctaatcggactcctcttccgaccagaccttctccggtgcctgaatcaaggagaaaggacaaaggaaagggacatgtcgatgaaagcctcagagaaccagaattgcagtcgacagtcagcaacaaactaagaaggaaagtcatcagggtgaaaggaaataattcaggtgctactattggaaaaaatttgaaaatagtagaggtgggaaccaattgcccaaaggatttagacaagctgcgcatgccttctgactatcaagctgttaagagtcgattgagagggagacaagctcgttcagtttctccaagggctttgcgatttcacaaacaacgtaataccagtacaatttctgaaaatgacattataaacaatttttcttcaagacctcctcccaaccctgctgataatggaattctcaccactataatggcccaaactgggccctcttatgagcaaatgatagaaaaagcccatgttgaagtgtgtagctctaggcaaccccgacaaacaccctgagccccactccatttccccttggcccacttatgcctgaagagacttgggttagctgaggaattatgggcccagctcaagttgataag

SEQ ID NO: 194350 - DNA, 2417 bp, Cannabis indica
aggagtattctgcttcctgaaccattcttacaacagttccaaacaatttcccacgtcttgtggcacaaccaaaggtgtagaaggaataggaacatgagaaggtcgagcttgtttctccctcagttctctagtttgatcaccttgctgctagattgtttcttgcatgacagcatacatctattcccaattctgacatagtagaggattcacatcctcaccgccacccccgagcccagacaactcgtgactaagtctgttggatcgcctcaaatgcattgcctaatacacatgcgaccaccaacttacaataatttagaagttccaaccaaataacaatgctaataagcattttcacacataaatagatactacatcactaatacacaaactcctatcatatttttctaataatatatatttcaaattatcatataataaacaaatgagcaaataaacaaataaaaaataacacttactatactatgagtcaaaattttcttcacaaaaaatttacatatctggccagtctttaggacctttaaaattgtggtcgctctgataccaagttgtagagccctatcccttaaggacgccacatgtgtgattttaaaagttagtttataataataaactaatggtttaataaaatgtatgatctaattaaagactttactaattaattgaaatataaaattattttggcattataaactatttaaggttggagattaccttctaatttttttttcaaaagatagccaaatagtactatatcaaaatatacataagtcaaaagcgccataaataaaatcccaaaaactcaacattgctctccagatgagccgatatgtacatttgtcaggaaagacttctaactcatggctgtcctatcttgtcatttcccttacatacaccgcagagcacacgtgagtcacaaagactcaggtaaaaaagtaatagcaaaatattacacagtaatacacaaatatactcataaccaagtaatcacatacttaatccataagtaggaaatttcatcatacaatacaaacaattattaacatccaatatattcctaataagacaaattgataccattacttaataaggtaaccatattttttgttgtctaatgagacaaccttttaaatattgttacctaacgagacaaccttttaaatatcattgcctattgagacaactaatgtcaataccattgcataatgagacaatcgatatatatatatagaaacttaacaatagtttcaaaatagagtaataactatatgttataaacagtaattataatatcacattttgacatgttatgtggtacaattctactatatgttataaacggtaattattgtattacattttgacatgctatgcaatacaattgtatttttcttacctcgtgtccaaatttaggtgtgtcagtcagcctgtgtggaaaatgcatgacgattcaaagacctatatcacaacagttgtaaattggtaaataactcgttttaatctgttctaaaacttaaactcaaactagaggcttccctatcaataaatagcgtagaaataccataaatatcgagaaaacacgaaaaatcttggcgcccgagaaacaccctaaacaattaaccagatcccccaaacgggtaactggataactgaggaaacagtctaccgtttctacaaaaacggttaaccgcttcctaacagagttttgagattttacacttcaaacctaccccaaaactttctcaaaacctaccaaaatttccaaaacaatccacaattatgctaagaatcacaattcaccattgttgagtgagatttatgttcaaaaactcaaactcacccaactagctacagtagcaaaatccttcacaattcagcataaaactcaacaacaaatagttaacaagtaattctaaacccaatcaaacactactgaacctaattcatcaaaacacaaaactctaagtttttttaaacaaaattcaaagagaagagggtagagttaggttactttgattctttcctttcaattcaactttatttctatgtaaggattaagggctaaaatttaaaataaaatatttatattgaaataattttagtatgtttagtatcttcaatattttaattaaataaaacatatattttaattttttaaaatttgacaacactaaattatattgttttagtaaaaactttaattttataattttataatttatattttgccttttgatcttagatctcctctattataagctatttatttggagttatgtctaaatacaattttgggtttggaggaaatggtatgttaagtagagagttagttagcacatattagttagaaaaatcattatgtacaactgtgttgttttgtagttagttaaatttatttc

SEQ ID NO: 194351 - DNA, 2241 bp, Cannabis indica
actgcttctatctctttctctgttaatggtcatgtcagtggaaccatccggcccacttatggccttaggcaaggtgatccattgtcccactatcttttcattctttgttctgagggcctttctacaattcttaagaattattaggggaggggacttctttggggcatttctatctctagaattgctccacccatatctcaccttctctttgccaatgatagccttttgttttgtttagctaatcaacattcttgtgaggccttgcatcatacgcttactacttactcaaaagcctcaggacaaatgataaatttttccacgtcttctatttttttctctctgaatactcatactgaagttagagatctattatttcatacctttcatcttgaaaataggcatttcattactaagtatatgggtttgcctcaatgtctttctcgtgtgacataccctgctttcacctttcttaaagataaaattgccaccataattcaaacctggaatcataaatagttttcaagggcgggtaaggaaacacttgttaaaggtgtccttcaagctattccctcatatgctatggcctattttcatattcaccaagatttgtaaagaaattgaatccctgatttctaaattctggtggggatcctccaatgaatcttgtaaagtccattggaaaaactggcaaagtgtttgtcaatctaagtttgtgggaggattgggctttcgatctttaactcattttaattaggccatgtttgctaagcaagcttggagagttcttaaaaaccttgattctttattgagtcttacccttaaagctcgttattttcttaattcctccatccttgaggctgtttctggtcataggccctctttctcttagaggagtaatttggaaagtgggaaatggtatggatattaatactttagaggatcattggcttcctggctttcaattcaaatcgtattcctcttcttcccctcctgatcctagcttatattttttcatttccccttctggtgattgggatctgggtaagctccatagctattttgatagcgcactcattgaggaaatcctttgtgtcccaatttctggacagaattgtaaggatcatttgatttggggtcctgacactacagggaatttcaatgtcaaaactacttaccatttagctcttaaatctaaggatatgcccattgtttcctcacatgatgcctgtaagtgtttctggtctaaaatctggtcttctggtgcacccccaaaggttaaacacttgatctggcgagctctctcccattcaatacatgttgcctcttctctatcttttcgtcatatcattccctctctgattttccccatttgccaaaacggagactgtgaaacatgctatccttgaatgtagtcatgctaaaaaagcctagaaacactccatgtttttcagttattataacacacataaagatagtgacatgcatatgtttattgctagtgcttttgacttctatgagaaatataatttggctctactattctgcttcatctaggcaatatagaatcaacgtaataatatatttcataataaaatgggattttctctcacgcaactttttgattatgctgccaattatctgtatgaaaatgttaatgctcattgtggacaatttaaattgtcagcacacatgaaaaatatgagtaaccaggtatctcggcttcttctcgggcgatggatagtccatactgacgcaactattaattttgttttcaagaggcacagttatggagttatggctggggatgatggtgatcatctaaaggcatgatttgtaactccttgtacaggtgtgattcctcctgaagtgatagagggtaaagcgatcctagtagctatatcttggattcaagcagtcaagttgccgatttcgattattgctccagattgcaaaaatgtggtggataagattaatagctcttattgtaataattctgttcttagtgatgttattaattgtattaacaacttattgttgttcaatcctaacttgtttatagttcatgtactacgggatagcaatacgttagctcattatcatgctaaaacaagcttaggattagacaatgagtatatctggaatggttctttaccttccatattggcctgattactttgtatctaaactctgtatctgcttctttattgaaagttctctagttcttttttcaaaaaaaaaaaa

SEQ ID NO: 194352 - DNA, 588 bp, Cannabis indica
aatttaattgtagtcatcatgttttagaatcacctattatattgaattgatgtagtttttcttttgtagttttcaacttattttagatagccatctaaagaataaagctatgattgagagtattgaggctaccccaaacctcttgaattgctccattgcactcgattccttgtagggcaaagcatcttataaccttgtgtaatctgatacttgtttagagaaaactaaagtggatcaattaaacttttcactttttcttagatcgccactacctttttctcgtaccaacttctttgtgacgaggtattataaccccggccaccaattctcatctttgatagggtctagatatttccatatatattatcttaaaaaagtacttaccaaaaaaattattacatgttgatagttgatcatatgtttaactataacaaacttattttaaaattaggtactatttgttcaagaattttgggccaatcaagagctgatcaagaatcatcaaaagcactagagcttgtaaaagagctatggaatcgaattttgaaggcaaaaaattacatttattctgaaatcagtaaagaaatt

SEQ ID NO: 194353 - DNA, 606 bp, Cannabis indica
tcttaattttctttttttatgacatatattagagaaaaacaacacgtttcccacataagtagagaaaaaaaaatacacaaatagatttgtgacaaaaccacacttacattgtaagaaatgagctgtggaaaatttaaaagaagctcatacttgatgatgttattgagggtgtgaacattgtaagctctttctccttcagtggcggaagctatggcagttctgtatggtcttctcctttgctctcagttaggtttctctgtgattgaagttgagagggactgtcaaagggtgtgtatggcgttggaaaggggtctcataataataccttagctcataatctagcaacaaaatttgattatgcataaacttgaaaaagcacatgataccacaaaaccagtaatacaaaaaaataaaacagaaaacgacagtctcgggtgggttacatccaattcgaggtgctaaaacgtgttatcctatcatattttatgtgatcaatttctatgcgtagctgtagttgtaaaaaaaaaaattcaattagaagatttatatataattttttataaataataaaaattcaaaattttaaaatatttttcattttaaaaa

SEQ ID NO: 194354 - DNA, 1843 bp, Cannabis indica
aaaaaaaaaaaagagggagagaaagaaaacacacacagtattgtgacggtgttttagttagaaaaataactaaggtcaatttaatcaagcattcaaattcagtaaaccaaaagaacatatatatcagaatcttattgaagtttgaaatagattgtgggattttactctggaataagtgctttgaatccctggccaagttgcgaaattttcacggcatgattcttcacttcaaaatccacaccccaccattcttgaagtacaactattccaggagcatcatctttgccaactacatatgcatcaaatgtctgttcattgaggaatgacaaaaaaaaaatgtagaagaatttagtcggcaagcagttgatagcaagcaaatacatacagtatatacaccaacgaatacatgaaatcaaatcaccaagaagaaaaggtgtcacttttttgtataaatataagcaacaacgatagtcaactgcatatctaaagttcagcattagacagtcccaaaatcagtaggacacattggatgtcagtaaatgaatttcacatgctcaagtttgtcaattagagcattgtcagtatctcattgtaatggcccatcaaagtccttttttcctttactgctaaacctgtacccaaatgtacttatgtcatgtttggtttaatgtaatggtgatagtaatggaatcatgattaccattacattgcttggtttaaagctttggaatgactttacattgtaatgatcattacatcatgtattgtaatttacattacattataaaaccaacataaagatgattacattgttaggaaatattaaaatataataaacatctttttaaaaaaaaaatatattataataaacataactcttgtgccctcatttttacttttatttaaattttgaatattaaataattaaactaggaacattaatatacttgttctatttgattacaatgtttatatctgacctacaccaaacatcataataccattcaccttacaatttttattctatattacattaacatttctattaccattcacattacattacatcaaagaaaacatcactttacttcaaatacatttcctcgtaaccatttattttcattatttgtatcattctatcattctcgtatgtattctttagtgtggctttatagtaacaattttttccagactattcaaataagtataaagcttttaaagaacaaaagaaagaaaaaaaaaaaaacccatttccacgaaaaccccaactcccgaaacaaacaaacaaacacacttgatcggaatttcaaaacatttaatccatctataaagcctgaaatgattcgacccagaaaatcaaatttggagtaaaagaactcacagtgtcatctctctgaatctgaatttttttgaagggagagggagatgctgcagagtcggccatagcgcgaaccgagaattgacctataaaaggtgaaaacaaacgtcctctggagcaagctgcaacggcgaaggctgtggaagctgatgatctaagtacaatggaagtgactgccgaaaatagcatcattatttacatcattatgatattgctgctggatacaaaggggccatcacgaaaacgacgtactactctcttcgaacgttgtcgttttaagtgggttttctttttaatgctgtcgttagtttttttatgacataactacgttgaaaatacaaaaattgtaaataattgtaaaaatttagatacaaaaaactaggttgaaaataactttcctcaataagttataaaaaaaaaagagtaaatactattttgcattctgtgtttttacaaaagttatta

SEQ ID NO: 194355 - DNA, 1375 bp, Cannabis indica
ccaatatctagttattgctttgtctacattctttctttttaccttactagtttgacaaggattctccatagtcttgacgtcacacatttttgcaggagaaatgaagattatgtgaaagacttatccagtaatttgcaggtaacatgccttctctatgggaagactttgatctagtagcaaagaaaagaagaaggtttccttattttagtgtgtttttatgttacttcatttcctcaacgtttacaacttatatattaatttttctattggattcatatatgaatttctatgtttgtgcttgtttttcagaagttgctgaaagtatagtgagtaccaaattacgtgtattgttatatggttgttgatacattagattaagaaaagaaatttctttctaaaggtgaacattcattcattcattttgtctacaagatccataagctagtttggcataatgacaaaaaaaaaaaaattccaaatatatctaaactccttaagctgggtccaatcagtgggtatcttcttgaaaaaatgaagcatcaacgtgtcttctttacgttgttttgtgtatgtatgagtagtaaagactgtaaaattatacaaatatgtactagtattggtagaattattttgtattctctaaaatacaactaattacttcatcaccatattcactcaatacctttaacgtattagtgttggtagagttagtttgtacttcgtaacctctttactatattcactcagtaccttaacgtactagtttggatagggttagttcataacacatgcatacaacatgtataaaaatatatgtgtcatttatatagtaatcttacctcactttcataatcaggtgtgccaaccaacttgagtggaactaccgctcaacgattctgaggccctactcgctaactcacttttggagaagtaaacttaaaccaaaaattttcctattaataaatagcgtggtaataccctaaatatcgaggaaacactaaaatcgaaacacccaaaaaacaccccaactagtgaactgaatccccaaacagtccaccatttcttagggtcttgcctggggaaacagttcattatttctacaaaaggagtgaaccgtttcgtagcagaaaaacccaaaacttgaattttctaattcaattctacctcaaaacttacctcaaaataagatcccaaaacagcttctaaacaattcaaatgatccttacagaaataaaacaccaaaaccaaacttaaaaaccaagcttaacctcaaaatttcaaaagagaaaaactagagctttactttggtcttcctcccaattcacacttgaaaacctagctaaaatacccctgaaacttttggaaattttaccgc

SEQ ID NO: 194356 - DNA, 1871 bp, Cannabis indica
atataaaacaagcacgcattctataagaaatgtaatataatatttttggggaaaatcaagtcaaaagtttggagtcatgtataagcaatgtaaacgtgtatagaaacactgaaaataccagtaaggaaagggtgtcaaagaatattgctccatattttggcggagcataatatatgtctctgaattttatgaaccttgcagttgtgttaaagcttacactactcccatgaaagctagctagaggtttaactttaacaataaatacacgaataactcatatgctatataattaagcaatatttttagataaatttaattaagtatttatgagtaaccctaaatacttaattaaccctaattgaggaaaacttgataaaattcaaaaataataataataatgactcataaagctcataattctatgttataatctagcaagagcaatgtaatgtaatgagaatattagtggcacaatgtagctgaaaaaggattgctttcaccaaaagaaacaaggactggcttgagagtagagtatattttataaagggaacatcctaaattaaattctttatcaaccttttcaataaaaagaaattaaagagccttattgaaaggttttggggtatacatatttgtatgtacatatgcaattcttaaacaaatacaaaaaaaaaaaaattgtttgattaatatataggactcaactgatgaaaggcataggagtttctgtaaatatcgccagtggggatataattctcgtgcttatcagatgtacaattattggtgagaattgctttgcgtatagcggctcttgctctagccaactcatcttcaattctatgtacactactataattactcttcctctattcatcaattcaaacaaagtatatattaagaaaactaagtgatatatatatataataaaatgttaaattacctatgtatataggtctaattaataagctcttacttggataatattgatattttcaggagccaaagctggggaaattggaaactcatgatcatcatatccttgcctgttaagttctcctaaaactggggctgtggcatccaaaacggtgtcgtttttctctgatactgagttagaagaagaagaagaggaaggattgtttagtgtactaaaacgggttcgttgattaaagggagaaaaataaatgagtagaaggagacaaaagaaaactgaagaagatagtaaataaggagaactgaacttaaatgcaaaggccaatattttttttttttttcggttatacttttgtggcagataactagatatttaggttaatcgcaagtggatttctatatgtatatgcttttgcctttagggtcgttcccatttatttatttattttatattgagcttgtgaaaattataaatggtagcgtaaatatgaaaacggtgaactatacatatcattattgccaaaattaatgtagatctccggttttaccgtgacactctcaataattctttaatttttgttttctttagtgtttccaatcaaacaataatgtcacgtcattaaattattggttatatatattcttgggttgattaatgatttcatatacatgtcgactcgttgaataggatcaaagagaaaaaaagaaccaaaggttgcttgaagatttaatcaaatgaaattttttaatccaatttacaagccagctaactcaatcaaatattgtatatgatgctgtgtgatcggctttattagcttattataaattaaatgaatatataaatatatgtatatattattttgaaaaaccttttaagaatgagaattcacctaagttagtaaaggaatagagctattcccattctttcttttttttttttt

SEQ ID NO: 194357 - DNA, 2100 bp, Cannabis indica
tatgtatctttagtttaaaacctaagctcagtgtcataagcattatcaatggagtaaagctgtttagaacaaaatgactgttgtatttgtatttatattttagtgagaatcattaaaagcatgaataatttgtattcttgcttcttcctttttcaaacaccattaaagtaagattttctgacgtttttattgtttgaagataattttctgaattgtactctggttgtagattgccatcatgaaatgtttgcaacattcaaatattgttttattggccccattactcagccaccaaacttcttcatagttacataataattaagagagtaacaagatcatctaatgatgtctgtattactttgttttctctctccctctttttaaattttataatgcactgaaaattattaattattccaattgcagtggttgcttgtataaactttttaggaggccttatatgttggaattatactcgatgaaaggcttcggtcgaatatggcttacaatgtggtaatgtctcagtgtgattagttgctttttgcttctatatgaaaagagcttagaggctggatatctgcatacattgcacccaaaatgaatttattcattgtacacatggaattcagatttattaattggttaactcaggcaaaggaattgaattatctttgccaactagttgagtagagggtctgcaaaacaatatgttggcaacacacttaatttgtttgctgggaactagttgagaacccaatacatattgatatacttcaaaattcttgtgtttaattaattgtttattctccatattccattgaataaaattagtgagtacaatttagtatgtattatatgcgtttagtatgtaaattgtggtcaaatatataaaaataattacttccaaatactgagttgctgtacacttttttgaaaacacagatttccaactgcaaaccaatcaattcaggttcttttgtctgaatcacaagaaattcaaggatgaatttgaattttgaagagcggattccaattctagatgcagacgggtttcagtttggaaactcttgggtgcctgcaactccagagaagccacatattttgggaagatctactgcagtctcaggtatccaacaaggtggacaacaggacccaatgaattcactagaattgacatcaaatacaggaagatatgcatcaaattttgactgtttgggtcaaattttcaatgtaaattcacaaggccaaaatatggagtattttaggtatttagaccgacctttgacagataataacatgagggctaatagcggagctaattctcttcaacagtctttgcctgaggattttggtgacttgaataataatttaccgttcacgcaactgttgcaacatggaggagctgcagtcccctcatcaaacacctcacttttaagacttgtagaattagcagcagaaatgccaaaacattcacatgaaatgaccaatatccaacaagattgtgtctcagccagtttcaatccaggtgctgggttcactggcagcatggagggaaaccaaatcgattattcgcattggcaagtcgggaaatgttcgactgaatccaacattgctaatctgttaatcagagaacagagtggatgttcgagttctaacccactgaattatggtagcaacttaccccagacactcagctgtaagtatttttgttattgttttgagtgcctaattgttttactttcttctgaaaattatcaaagcaccgttgtcactaagaaaatatttcatttccatgctttgataataaaggcaaatatcttttagtttgaatgaaaacatgcttcctgttttcagttgtcagcagtggttattggttccttgtacaattaaaccattaaaataattaaattaataaagaaaatatactcatttaataccctgtcttttctttaaaaacacatttagtaacttgtgttttctataatatttatttagtgccttatattttaaaattgtacatatttagtatcctaaagtaaaatttaatcaatataattttattaattatacaaaatagttttcagttatatataattaaat

SEQ ID NO: 194358 - DNA, 1414 bp, Cannabis indica
aaaatctatatttatataataaatttcacaaagaaagcactaaaaagtattattggtgcttaacacttttttcggtgtcatactactattagtgtaattaaatatcgagtctaatataatttaagaaaatagtttttagagaatatcgataactaaaggtggcaccgcctatagaaggtgttggacaccactaatacctaataacaatgctcttattattacttcctaacgtaccataatgtttgcattaccgaaagaaaaagaacagggacattatcgtccaaagaaagtttttattgattttgaactgtctcctcaatcgaaactaatgatagaagagaagtgttaattataaccttctattataataatctcttagtcaacttctacgtctgaaatcatatgccatttttattcgttatagttacaatattatacttgttaattttttaaaaattctgaatagtttactgtactgaaaacaaaatttttgatattcttctgaatagtttacttgtaaattattcgaaaatttttaaaaatttagaaagataatattgtaacaataacgaacaccaccatgaaaaaaaaaattgaaaaatgatattccggtatgcattttcgggcacaaaaattgactaaaaagttaattttgaaggttcagcaaatgcttaaggagctttctctttcagaaagtgagtagccatagtaagagagagagagatgagtagtccgaaagagaattgcaggaatgagcttcgaactgctattcgtcaacttagtgatcgatgctttactcctcttctaaatggtaaccccttcctaaaaccctaaacctctttatacatacatttatacacctatatatacaagtatttatagaatttgagtataaagtaatatgagcttacatgatgggttttagaaactggggttcttagatagatataaaattgaattaagttattttggtttcttagatttatatacctatatctatatctatatatttttatagaatttgagtttaaagtattatgagtttccttgatgtggtttttagataatctaaaattgattcctcttatgcaaagttgatctgttcaaagtgtagttatagagtttccattgatacccaattttatctttacatatacatatcatgtatctatggaatttatagatagatttacatacctatatttatagaattttagtataaagtaatatgagtttcctttgggttttagaaactggggttttctagataatataaaattaggtttcagttattttggtttgttttcaaaagaaatggaaattgaagttatagatcttccatggatacccaaatttttgtttttttttttttttatttttttttgtttttttttttttgtttttttcgttcgac

SEQ ID NO: 194359 - DNA, 1416 bp, Cannabis indica
gtaaaaaaataaaaaacaagtattatacatgaacgacataatgaacaggctagacatgtcatttaagaataagtggagctaaaaaagatatcatgtgaatgaaaaaaagacaaagtatgtagaaaataatttgtagaaagtagacagagcaaaatgacgttttattgttatcgtcaattgatttctgaacgacaagcatcatcattgggtctggttgtgcggtaggatgactgagaaccagagagtaagagaaaaaaacgtgatctagttggtggataggaggaatgaatttgtggccgagatgtagccattacaaaaaattaggcctaggacaagtcatcgtttaaggtattttcacaccagcgggagaaatttgcatttttttggggttaagttcctctaccgatgttctcgatattagttttaccgaggataatttatttccctttatttttcacctgctctttctcttcccaaacccacataaaccaaaatcctccaaacccacattagaccagtcttcttccttttctctcagccctggcatccccctccctcaccgacgtcttcctccttctccgatgtcttctcttagctccaacgacttggtcctcaaagttacacagtaagttatcaatatctacataatattgaaatatcttttttccactttgagtttttttcttactaaaatgtaaattaattgggttgatcttagatttttggttagctggcctcgacttcttctatagttgtggaaaatgaatcaaatcaaaatcaaggtttatctaggacttttgttgaacattatgatttttcattgattgtgaaagctaaaattaatttttgtttatttcttaggatttgatactgattttattgttgttagtgttatttttgattgggtattccattttatcttaagttttaccaactttttctgggagaaaaaggtgttttatttggtataactttgatatgactgaaactcattatgcacatttttttttaaaatagtatgtaggatttgagaaggaaggaagaagaagttttgagatgtttcagagattatgttcttcaattccttacttttagagatgttttgtttaattcaattttcattatgtatatatatttttttgggggtctatttggttagtagaaaaatttaatagagagagaaaatgaaattgattttgatattcctatatatttggtacttttagttgtatacttagtttccatatcgaacaaaatcaatagttgtgattttatgaagaacttcaacaaatttacctttttccttgaatgaaatcagatatttgataatcttgtaaattgatatgtgtgctaattacttcattactgcattaatctcgtgtatgttcaggccgtatatatacatatatatatata

SEQ ID NO: 194360 - DNA, 1293 bp, Cannabis indica
atgctgtcagatatttgaaaatgatctgatacttcatgtttatcctgattttaccttttctttttgtttctttcctctgttcagatacttcaatgtgattggttcagatcctgagggtagattaggagaggctcccagacctgaactgcgtgagcatggacgtatctctggtgcttgttttgatgcagctcgtggtatcattcctgggcttaaggtatgctactttggaaaacatgatttgttacaaagatcaatacaggaaagttaaactaacagaatgaaagaaacttttcaccccaattaagcttaaactggtaacgatatgaggtcttatctaatttagatttattaatatatattcgacctttctgtgtaaggcttggagataaatgttattgttttatcaaacagtttctaaaattttgataaataatacaacacaagctttcgttttgcataaatcacatgaatggtaaagaggagattaagaaattcaaaattatttgcttcttatgatgactaatagtatagggtaccatttcatggttttatttgtatttttttttttttgtagaaaattagtatggtaatgttaatgtattgaacacattgcaggtgaaagggacagactatagcacccctgatggaacttgtgtgcgtgattacattgatgtcacggacctggttgatgctcatgtgaaagctcttgagaaggccaagcctagtaaagttggaatctacaatgttggcacaggaaaaggtcggatgaaaggattgaatatatagactgatttcaaattgcaacttcactttctcttcaacacaatttctttcggtaaaattgtcctaagcttgtgtttggatctcttttttcaggtagatcagtgaaggaatttgtggaagcatgtaagaaggcaactggggtgaatatcaaagttgattttcttgaccgccgccctggtgactatgctgaagtgtacagtgacccatctaagattaaaaacgagctcaactggacagcgaaacacactgatcttcatgagagtttgaagacagcatggagatggcagaagtctcatcgcaacggttatggagttccgttgttgacttcttcttgaaaattgtaaggagataattcatattaggttgatcaacacagagatgatggactctagattttcacaagctgctgacttgaggcaccatattctttagttgggatagaaacgagaggagaggagaggagagagggggttggaattagattaaagatttacatttttcctcattttt

SEQ ID NO: 194361 - DNA, 820 bp, Cannabis indica
tctctctctctctctctcatgtagagagcttaagctcttccttttctttataatggaaaatgaaggaaaacgaaaagttaaagaagaagagctgactaaagaggacaaggacgaagaagaagaaataagtaaactggttttgggtataatggaaggttatagtgacactgtcattccaccattgtcacactttaagccttcatcactacttgaatcctccgccattgttgttgctcaacaggattcaacctaccaaaaagcgagctagaacaaaatcaattcctgaaagagacagaagaatgaagatgaatgagagctatgatcttcttcaatccttggtcccgggtattcttcccaaggttaattttcctttccttatactatcttttcaagcattggactcgattttctcaattgggttttctctattttcttcttttgaatttaatttgatttcatttgaatatgcaatgagtaataggtacttctacaatcttctctaatatttttttattgggtgttacttgatcagaaagaaaaaaagattttgttgatttgtaagcgattttgattaatgggttctcttctcttctcttcatttagtttgttttcaatactaaatttgatattaccaatcacaatgccaagaacttctcaccatttttgcatattctgttttcatatttttctcattttaattttattgttttgtttaggcttcaaaggataaggttcttcatgcagcaactgagtacataaaataccttgaagagaagaagaaaatcttggaaaagctcaaggaatcctcttcttcttcttc

SEQ ID NO: 194362 - DNA, 806 bp, Cannabis indica
aggaaaacattggcaccagaaccgaaccaagctctctctctcagagtcacctctcaccactaccaccaatggctatgccctgcaaatattcatcattgcttcttttctctgtagtcttatctttctttgttcatagttcagtgtcaactgagctagacattcttctattattcaagtcttccattgaagattcaaagaactacctttcaaattggtcaaatacctcagacattcattactgtaattggactggaatttcttgtaccacttcaccaacattgtctgttacttctattaacctcaaaagcttgaacctttccggtgaaattccttcttcactttgtaagcttcttaatctagctcatcttaaccttgctgacaatcttttcaaccagcctattcctcttcatctctctgaatgtacctctttggagactttgaatctcagtaacaatcttatctggggtacaatcccagatcagatttctcagtttggttctttgaaagtacttgacttgagcaaaaaccatgtagaggggaaaatcccagaaagcattggggttattggagaaacttcaagttctcaacttgggaagtaacttgctttcaggtacattaccttttgtttttgggaacttaactgagcttgttgttcttgatttgtctcaaaattcatacttggtgagtaaaattcctagtgatattggcaagcttgtgaagcttgagcagctactgttgcaaacctctggttttcatggtgagcttcctgattctttagagggcttgagaagtttgaccactttgga

SEQ ID NO: 194363 - DNA, 2410 bp, Cannabis indica
gttacggaggccaacaccatcaccataggcctgcaacatcccataggacaagaagcaattggctttctagtccatctcccagatagagtcaatgtaagcctacgcggtcgggggtgtcttggccttcctctttcctttggcctttataagggggcattccccattaataggttcatccttaggaacagtttccagaatcatccatagctgaggtattatagcgggggtcgtggcctgaccacctcccgccgaggtttccgcagcatgagtaatggacatactctcaataattcctaccatgttttcttggagatcttggtttatgtctatttctactagcacaaaaacaaagagaaaagcgagcctcttgaaccaactaactgataaaaggaaaaagtatccagactaataccccaaccgatcaaatcccacaatcaacgcacgtatgggcacttattaaacctctgattatcccttagtatggcaaaatttcttttgcgtattctaccttgctactcaacacgtagacagtcctagccctagcatgagcaagaaatttctatcgtagacatgaagtaataaaagttttgtcagggggttaatgtacttacttgttgagtggaaagcggaggggttagtgccaaaagacctcgtctgaaattctcagacccagtcgatgatgcgatcgtagctagcctaaaagtcaaatccttcgtttggcaaggggtcaagttggtcgagttatagaggtttaatgttaggaaaaagcttcacacagagattgagcagttgttggatcaattttttgcactcttcttgcatgcaataacggcaacgagtgagaaacttgcaggaggattatttgaaagctggtttggaaaaatgaaatgagcgctgttaatgccaatttatactccaagaagacagccagtttttcaaaatcagtggtccagatcttccgttacgatccaacggctggggagttgaaaaggtctaaagcttttattagtcatgatttacgtcagatacatcaagccataaaggtaggtcttttcaaatcgctcctgtcgataattttaattttctctgacagatgcgccttaacatgcgcgtaaggagttaccttgggcatttaatgtgccgcatgattgacacgttggtagtgttagacgtgctatctatcctagcaaattactgcttaccaagaagatacacccacgaccccagcatctaaacagttagtgcttggcaatggacagttccaataggaaatagcaagctccttgaacttggaaagtcttgaaagcttggggtaaatgttatccgtattcctggacgactaatacgtggcagtcatagaaggacaccatcgtgtactactcaatgttgtcgtgtacccttcgcttgttaggttcgcgaaagaaggagtgttcctggagaaactggagatcctctatgttaataaggatgggtaagactctaaagttcctaccattctcctactacttggaaaagacaaggtcttctgaggatgcgaatgacccagaaggatagcaaggtcatgtagttcgggatagaggtggtcaattggtcccgaaccctgtctagctatattccatatagagttacagatgatggttttatgtcctctgacaccgaaccagaaatcatcccctgcgtcaaaccatggtggtgcgcgtacgtgctgttgtagccctttttgtccaacggcttgtctagggaaccacttttaaaggagaacccattgagcaacacatgtcaatgctcccatataatgccttgcaatgttcatgcaccataggatggaaaagctacctaccaaataaacagtcagatcatcctgctgtagtttcagcccctatggcatgttaagtaagaaaccctaggtgggtaaaaggtatgcccttatccgtctgtgtgcctataaatacccctactttctcatgtgcaaggggtgaacaattcttacttatagaacctctgccaaaattcctaaaagcttcttcttcttcaagaggaacgagaggaatacaaagctcatactgtaaacacttgtaacacttaaacactcgccgacaaggctaatgcaatggactcgtggagtagggattattaactcatgaaccacataaaaaactatttgtctattatttactattttatagtttccttaagctctatttaatcaatttctgaaaatctcagtaaacataatttttaggctatatttacgaaaatagttggagattttacacaacatactattttatctcaacaaattttatttttgccgcacacgaaatttctttcatttatactgcctaaaacttattgttcatcttcattgtacctatgaatctctctcattctttatacaaaagttttgttg

SEQ ID NO: 194364 - DNA, 2391 bp, Cannabis indica
atgcaataacaataaataaataaattgaaagtcatggcggcttgtcacgaaaattatctttcaaccaagtatatagaagctcaaactcttctattggctttgatagtggagttaagatctagggctaattatatatcatttgtggtatatattgtcaagtctcttaattgctaagttttaatttagttccatagattgatctacctagcttaaatgatttaagtacttattaaataatcattaattaatctctcatttacatttgagaaatgttaaaagataccagtggtgctaatgactattggtctaattaagtatcgggtctcatatagtttaatataataacttttagggagtatcgctagtcaatcgtaaggcgacacgtcttaagaatgctagacaccactggtacccaatagcaatgctctttacatttacctacatacaaacttgtaccacatatggtggcctactatttgttaaatttgctttagagttatagacaacgatttaaaattgttcaagagttttttattgatatatagtatgtctaaaataataccgtttataagattatgagctattgatttaccatttagttttgagttttttatttttaaaaagaatttagattgtacggtttagaatgtagggtgatatatttaatttggttttgagattaaacctcgcacttcttaaaatacacatcaataccttattttctaaaccatgcattgtaacatgcatgatatcaagagctaaagagaactctatcccaatctaaaaagtaaggccaaaaaaattacttgtgatcgaaccgttcaagattggtaaacaaaaattatcaccatcttgatacaaaatattagattcttatatattaatagtatgtaagaatataatatcaatatcaattatataagatcatgtatatgtacttcactcattattaattaatttttagattaaatttgactgaactttcaaaatattgcgtacattgtatttaaataaaataaattatgatagatcgaagtgataacataagctatcccattcactacaaaatatatatcttgtaaaaaagttaagactaaaaaaactagcatattaaacttgtgttatcattaaaagaaaataggtgactaagactaaatatattttgattcacaaaatatatatttattgtgaataaaattaaattagctagtaaactcttgtatcaaaatactaatttttagtagggatgaaaattaagcgggtataatagcggggaataaggctcccctgtcccatccccgttaactattttaatatccaatcccatatatttcccatcaaagacgggtgagaaatcaccgctgggacagatactacccacaagagacccatttattttttaaaaaataaaaaaaataaaattaataaataaaaaagtaaattgtaaaaaatttaaaatgttatatatgttagtaatttaaaattgacaatgttatctaaaataatatgaagatatttaaattttactaataatagactgcaaaatgcataattaaaatacaatattaatttgaattaatttggaaatcttatgattgcgttaaaaagtataataagggccaagtttatcagttggttcatttatattgatataataataaaagaatggcacatataagaagtttataacatggaaaaaatatcaatgtttttttgaggtaagaaaaaatatcaatgttggctagctaatcaataataaaaaaaaagaaggtatcgaaatttggatatagagtgtcttcattttcaaatccaatgatcaaatttgttttggttaatacttaattgtgctatcctatcacttacttagaaaaagaaaaaagaggtgaatcaaatcgaaatttggatatgttattgcaaattaattattaaagcacaaaaaaaaaaatgtgggttacctacaagctctttctaaggataacatgcaaaaacttttaaaaaatcggcttgttatttgaaaaataaaataaaatttaagtaaaattttaaataatttttctagcaaagaaaaaagattaaatatcttaatagattgggggccttaagcaatagcctcaaccgccctacactaaagatgaagccttagtgtcgacctattatttaaattatctcaccaagtctttattttttttaattttacctcaaacttttacgttacaccatatataattttttttactttttctttacatttatttaaatattattttttttaatatatatatgacatacaataaaaagtatgaataaaatattaattaaatattattaaattattgcttgtaaaatgcatagtgtttctctacatgtagacactacaaaaaaaaaaaaaaa

SEQ ID NO: 194365 - DNA, 955 bp, Cannabis indica
gctcatcagacccttacagagcttacaaatgatgctcctcggcacttataaattgatatacttgagcaaagtttccatcccccaccctgtaaactttaaatatcaagagattcttaaagtaaagttctcctatgtcctacgaccgatcaaaaaagacataggaattaaaaatttgtcttttttcttttaataaactaaagatgacacctatgttgacctctgggagtagaaaatgtacttaggtgcttatgcatttctcttatcaatgaaattttaaatttttgtgttacatgtggtattcatcactctccacatgtccatcaaaatggtcaaagtgaatgaagcgctacaagaaacataagtgactagcgatgttaaatgaccacaacaagccaaaatatatatatgtgggaaaaggaaaaaagtacgactatgagagggatgtctctctaaaagaagtataaatcctataatattcaaaaatgccctttaagtgtcacgaatgcggcagaagggattagcagcgcataagaggccacaagctcccctacttaaatattataccatgcaaggagttgagtgctgcctaaggggtcaaagctcccccaataaaatcttaaatcctaaaaaagattgagtgttgcctaaggagccaaaagctccctcacatcaaataagtaactgaaaagatgttgagactgctctaagagtctgtactccctcctcgaaaaggttacgccaaagaagagattgagaaagccaagtggaaaaaagctccctcaaataaaataatgacaactcataaaaaaggttgagaaagcttaaacatccaacaatccctcaatgtgatgagtacccacaacaaaaggatcgagatagctcaaaaagccaacactccctgcccactagcagctccccacgcgctcgtagtcccctgctccctgggcgtcaggct

SEQ ID NO: 194366 - DNA, 1477 bp, Cannabis indica
ttttcttagatatattatatcctttctatcttatgagaatagaactatagagacaaaatgagcaatattttcttctggtggtgttcatcttattcaattcacactattttgctcacactgtattcatttgcactaaatgcaagtttatattttgttttcaattcaatttacatagtaattctaatttaattcacaaaagtgtaaaccgaattgattattttgaattagttatttttaatattaaattatttaataattattaaaaaaaaatacctgcaaaactaataacaaaataaaaattaaaataaataaacaaagttaataaatttaaaacaaaaagaaaaaagttgtatgtataaaaatgtgtaattttattttagattatatattacttataaataaaaatagaatatatatttaatttttaaaatatatttatattacatgtgttaaatttttaaattattattatttatactaaaatattaattggatgtatatttttttttaaatagtatataagtatatgtgaattagatttgaatcattgattaatttttttttttaatctgtaatttaaattttattaattattttatgaataccctcacagtacgtgtcccaaaaccctattgcacattgattagaaagttgtttatgatgctatgcttctacttcatcagtatcttcttcaaacatctgtaacaataacattattactgattggcaaacatgaatataaccttggcaaaaagaaaaaagaaaatcttcattcatgtgaagatgtatgatctatgttttatttacaataccaaaaatcaggtatgccaccagttatttcgttgaaatgatgattcaaatgaatcccaagactcagccacctttgcaataccctcaactcaactcaaaccaatacatataaaactccttattatggctattatgacatcaagtaccaaccattctattagtatctaaaatgaagaacagcaccagagcctgagttcaatctccatctttggccagcgcaggtaacagaattctcaagccaaacggtgcaccactaagactctccgcctgggcgatgggttgcagatgagcacgaggaggagagctataagaatcaccaccataaatccagtcagctccaaacgtccttcattaaactccgagcaaatcatctttcccatctcaaaatttccgaatctcctgttctgttctctcacccaaaacagtgaaataaagaagattttatggaacaagagccaaatttgactatgtaaacaatttcacatcatagacttgagacttcaaaacagattggggtggaaatttcttggattattttccaagtgggagtagctaagagggtgttcacatacgacacgtggcatcaccatatatgtgggagcatcatatactgtctatacaaatcaacgtagtagtgatgtatttgtatgaatatgtatttttttct

SEQ ID NO: 194367 - DNA, 2098 bp, Cannabis indica
aatgctgaagcaatgctataacacctgggacttcaagcttctaaaaaaaaatcttgctcttttttttttttttttttttttgcaaggggtggcacaccccaaacttaattttaaacacacttttttttttcaaggggtggcacaccccaaacttaattttaaacattcttttttcctttctttttttttttttagaataacttaaattttgaattaccaattaatcacctgtgagtagttggaggtctatattatgttggtaaactacttaggattagggtacgtacgtacgtgataaatttaaaccacattttatataaatatatatgagtaattattcaatgattataattttaatgtaactatgatcagtaaatttttttaacgtataataataggttattaataaataatttttttttagaaattaattaattataattaattgtataataaaaaattaattttcaacttaaatatttaatgaattttttttagcaattaatatttagaataaatagaatttatgcatcctaaactattaccatgttcagtttttaccctctaaaattttacacgttgttataaatccccctaatgttttcataataataaaaacaaaggaaatcttcaaagtgatgtgccatttatgaatagatttgccttctatccatcaactaaaagaaatttattgtatatttgggtttaattttataattattttttttttttattttatctcgacaaaggaaatctattagtgtaaatgtaaataaagggagaaagtattaagactgagaaacagtaagaaattttgggaggtggggggtaattctagctttttgtttggttttttttttttctactattattacaaaatcactattcttgttagttctcaaaatgtttttttttttttttagcaccattacttataaaattaagtgagtgtttaaaactgtcggctatagtgaactattcccgacaattttagacattcgtatacttttctgacggcttaaaaaagttacaaaccaaaaaagaaacgaaatttgaaagggcatccgacagtttaaaccattgaggataaactatctcgtcctggattcccctattaatataaaactgcaatttttgcacgctcaaatctcattttaaattttaaaaccctgctctcttcatctcgttcctacccttctttcactcctctctctctctctcaatctctctaccttctctccctccatctctcaatctctccaccctctctccctccatctcaaactctctcgatctcactccactctctctctctctctctcatctttgttattatgaagatacaggccatttcttatttatttttatttaatttctaaattaatcacagttatttaataatgatctaatggctaaaaataaatgtaatcatcatggttacatatttgatatatgtctaattagatttttgtccctaaaactttgacatgtactaaatcatgcatcttaaacttttaggtcgttaagaaattttttttgaactattgagattactggatttaagaactttatccaattttagtaagaaaattctaatatagatgaaagtttagaagacataatttggtacatgtcaaagttatttggaggtatgatttggtagatatcaaaatctgaggagcatgatttccgtacataaataattaccgaattagtaaaattaaatgaaatgaagaaaaattcttaaattcaacaatctcaatagtttggggagaatttttaacgaccaaaaaagtttagaagacatgatttagtacttgttaaagtttaggacgaaaaaatcttaataaatattgatgacatcgttgaaacctcctctaaatatatatatgactttttttggtagtggtggtggtgtcccactttgatggtagtatccgattttccttctctaggttattctcggatagccaaaaagtagaaacatatatcagaattttagaaagagaaaaaaaataattaagaagttgtttgacattttttttttgttaattttctattttgaaaattttatttaaaaaaatgagaacaaaaaata

SEQ ID NO: 194368 - DNA, 1318 bp, Cannabis indica
tttataaagactaaatacataaaatactatttttttaaaagaattttatatatgtatgttcaatttttttacacttttacagtttatataaaaaataacacaaaattataagaaaaatatataaaaataacaacaaaaaaacatcaaaataatatataaataacaaaaaaataataaaaatataatgaaaagatcatattttatgtaaataaaatcatgaaaaacgtaaaaatatttaaaattatgtacaattatatatgaattagccatgcattaaatgttaagatgttgtataaaaatgttaagtgatgagtactagatctagggccggaatcaggaagtttttgtaaggagggccaaagtgcgaaaagaaaaataatttgaatttttaatgaaaaattaataaaagtacaaaattataactaaaaaaattgaaaaaagaaaccctcatatggagggtgtatagctccctccctacctagatcatcaccgaaaaaatcaataaaactatcgtagtataaataattatacagaacaaattatgcataaaattataaaggcaagacaagtataaaaccatatattaatacatagatacatagaagggaatggaagtactcacgtaaaggcagataagtaatgccacttggcagtagcaggaatggtgattggtggaagagaatccacaacagtgatggaaaccattttagtctgtttatcaactccaataataacagctgctgatattgtaagtgcaaaagctataatccttacaaaaaaaaaccaaaacccaaacccaaacctcctccttctttcctatccgaattactctctactttctccattattatatatatattattctctctctctgtatgtgtgtttattatataggaggaagatggagctagagaatatatatatgtacatatacttttgagtgatcgaggaatgagaaagggtttaaatatatatatatatatagagagagagagagagagaggtgttgaattaatgtagctaattattagtgatgacaaatacagttaaggctgtgaggtggctagtgagaggaggtccacggaatccattgctctactatactattactagcaatatttaatgaggcatatgcatctcattcactttaatttttcaaaactacatattcatttatcatcattattaataatagagtagtattcaacaattaaatatacaagctgttgcctaaccttatttatctttattattattgattactacttatggtttcaatgccatttagcaaaatttctactagagcatatgtgctatt

SEQ ID NO: 194369 - DNA, 4100 bp, Cannabis indica
gtcctaagaaaggtttaaggttcaaagctttggccgttggagcaaacatcttagggcaccctaaaataatctattaaaaggctaacaaacaagcagaagataaaggctaaaatagcatgcgttaaaagacaaaaaagaaaagatgtctaaactattacaaacaaccttgtggtcaaggcatttttaaccatctttgtcaataccaaaagggagccaaaggcccccaaaaccaaaagaaggaaaaaaaaacaagaagaaggaagtgccataatctcatggttgagtctggttatgggcttggtcttgagctagagtctagctagtctggtctatttcgagttgtgattcagttttggaagagacaaccataattttgggagaagaaacctcttcatcagatttggaggagtcagctggaagatatgtgccactctccaaagtatgtaccttcaccaaatactttacttcatcttcccctaagaccttgagtgaagaaggatccttattccataacaagtgaagggtgcttacaaaggctatctcaatgccttgcatgcgacaggcccccgcagcctccgtagcttccttcgcgacctttgtggaatcttagatggagtccttgatgtgttggcagtaagtggtagtagacctacaaaaagccctaaaaactacaaaagccttgtgtcttttggcttcccaagctgcctaatctttcagcagaattttctcactgacaataaggttcttccactaatccttctctaccaactgatccatctccaaattgtgcactcccttcaactcttagatttagccttgactctcttgagctttgcatcgtcatcccttagcttaatattcagaccgttgaccttagtctacttatcattatccacagtggtcctttgtagtacctgggcctagaaaatgtcattaagattgttgacctcttggattttcttggaaagtgattccactttggccttagcagtggacaaattggtctataactgttgggtttttttgcttatgggatttagtggccttgttaatgaactgattatatttagcctcgaacgtccaattagcctcttgcatggcgctcctccaaaagtcctcagcttgaattttgttctcttccacgttggaagccagttgccttttgtcgcccctaagttggtccagctcgatagtaatggagttaacctgtctggcaagtcctcttggcaaatagggacatctagtacatcgagataaagaaaagttaatatgagggaaactacaaaaggaaagaaaaaagttaaaatgtgcgagacttagcactgcagcttgttgtttggaggcgtgttccaacatgacagggtcagtgatgctaccaactgcccattctctactattacctttcatattatgttagcagtcagatctattatgtctatagcaaagggcgtcataaccttggtagccaaagatctagacatggctgggcaatccacgacgagaccaaggctcatcccttggtcaccatcggctatctttgccttccttttggcatgtaagatgcctattttcttttggtcggttgccacctcctggtcacgacatctcttaaggtagagattagcctccactactttcttaaagagctcagcctcaattacctcatggcgcaaagtccagttgaaagaaaaggaaaggatggccagaagggtagtgggaagttgttgcggaggtactgactgttgatgggttagttatttttattgttgttggatttgttgctattgttagtgttgttattgttattgttgttgttgctgtggttggataagagttacggacagttggggccttacttggacctccttagtaggggttctgactcacctcaaatcttttgcctccaagagtcttctgccttccatctgccaacttagcctttttggcctctctcatagagttagacgggggtcaggaggctttagtgactgagcagctttcctagggaagacgtagccttccccactttcatccaaaaggacgatggcctccgtaccaccttgggaaggttcaaggatagagctcccaggaaaaaccctgttaggtgatagtggaagttgatggaggggttgaacttcccaaacttctttaatgaatggaccctctagtccgtagaactcctctcaacacccatagatctcttcttaacacccatagatgttttctcaagacttaaggagccttctttagcacatggaggagttagagtggcgactgaaggaatagcacttgaaacctttactttagaggtcctcttttccttgctctttcctttgcctttggctgctccaaaaagtagcttagctctagtattggccttgatctgggtaatattcttgtctatgtttcccataagtgcattcaacaatctcatttcaagtgtttttgagatctctgcaagacaaaggagataatcaaaaacaagtgcaagtcaaaagtgcgtctgacttatagttagttagaaacataaacaaagcataaaaatgaaggcaaccatcaactattctaaaaattgggttcccttgagcaaacaaagttatatcttctcaattcaggagactaacatactctcggaagtctgggaagagcattaaaaggaaaggatatatcctagtgatctggggtaatgtctcagaatgccctgggccccttaagatcttgtatatcatatcataatattcctctaccaggtacctattgagatcaatgctcataaaatagtcataaaagcccccttggtctagttgagccatttgatttggacgcagaacatgaattaaattgaaaggtactatacctttgtcgtaagtgctagcttccagggcaccttcttcatgcataatgacaataaacctatcttccagttcctactcctcactaatgggacgtctggatgacatcttgcccaatttgccattaaggacttgtcctccttaatggcttcctttatttcccctaacagcattggtgacgatttcctccttgaccttcagaggatctcgttagagatctcgattcctgacatgatcaatgatttgggacttcatgatcaggccataattttgaagtagcttagtggggacgagatcctctacttgcaaaacattgttaggaatcttgttgtattttgcctgcttggtaaacaaagctttagaaatgggggttcaggcaacaggcgctctatggatatcaacacttccattagtcgtgagcataaggcacgtaaaaaggaaaattgaaaagtaaaaagttggggaatgtacctagagtttcgaagtcaagatggagtattggaactttcttcagtgggaagttggtgctaaagaaccaatagtcccagaagttagggacgtgttttgtaatgctaaaagggcaatgtgtcctcaaatacttttcaagcttgtaaaacccgatcttgttggtattactctacactggttgaggcttcaccaggtaataatacaacacttcttctggtcttagaacctctatcctctgcatcttacacaaagcgtaccatcctaccaaaagcttataagcctgcggagtaagttggaagggtgcaatcccaattgctgcccagatttttacaaagtatgtctatagaagcaagtgagctctacaagagatgtgggcctagctctaagcgccaaacccatctatgctcttagacgaggactcatctgagagagagaaagtcagttttaacacagactagtgacgtttcagactctactcatgttcgagagtcgttggagcatgtcatgacctcataacttatttcaaatttggtccatttcccaaatggatgagttgtatacaattagaatgttttatttttgggcgtcctctttgaggccacttctgggaccaccacctgcacaggctcctcggacccaaagtttgtatctcgacttccttgagacctatagcctcgaggtggaactcatcaccaggagtagccactggaaagaaaagaaaagatccaaagcagttaaatacccaaaaccacaaggacaacaagggtatcagggaaggcc

SEQ ID NO: 194370 - DNA, 2215 bp, Cannabis indica
atattttaagggtaatatatatatatattttttatataatataggtgatatacaattaaaaaaaaaatatttattttcataaaaaataaatcattcaattattttgaacattaatatttactattaattgtcaatattacagttcttttaattaatttaaaatttaaaatttcgaaactattaattaataactaatgattttttaataagaatttatatatatataattataattaaatttattttattgtgatcatttttataactattgatttatttttatgaatttttttataaatgaattaaagttcatctatgaagaaaaaaaaaataatgatagtatgatgattaataaaacaacatatgaagaatgatatcaaatcaatataaaaaaataaaaattttaataataagaattttaaattagtatggtcataaacatagtttagtaattctacactttttctcacaaagagaaagtcccaagtttaaatcccctaccctaatatcaaaagaattaaaaattaatatgtttgaaaaataaaattttaataaaattaataatttggtcaaggtctaatttaacttttacctaatgtcttgtttaaaatttgcctaaagccttatacatgcttgagagggctttggtggtgaaataaaaaatatttttaggggtgagaattgatttcttaaattatatttccttgaatataagctctttccaagttgttatatttacttataatatgggttcaaaagcattttttttaaccaaaaaaaaaacatatatcttctttaattcatgtatataaatggttggctggcctggccaatggccatcaccaattatgcacagccttataaaattaaaatatattttagaattgctctccattcttagaaaagaattaataatttggcctaattttattcataagtcaagaaaatcattcatttatattggttaaaataactgtacaacgtctgactataataatatatatattgtatgcaaatactaaattgctcactgctattaatccatatactacttctactcacgttaattaattcaaagctttgatattatctcacctaaaaatcatgtaattaaataattaattaatcaatgcaatgcaatgcatgttgtataaaataaacatattaatgaattaaaagtgtgtgaaataataagagtaaaaatagttttatattaccattgggttgaaactcaattatggcagctgctattaaaacgttatggataacattatggttgcgttggtacttaaaaaagtcattaatatatttttttcatagatccaactcataaataattaatagcactgaaatgaatattctttttcttttttttttttggtgaagggaacagtgaaatgaatttatataataatacaatgtattttgtcaagttgtattcaatgaatgcttagatatatatatatatatatggatatgattttgttccgttattgtattttcacggattacgacagccgtcagataagggagttatttgatctgacagctgagattgatctaggggtaattagtgttaaaaagtagaaacgtatcctgacactcatttaatgtaccctaagactcatctaatgtaccacggaatacatttcgtgaaaatacatcacaggacaaaatcgtatccctatatgctattgttattgttgtttggaattggatgtatgattggagaatgtaggtggtggttaaagtagagtaactacaacagtactactcacgttgttcgcactttcataaattcatttaatatttaattcactcttttcagctttgaccttatattcatatacattatacacgtcgtttacattactatatatattacacacattcataatattggtgctccactattaattaaaggttaattaaaattttcactatttaaaattttaatatgttctaaattatatcttttaaatttttaaagttcattaaaaaaattttcgtaagctattaaagttgttagatttaaaaatttctgtctaatttcaataaaaaaattaataaaacagttaaaaattcaggggcatttggtcaaagttcgagaaacatgttttggtagatattaaaatctagagagcatgattatttagtactacaaataataaaaaatagaaataaaattaaaacaaaaaatacttaaatactaaac

SEQ ID NO: 194371 - DNA, 1645 bp, Cannabis indica
cctgcatgaaaccgcaatttatggctaataatactcagctaggctctctccaaaagagaaaataaattaatatatataatattttatttttattattattatgctttttttttttttttttttgtatagaatgctgctttttcatctaacataagatcataatcattaaagtgaagaaaagtagaaacaccaatttacaattctaattaattataattaaaattaatattattacactttctagactaattaaaagtacccaattgaccaaatcaaacttattattttaattatttatgaaaagtgctacatttgtattcatactcaatataaattgtatttattaatttaatagccactaatcacatcatgacaagtgcctactttttttgagttgtttgttgttaagtaataggaggcattttatatcaaccaagcaatcttattttgaaaagctcttcaattatggaggaaaagcaaaaataaaataaaaataaaaataaatgttatatcatatattttcctgaaaaagacagccacttttttatatgatttatccaaaaaagagaaattggggtgagataataattgttcatttattatttattttttttagaagaaaactatatataaataattaagctatatatagccctagctaattaattctttaattaatatataaaatagaagattacacattattagatgtattagcatttcttctagaatgacattaatttttttgttcataaaaaaatgacacattcaaaataaaaatacttaacaaaacatattttaaaactcataagcaacaacatgatgaaaccaaattaatgattgtattttataattactccgtaaccttaaaaaattatcgagtaattttaccgactaacaactaattaattaagcaaaaattatttcgaaatttctaattaaaaaattgttcaatttaatggcttataaaatatttaaatttttagcatatgtctagctaattattaataattttcttagttaaaaaaatgaaacaaaataaataaattatatatctagaaaatgaatttaattttgacataggatgaggacttaacatgcgtcattaattaataaatatttatgtatatataataattcaaaacaaattataatatgtcaattttggaaggtaagaaggttggattttaattggataatatatatgcaaaaaggcaaacataaacagttgaatgataataataacctttttcgaatttttcatatttgtcatgataaattatgtgaaattaatataatatttatattaaaattgtaaaaataaaaacatattgttgagcatgtttcaaaatggaatatttttaggagtgaaaggattagcaagaaaagagcctgagattgttgacttttgtactgtacattgagtttgtttgtgactatagaatttgtatatatataaatataaattaattaataatttacatgtgaattaatatatgattatttttatatgtaaaaacatttattgtaccattgttattgtttgttattggaagtctttatcagtttggaagagggcaggttttttgttaggtgtgtatcctaaaaaaaaatcatatggatgttgatataatatatatatata

SEQ ID NO: 194372 - DNA, 1891 bp, Cannabis indica
ttcgttgaagaaccaaataatgtatagtttaagaaaaatgatgatataacctggggttgactgcattgacttgaatatatattaatccaattagttatatatgtcattcaagtaattaattaagatataatataatgtatacacaacctagctaataactatttttaaaatcctaaactgaatttatattatatatagagcatattatcaataataggcaccaataatacttaatattattatttatttttttagaaaaaaaccccaaaagtaaaagctctaaaataaaaagaaaagatctcgttaaagatttatcacatttatcacatcaaccataaaatagtgatgaatataatttgaatgatctggctaccaaattttacaagtaattataaacaaaacatacttaataaggttatagggaataatattaattgtcttaaaacaataaagaagactcatcacattatagaagaaaattatactataatgaatgtcacgaaataaaattaatcttagtaacgagtccaatgttactttgttgttgattttattaaccacattcatgtaattaaataaaacatgtcaaattatcaaaaaaaaataccaataatgtatatagcatatcatgagatatcatatagttacaatttaataattatgttaaaaatactaattatttataaagtaacatttaatagtaatagttgattgggtttttttttttttttctaagctgaagttgttaaagtttttgctcttcgtcatgctggcatctaatgtcgtcttttgagtttggataatattcaattttaatgtaattacttgaatgtggttaacaaaattaacaacaaagtaacattcgacttgttgctaagattaattttatttcgtgacattcattatagtattagtttttttttataatatacatattcatatatggatatggtagtaaatgaaaaaatatcaatggaatttttttctttgaactacatggatttttttcattattattattataattattattacttccaaatgtaaaattagtttattattttcttgaaagaactctttcttaatttattcttcttcttacttacattatcttttaaaataaaatacatatgtttatgtaaaccagatttatttatttatatgtatacacataacatgcatatattatttgacttagtatatatatgcatatgtcaccacactccaatgtctaaaaaataaataagatccaataaatataagtaactaatattagtttattttattttacaattttcttggatcatatatatggctcaaattgatacacattatacagtagtaacatttctctaatattctaatgctataattccctacttaattagtatctcttatattttaattagaaaatattatatagtttactttccacctcctacctaacactttttttaattaccatagtgttagactttttatttgggctttacatttaaattttattggtttttattaaaacttgggttgattggatagttctttgctgtattagcccatgttgttggtgatcaattgttaatgggcttagcatctgtgagtaaagtctaggtgaagcagaagtgtgggcttttctagttgactgaagcctttgatgagcaggcccagcccaactagggttttgtagctaagtcccctccctaactctataaatacatattgtctcatcacaattgtataccttttgataatcagagaaaataaactgcttctgatttagagatctagggaggaagacttagttgatagtattgcactatcaaattggagtaactgctgtggatcaatcagagataattgctatggatcaatcaggtacacatacctaatt

SEQ ID NO: 194373 - DNA, 573 bp, Cannabis indica
ttattgaatgaacaaaatcaagtcctatatcattaaggctcctgtactttgcaaatgagacaaattaatgagcatgatccacaaattcaacaaatgctaagcttcaaaaaagaaattcttcacaaactgggccctgtcacggggtggggggactaggggagggatagcattaggagaaatacctaatgtaggtgatgggttgatgggtgcagcaaaccaccatggcacgtgtatacctatgtaacaaaactgcacattctgcacatgtaccccagaacttaaagtataataataagaagaagaaactcaatgacattaacaccttcatagcttagtatcagtgagcataaatctgttttttcttaaagtctcttctagtgtcacaaataaccaccagaaccacacatttgtttctttcagcaaacttggagaataaagtaagatgatctaatgataatttaagttgccaattttagaaatagattgttatgccttatgttcagtatatgatgggaatggactcagggaataggagtccttaaaatgatgttatttagaatagaagaaaactgt

SEQ ID NO: 194374 - DNA, 2050 bp, Cannabis indica
attattctttaatttatactcagctttataagtcatatcctcattagtactttaattataaaaaatagtatttatcaattaaaattattttgaaattatctaattaatatataataaaaaaaaggtaattttcaacttatgcctattatttttctaatttcactaaaattcaaagttggcccaacatgtcaaataccatggacaatatcataatatgatccaaaatatatttgcttataccatactttgacgaaattagaatctatactgaaaatattattatttttaattatttagctaatatcaatatacattattaaatttatctcgaactattatgtagctaaataaatatggttattctctaaatatggtcactttttttagatagggctagatgcatattcaaaattatacatattattttacatacaataatgtatatattgattatagctaaataatttttagtgaaaatacatcatatttaattacatactcgtgtataaaaattgtgtataatattaggtgtatcacaattattatgagctcattattataatgaatagaattgataagaatatgtcatcatatcataattatcttagtagtggctcgattattcccactaggtcttggtcactagtagacatttttaaataatgttaggttaaaggcatatataaaatataaaacactactatatatattatgattgaacatttttattttttaaatgattcataaaataggttaacaaaacttaaaattactaaataaattctacaactaaacaaatatttatttatatatatagcttccatttgttttatagttatatataaatattcatacaagtatatataaattaataaataatcttaataagtgatgccattttttgtcatttaagaacactgtgactgaaaactagacaaaatgtgtcatttttcattttctaaaataacaatgatttgttttcaatctttttttaagcttaactaaaaagccaaagcaataataactctacaataacaattcatatatacacatcgtaaaatatactataatatatttcatatattattatacagcatggtagtagcttcatcccaaattctaatgtgttagtattaatcttctttggtgtctatttttctgtattatttttactgttttgtgcttttaattatagtgctttgtcactctttattttaagtgagatttctcttctgttaaatttgagagatcccctaaattattattaactccttattttataaatccatattaattttattaggtttatccttattcatatattattatacattgtggtagtaatttcatcccaaattctgatgtgtttattgtattatgcttttaataataatagtttgtcactctttcattgtattaatgggagtggttgtttttattttaagtgagatttctctactattagattcagggattcttagattgttattaaccttttgttttatagatcgatcttttattaagtttatccttagcgtgattggttttgttactcttttattctagtttgaataatataattggagtatttctacccgattttattagaagatctttggttaattatcattgataggtgtgatctgtcacatattcattcaaaataaaaaattattattctttgttattttaatgtttcacagtagaagttttttaaaattatcataaacgacttggttagcctgttattgttagttctgctcgacgagcaatatctacatacagggcgggccttgaaatttagtgggtcatagaaaaaaaatatttttagatccttattaaaaaaaatatgatattcttcaaaattagtaaaaaaatatatatgtatttataaaagggaataatttctttgaatcctttaagtaagtgaattttaagtacaaacttagcttgcttatattaaagtcgggcctacatataatagactatgcccaatttacttattaataaaagagtgaattgtggcctaaataactaatgtttcagattt

SEQ ID NO: 194375 - DNA, 1286 bp, Cannabis indica
atattatatgtaagaaagaaaaagaatatgctctcctacaacaaaaaaaaaaagaaaagtacgtacccctcaacttaaatcctaagtgccttctcttgtcctcagaaaggtctgccactaatgcttagatacaaataacacatacttattacacgtaatgatttaatactagctattataagttggattatagtaattgtaagtgtaatttgagtatgtttattaaaacaaataatatacaaaagaaaacaaaatggttgacaacttaattatttattttttcttaatgtactactttggtgattaaacttcagttttagtcaagtatataggtacaaagaatattgactaatgatgtcgtatagttcgaacaaatatgttgttacgtcactggtcaatgatgaactactactttaaacttaatataaattatttcgttctctacatagaaagaaaaggtacgaattattagagttattataacagttgtattaaagataattaagcaaagtgatatgctaaacgtggatatatagtatatatatatatatcattaattaattaatgtatattgcataaatgtttttcagctctcgctaatgatgtaattataattatgttatatatatatcatcaatcaaatttttcacacacacaagacatatatataatttgtaataagtaaatgaatttgattatattactacttaattcgtggttagataggttaatctttatattttttttaattatacaattattaagtgtttaattacggaatattttggaaaaaaattatcttaaattaattatatatatgtattttatatttatataccataatacaagggtgatataaaactataaaattcaaaccatctcattttcacttctagaaaacatcgagagctgaaataatttccaaattttgttatagttcctaattacactattaggacgatttattaatagtctaattaattgagtggcttactaattaaatcattaaggttgacacatcttgctttctgttttggttattagtgaaagaaagattgtcgctgttaaattattgcggagtttcgacacaacatcgttagtgagcagttgggctatagattttatattaataaccatcaaataaggacggcttttggtacccttgtaactttacgttgacagttggtgacctaaagctcatcactgaacatgttgctttacctaagctacccaaatcagttgaaatgaaaaactcaacatttatttataattttatctaaaaaaaa

SEQ ID NO: 194376 - DNA, 2870 bp, Cannabis indica
ttatttattttattttttctctaacaaacattattaaaatgtcccactcttcaatgttcgacaatctttcttgtaaatgtaagaaatgatgttgagataggggttgaagaaacatgcagcttggaactgctttacattgattgaaatattagttggcacagttcttaatgagaaatgaaaaattttattcaatatctgttaagctgggaaaagcagaaaggtcaattaaatattttctcacatacatgcataaaagttaagtcgaagagagaacttcaatttggctgggcacataattacttgcttacaagaaattgttctcactctagtttgacttttacatgctttcatatatgttggtttttatttttatttcattgtggagcataaatttgtcattgttggatgatgaaatcatatgttgctcattcaggactaataaatatgggtttaagataaagggatgagaaactgatagaaatggtagaataactagagagaaacaagagaagtaacaatgggaaaactcgatagtttgtcctaatttatttaatcagcatagtctattgtctaacatcaaatggatatgcaatccttactctattattaactaattttcagtattatgaccagattaaaagtcataacaatataataaaaatcacaaaaaaagttttgaatgattaagctcaagtcctttgtcatctaagatctcagtccacactgtgatgccatttgttttttgatattagaatgaatttgaagtgctcattagtaaactaatttgagaaattatagaaaagctcttcgatataagaagtgacagctatctctcttgccccaatatcattactggctttcttcaattcctgtcctggtttgaaatctaaaactggatctgctcctttccagttaaatcattttctgctgaattttaaatcaatcttcattttcgtttcgctgttattctggtctacgtattttatttttctagaaaaagagacaaaggtcacttgtcttagactgacctcctttcatactttattcgggagcatcacttatggtaaaactgtggttacaagctaagtcttagcttttgaccaaaagcataaataagactaaaaaataataatacacaattacaaaattcttattgtaaaacaactccattctctggtcaaatcttgaaaagatatcccctcaaaccctcccagagtttaatctttccccatacatcttcagccccatttcaactccttagaatgtacacccatttctttcctaccaaacatcccaaactacagccatgattgctgctgtccgcagttgtgtggttctccgaccatctttgagtttgcacataatcagttggctgcttctttggggcatataccactgaatcccaaattcacacagcaatctagccaaaggtatgttactaaaagaacactccaggaacaagtgggaagaagtttctccattggttgaatggagtgtatattgtttattgttcagcagtgtatatcatttaatctgttctgtcgtagatttaacttcagctgcataaattatagaaaatatttatgcatctggttgaattaattattgcggtgtcatattttatggaccatatatagcagtaatcttaacttgatgttagtagaaggtggaaaccatatgatggataatttctgttcatgtggatcagaaattattgtaattagttttcttattagtattattctgccgattcagtaaaatattgatctgtttcttacatataatagtttatgatgtaacacggagagacacattcactgctctcgccgaaatatgggccaaggaaatagaactctactcaacaaatcaagactgcatcaagatgcttgtcgggaacaaagttgataaggtatttcttgtgaggattgacagaatcaagctttgtttatatttcccactattaagacatacttatttgttttatctgctgtatggaggaaatgatatttcagtgcacatcataacaccagtactcgtttgtgctttctccatcctaattcttcctgtatgcatttgtaaatagtgttctcgcatgtgagtacaatgacccatatgtttccactgacacttgattaaggaagagttactgtattgagtttgaactgtgaagattattgtcttcatgattaatatctaatttatgtagttataatcttaatattaaagttcttattataagagatcattatttactaatgaaaccttatgttgattgtatgattttcattcactatttaagacattattatcctttctttccttttaggaggttgtttttttttttgggtaatataattcctttcattagcataccaatgatgtagatgtggctattaagatatatcagaatatcaatcgtaatgcaattaaatagtgatattctgatatatcttaatagtcacatctacatcattggtacctccaatgttttaatattctgacttggtgagaatgatatgattttttttagaattataagatattttgattattgtattattttcttttgcgttattactttgcttttattagacatgtgtttgaatttttagtaaaaatgttttgacactggctacatgacatcttactcctgattgattccaacatgagtagaattaactttgttgggttgattgaagccagcttctagatgattatagtattgttaacctgccatgtcatatgattgattacctggatcaatttttgtttttcaggaaagtgacagagttgtgacaaaaaaggagggaataaacgtttgctagggaagtgtgggtgcctattatcgagtgcagtgccgaaaaactcga

SEQ ID NO: 194377 - DNA, 1179 bp, Cannabis indica
attaattataaattttgattacaggtgggatgaaagaatgtcagccgttataccagaagatgaagatgtgttctacaccgttggatttttgcattcgagtggttttgatgattgggattcgtttgatgagcagaacaaagagattttgaagttttgtgaagatgctggtattgaggttaagcagtatcttgcttaccatgaaacgcaggaagattggattaaacattttggttcaaagtggactactttcaatcaaaggaaacttatgtttgatcctaacaaaattctttcaccgggacagaaaatttttactacttcagtaaaattaattagctgaatatatatatatatatatattaaaatactatatataattaataaataattactattttctagaagggatcgattagcagggtagtatcttattaatgatcttgatgttattttgttctttctcctttttcttttaggggagtcaaaatgttgtagctattatatattagctagctgctatataggtaagttagtgtacttagcttaattacgttaaggtagaatattttgttcactttttgtacatatgggaatttggttaatattggaaaattatgtgtttattgttgtttattattacttatttgtgctttttaatttttctattttgttgcgtcaagcaagcatatatagttactttatatactttagtaggtggtcctaaaatatacaagtgatacttttaaatataaattccaatttaattaaaagttgatctcctcttgagacgtgaaataaatatattggttactgatgttgtctttatttgacacattatataaatatatatatatatatatattatagcttattattatttgcattgcttaattaaatatgtttatttttatttttgttatgtatatttttaaaatttaataaattaaaagaaattacttattaatttattaaaataaatgtattaatattatacattaaacaatatttattaatattgtatgttgatataatttcaatattaaaatatcataaaaaataataatattataaatatatattaatatttatatgtatttaagttcaattaatttaaaataaataaatattaatattttttatatatttaaattaatctaaaataaataataatatttatatata

SEQ ID NO: 194378 - DNA, 2168 bp, Cannabis indica
ggttgccgacaccagaaaacactacatgatgatggatggtatgctgatagtggtgccagcaaccatctaacatctgaggcaggaaaaatcaaacacaaattgactatggtggtaaggagaaagtgactataggtgatggtagtaagttacacatctcaaaaattggaaatagtactcttactacactcactgctgcaccattagttcttaaggatgtgttacatgttccatctattgcaaaaaacttgattagtgtctcaaaactaactcaagacaataatgtttcaattgaattttttgctggttttgttgtgtgaaggatcaaacagggaaggtgatactgagaggaacacttaaggatggtctctacagcttaggaacatctgtcaacaattctcttcactgttccagtcgacttcaaccgtgtctgttttctgttcaagttcaaccaactagaaatgtcatttcccattccctaaaggatacctggcacaggaggctaggacatccatctatatctgttttaaatcgagtcttaaaagtgtccaatgtaaccgattcaatcaatgaaaaactctgtttttgtgatgcctgtcagtatggcaaatctcatgcattaccctttaacatttctctaagtagagccaaaacaatgcttgaaatcatacatactgatctttggggtcctgcaccaattgcatctcatactaactataaatactacatccattttatagatgatcatagtcggtttacttggctctttccattgaaacaaaaatctgatgctttggctgcctttgtacagtttaaagctcttgtggaaaataaatttgaaaagaaaatcaaaatgattaggtgtgattggggaggagagtatgaggctctctcggatttggttatcaaaagtggaattgaattccaacactcatgcccgagaacctcagcccaaaatgggagagccgagagaaagcataggcatatagttgaaatggggctcacactcctagctcaagctcacatgcctttaaagtattggtctgatgcttttcagacctcagtttatttaataaatagactccctacagctgtgttagatggcaaatcaccctttgaaatagtcaattccaaagtacccgagtataagtttttaaaagtctttggagctgcttgcttcccatgcataagaccttatcagcaacataaatttcagtttcattccataaagtgtgtcaatttagggtatagtgaagtgtttaaaggatataagtgtctaagtcctcatggaaggatttatatctcaagacatgtgattttcaatgaagatgagttccctttcgagcatggattcctgaataattacaaaccagaaagtactgttacattaaacacaccacactcctggttcactttaccttctatggccaaaaacacaagttctcaccctcaggaaactcaagctgcagaccatacagatgtgttcaactcactatcaccatctcagtctcattctcacaaccaggtcagtgaaaattctcattttgataatactgctgctattccttttgttgctgaacctgctagtgcagaaaatgtgtcatcacagccacctgcagaagctcaattcgaacaaagagctgctgtaacttctcaccccatgatgacaagagcaaaggcagggatatttaaaccgaaagtatatcttggacaagctaaattcgacttgtctaaccatgaaccagcaacagttgaagctgctctacaacatgaggggtggaacaaatcaatgaatgaagaaatctgggcactcaagaaaaataatacatgggtgttagttccttattctccactgtacaacattgttggttgcaaatgggtgcataaaattaaattaaatgcagatggctctcttcaaaggctaaaatcgaggctggttgctaaaggttttcaccaaagaccaggtgttgattacagtgagacatttagcccagttgtcaaggctccaacagtgagagttgttctcacacttgctgtcacaaaagactgggaaatcagacagctcgacatcaataatgccttcttaaatggcactcttgaggaggatgtttacatgatgcaacccccaggtttcgaatcaactcaacatcctactcacgtgtgcaagttaa

SEQ ID NO: 194379 - DNA, 1002 bp, Cannabis indica
tatatatatatatgccgttgccaaaattggatgatgcaatacatatttgaaacttgaaaattggacagcaaataataaagcttgatatatattcattgactaatgcaaagatatttcccacattattggttgaaaagtgactataaaaaaagtattgtggtttccccctctacactccattacttagcttttaagagattcttcctttgcctgttctaagctaactttttgtgttatatgcttaaaagatgttaacaagggcccaattctgtgtgtgaattagttccccaaccacattacatggggtccaggcaacaggaccaagctgtgtatatattaatattaatctaaatattgaaggctttttataattatttatttatttttttggctttcctttcttgagtatcttagttaaggaaaagtgtccatttgagtatagctaggcataaattagttaaactgtcttggattctaaacttgtcactatatatgcgctagctatctcaatctcagtccctacttttcatcaatcaatccaacagcgttgtttattattatttaaattaaataagaaaagaagaagatcaagatcaaaaagtggaaggtgatgatattctataagcaaaaccctaaaaacgtaaaagtctataatacagatattaggatatatatatatatatgactggatgtatatgagtgtgtgatggacagagtaattgtagtgttattctctctatcatcaaaaatataaataaaaaaaaaaaaaaaaaaaaaaaactgaagtttgtggtggacttttatcttgctttcagtcatcataattatactacaaggaatagtgctagaacaggatgaaaaaaacttctcgagagaagccaatatatactatgcacgctagaagaattctcgaataaatgtcaaccaataagtatagtcataagtcgaatctactcatccgaatatatatacaaataaacaaatatacttcctaatataatc

SEQ ID NO: 194380 - DNA, 2026 bp, Cannabis indica
attacattaataacataaataataaaattttataatttcaaaatggggtatataatatcatgggtaatatataatatgtaaatatctattactgtacattgtgtcaattaaaaaatgaaaaaaaaaatcttatcattgtattttaataaaatgtgttaagaaaataaattaaatatatgtatttaaactacaaaacaagacacatacaactaagaaaattgtaaaggaagaaattaaaaatatacaccataaaaaaatatatatgaattaaaaaacaactaaaaactaactatttaataaaaaaatattttaagaaccttttaaaagaaaactaaaaacaacataaaaataataaaataaatacacatatatacaacaaaaaatgtgtggaattaactaaaaatatacaccataaaaatgcacataaactaaacaataatgtacaaaaaaagatacgtaaaaataatagaaaaacaactataaacacctaaacaataacataaaaactgttaaaattaagaatgaatagaatgaaaagattttttgttattgattaccaaggtaaaatacagagtatatatacaatgagacttatagctcaactgaagcaaaacaaacaactaaaaactaacagaattaactaatttctctaacagaaaatagttggaaactaactattctcaacagtccccctcaaactcaagttggaagagctttcaacattgaatttctctataagaaaggaaaatctagagcttgatattgtcttggttaaataatcagtaatttggtcataggctggcacatgtctgacttctagacccttgtttaagaccttctctcacaaagtagagatacaattcaatatgcttggttcgagcatggagtattggattcgcaaccagtaacacagcactaaggttgtcacaccaaactattggtgtgcattgtagtgacacttgaagttcaccaagtagagattggatccaagatattactgttgtaatgcttgcaaaacttcaaactcagcctcagtggaagaccttgacacttctattgtttcttagatttccaagcaatcgggtttgaaccagatagatgcagagaccactggttgacctcctatcatcaggatcaacaacccaactcaacatcacagaatcccatcaaatccaaagcactcaattttttgatatgcatgcagtggttcctgtttgatatttgagaattcgtttcactgcattccaatgtgattgtaggggattatgcatgaattggcataccctattgacactaggcaattcctagtctagtgacataagatattgtaaacctccaataatagatctgtagaattgagcattttctacaagatcactaccttgcacagataatctgagacaagaagtcatgggggttgaatttggctttgcatactgcatttttgctcttaacaagaggtcttttaagtacttggtttgtgagagatgtagaccttgttctgcaagaataacttcaatcctaaggaaataccttatttcccctatgtctttaaggccaaaaatgttgtgcagattagaaatcgatgctaaaattagagaaggattgctgcctgttatgacgatatcatccacataattgataatgagcatggtttgaccaagatgatgcttgataaagagagattggttgattgaaaaccaaaggtgataagaacagaggtcagtttgtcaatccaggctcttggagcctgcttgaggccataaatgactttatgaagtttgtagacaacatgaggttgagatggatcttcaaacccaggaggttgttgcatgtaaacttcttcagtgaggtctccactgagaaaagcattgttgacatctaattagtgaaatttccatgagttgcatagatctaaagtaagcacaattcttattgtgcaaggcttaaccattgggctaaatgtttctgaaaaatcaaatcttggttgttgatgataccctttggccacaagtctagctttaca

SEQ ID NO: 194381 - DNA, 1702 bp, Cannabis indica
taattaaatccaataattaaaagcaaagcttttgattagttatgtatattttttagtgcagaggtaggtagcactagccccctagctagtttaattcaaattaataattattggagggtttcaattaagtttgcttatcctaaataaagaacgaaaacaagttaacaactgttattgaaaagctttgatatttccacatttacatatgatggaaatatatgagtaagaaaagcaaatattcaataactatcaagagagagaagaagtacgtatttaatttttctttctcaattctcataggctcatagctctctctacccatatagccaataaaatgtttcgaaaatttaaagcaatgtcaacatttaagattgggccaaactcaccattcctcccataaagacttgttccaccaagaaagaaataatggcactgttttattgaatttaaataataatgatactgtcactgttactaagaaattatatgtatgtaaataaaataatagaaaaagaaaaaagaaaaaagaagtccaaggttgtgattattccaaggagacaagtagtggtaaggggacaatgttttgagatataaaaaaggaacatatgatgccgttggactcaattgagaaaacataggaaaacaaccattggatgcctcttctagcttaatgcaacttctcttctcttttctcttaactttctttcaaattcactgtccctctcaatttacatgataaaatatctaccaacaaaggattgtgttgtgaggctgcaaatataaaatcatcccaaggtgagatctacaccatagaattgaagaaaaggaaaaaaaaaaccctagggaagaagaagttagtacatacacatattaaaatcaaataatgacaatatttaaatttaaagttgtgcaatgctcctgtggtcccctcttcttatcaccatacattaatttttccttttctcaaattctggttactctgagcccaacatcaggaggttttgaggaaagagtctttaaatgcacataaaggcatcaccaaaaaagaacaaaacttggtacataaagggtgacccataacttgttgccttagttggcaaccacgagaagttaattgtgcataacaaccaaaaactataaatatatatatatttgaaaccctattattattatttttaaatcaaagttcatcatttaaagaaaaggttacataggattaaggagaatcctcctaaagagcaagatttgtttcacggaatacaaaagatataccttctacattatcacacatcaacaaattcctaatataatctagaacaccatattaagtatcatattgatgttttaatttaataaattaataacattaaaaataataattgctgtttttatgtactgtacaccttaaagtaccatatatatgacaaaactcttattattattatatatatatatatagttgatcttatgattgagagatttgagacaattattaattgtttgaatgagattttattttatttggaggttaataactacttgcatcaatgaaatagattctttaatttatttttagttgtaatttatcttttatttatagactgtaattttactgtctataatgtgactaaataaacttttacttaaaacttaacttcgtctagttaaatatcaacaatactaataaatataatttataatg

SEQ ID NO: 194382 - DNA, 2109 bp, Cannabis indica
tatggtttgatatgtgaaattgacacttgctaatgctttttagaacccatctttacatctagcattaaacatgaatttaaagctgttgttaaaaagatagttccctgagcatgtaaagcttttaagctcttaatctgtattgtttgtttaattttcataattttttgaacatatattttgtgatgtgaatctggattggatgcttggattgatttattagttgctggaataggttcatgaaggtgttgtggaagacgtttcctggcatttgaggcatgagtacttatttggttcggttggtgatgatcagtacctgctcatatgggatcttcgaactccatctgttactaagcctgttcaatctgtagttgctcatcaaagtgaggtgagtgtataatacttgtgtggatttgacgtcaacttttacggtgtcctttacttgtaaattttcagttttagtgtttatgtcatttatttgttctgaaataaacgtggaataagttctattcatttttccttcaataatgtatttgaattgttttagctagcagatgctctcacttattacaaataaggcctattgactaaaatgcttgtttagctagcccttttaaatactaagtattatggttgacaaattttttattatcccacgatatctctatatataattatgagaaaatgttagtttaccacttatatttcattatcgatttacagtcttttgttttcatttataccacaacacttctttgataaataaaatattccatgtcagacaaaatttcattaagactaatgtcttttattaaatacattataaaagcacttaagaatattgacaagtgaatctaatatggctaaacccgagcttatggaattagtacttattttttaacgggtaagtactcttttgaatcttgtgttttgcaaaagttactaatcaggccagctttgttaagtaacaatccaaacccagtgttttgcagaattggtccttgagcccaattttcgtataaagattttagggataggattcgataataattgcgccacagtagggttagggaagaggaagttttagggttaaggtaagaaaaatgtttgaccaaatttggactcaggtatctttatgctgtattatataattatatattatacattatatatattcttctttagaagttgacttagcaatcttattttcatgatgttttgttaggttaattgtttggcgtttaatccctttaacgaatgggttgttgcaactggatccaccgacaaaactgtgaaactatttgacctacgcaaaatcagtaccacactccacacatttgattgtcacaagtaaggactcttcaatttgatttactgaatacttttttaaatttatggttctgctatcttttgatactgaataattatttcatgttaatcattttagggaagaggttttccaagttggatggaatcctaaaaatgaaactatcctagcttcttgttgccttggccggagactgatggtgtgggatcttagcaggtatttctgaaaaaaatcatttttcttttaaatattaattttactttgatgttatagtagtatgtgccatgcaatacaaacttatttaagttgatgtattagcaattactgttttaatgtttttcttgcaagtttggggatcacagtgtagttttttttttttttaccagatgttttgacagaggtcacttagtctcttaggtgctatcacaaactacaatagatatggcctaggtcaaaaatcaagtcaatcagaactctgacatggggagaaaaataaaatgtagaatgtcttttcaactcttagagtaatttttttttaaaataaatatatatatttatatataaaagaactcttaagaataagcacaattgaatcattgaaggcaactacgagcaaggataagataaattgtattagtaaaacttgtttagttctgagtgtgttatatcttgagtttataaagaaaagaagtgggaatcaacctaaattcatattagtgtctgtcctttactctattgaatcgcctagggaaggaagacaaattgaacacaaccgaattgatgta

SEQ ID NO: 194383 - DNA, 1533 bp, Cannabis indica
ttcccttcaaggctctccaaaagagctgtttcttcaccacaaatataagcaccagccccataatggatatgcacatcaaaatcgtaacccgatccacaagcattctttcccaacaatccagctgcatatgcttcttttctggctttttcaaggtttaggcgctcgttcacatattcacctctgatgtaaatgtaggcagcagttgccctcatacccacaccagcaattaagcaaccctctaaaagtttgtgtggatcatgcctcataatttcccgatctttacatgttccaggttcactctcatcagcattgacaacaagataggaaggacggccatctgaaacttttggcataaaagaccatttaagtccagaaggaaaaccagcaccaccacgaccacgaaggccagacttcttcatttcattaacaatccaatcagcacccttaataactaaatctttggttctatgccaatcacctctcttcatcgctcctttcagaaaagggtcatgcaaaccataaaggttagtgaaaattcggtcttcatctttcaagccaccaaaatgggttttctcaggcggtggaggaggtgggggcggttgcggtgtgctaccagttgccgcaccctgagtaccaccaccttgagcactgaacgatctaaagcacgttgcccacttctcactgtggccccgagccaaagctgctcttcgcaaagacataatgcccctgatgggtgcctatgcaataatcatgttgcataaaataagttgaactgcctaaaagttacatgtagctaaaaacatgcttcattcagatttcagagttcaaatgatatatcattttaaacagccatgattgagaagaaatatcaatgaacacacattaatttgagaagaaaaaaatcacacccacaacataatttcttgttaatccctaaactcgttccgcactaacaatctttcaaaattgtctttcaaggttacatgatccgtagtattaaaacgcaaaaaaaaactgaaaactaaagggaataaattctttcgtgtgggtctgaatcttaaacaaaaaaccactgaaacccaatacaacatttggatatgagaaagaagagcatttcagctcaagggttcttaaaagcattcgtaaccaaaaatcaaatctttatcacagttgagcttataacctaaataccaactctaaaattaaatgtaaaatatacaatcaaacacttgacaatcgcattggggaatagcaaatgataatggagaacaaatcgaatgcaaaccaacaatacaaattaaaagaagaaaaagaaaacgaattacagcttgtaatgaaattgattgcgtaccatagtgagaaatcttggcagagatgatttgatgcagtcgccaaatcagattgtgaagaagaagaagaaggtgagttttgagaaatgttggaaactgcggtccttggaccgaacacgtagataccccttgtgttcttcgcgtggccttattttagaggaaatatgtgtagagagtaagtaaa

SEQ ID NO: 194384 - DNA, 1090 bp, Cannabis indica
aaaaggctgaagtcgtagcacaattgacttagaaaccagtttgtagagaacagtgcataaacttattggacgatactgagtaatgagctgaggctttttaaccttgggaatgagagtgatgagtgttttgttgataatagaaggatctgcaccattgtttagtacatctagaactgcttccgttaccaagggtcctacaatatgccagtaattactgaagaacataactgacataccgtcgaaacccggacttttatcctcactcatagaatttaaagcttgtcgaacatcagctgctgtatagggtgctgatatgatttttctagcagatgcatcaattgtagtggggataacatccaagattgaatcaatggcattatcatcatcaccctgagtgctgaaaatggactgaaaatatgtggatataacatcaagcaaagcagattcactggtctgtgtattacccgcagcatctttgagctttttaatgcgattattggctgatctagcattagcacgctgatggaaaaatttggtgtttgagtcacctgatttcaaccatgaaattcgagcccgttgatgccaatagtcctcctctttagctaacaactcatcaagtatcatttcagaatttttaagagcagcaaagtggtgcggttcagtactggaagaattctgtagtgctgcaacatgagtatgtgaatctttaatgtctctcctcagattaccaaagttggaataatgccacttctgaaggttagatgcacagtttgagatgttagtggtgatctgcattaaagggctgctggtgtttctattccaattggcaaaaataatctcagcacattgttcctcttgcaaccaaattttttcaaaacgaaatcgcgacttaaactcaggaaactcagcttgatccattagcgcagtgacagttgctttgattgctctatgatccgagtgataaaagtctaagtgatgcaaagatggtgaggagaaagtagaaacccaatgttgattaacaaaaccatagtccaaacgttccttcacattgccatgaccttgactcttattagtccaagttgttctattc

SEQ ID NO: 194385 - DNA, 2008 bp, Cannabis indica
atgttccaaatatagatatgctactaattatccatttcaatccaaataatcaaagatcctctatggatgatttacatcaagtatggacaaatttatcgttctacccttcaatgtattttattcttaaaacacttaactttctataaatgatatttcagtaagctaatataattactaaaataaaagctcttccatttctctctgttaagccaagctcaaaggaaattaccatttcatttctatgtcattatagaatctatagattccgtatctatgattagcgctcccactcaattgtactaccatgctcccaagatgtaggtattgagatatccatttggtcagattttacgaataagccaaaaacacaaataatatagttaagctagaacctaactatctcaggagattaagatctattgacttaagatcaactaagtgatattgacagaaagatataacagtaagtttatgatatcttatctaagtacaatatcagtctagttcagactccatacatctgatactagtatactttaccaataccctggaaaggtcaaaccacttatctaagtgtaagtaaactttattactgattatcacgtcagtataaatccagtgcacagataaatcataggactaaaactgtgaagtatataattacaattactttctactatgatgatatcactgtaattgtgaataactatatgtttaagatttatcaaaaattgtatattaaaccattaacatgaaaataacatgtaaacttaaatgatttctaatcttccattgatagcaaataagattatattgaaatgggttttatttagggcataaaatcccaaccgaatttactatcaatagttaggaattcgatattcaatttcatctttagtatttttgtaagaaatatgtaggtcagtcgaccaagacaatatattttgtgcaagaagtaatgaactcgtaacattacctaaaatgtgtaaatgcaacttgaggaaacacaacaagtgactcaaggcctacacccttcagtcacttggatgtaggtaataagtaaataaaaacaacacagagtatacatcaaggaggcatggcctaacctactagcaaaaaaatatataaccaaattaagcaaaataaattataatcttaacaagaaaaaatagtaacaaatataacttgcacaaagatcagaagcttgaaaggatgaaattaaaattaagattgcctagccatattgtcttaaatagataaaggtcgcatgaccagattgtctcaaaaatataagccttgggggaaggctatcaataaatgtcttcccataattaaaaagtggctatataagcaacacaaaataataataataataataataataataataataataataataataataataataataaaattgttggttgtaagtcttgccttggagaagccagaaagggtagtcgaggtccactcatctttgccactagagccgcatctagctttttgttcttttccatgaagcgcttcaaagtggcttcaagatcgggaaaaaagtgaagacaaggctagaatttgttcaaactctagcacatgaaaaccttatcttcatagagcttcttgcattgctcgcaagtgatgggagaaggaagtcggatggtctttttatctaaaacttaattaaccaatttgttagagtcccacaacaaatgaagctcctccaactccacacacatattggcaatagactgtaaattagcctgatgaagtttctcaagatgagagaaacgttgcttaagactatcattctccaattgaaccttagataaatcagcctctttctaaagatacacttgtttggttgccagcagctgagtctaagcctgtcatcaagtcttggccttctgatcccattccctcaatgtcttctgggccaagacattgtccttaagagtctccacctcctcctctacatgcttttatttggcttgcatctctgaaagccctc

SEQ ID NO: 194386 - DNA, 1147 bp, Cannabis indica
tgaagagaattccgagatggaagagtcgtcaattttagcttgaatattgattgtcatgaattaagcatgcaaatgaaatcatatattatatattcatgtaaatgaaatgcatgcatttgtggcaaggatgcatggacttgtttttagagacgttatagaaatgatggagtaggttttgtagtttcaaccatgagcttaattcactgtttataaaccctacttaaaaaagaaaagaaaaactaaatcagcaaacaaacatatatacctattctgtcaaaacgtttagaaatacataaagacaactttataatgcatatttgtaatctattttccatacagttacgtatatatatagtataattaaaatttggagcagcattgaaaacttggagtactacttagtacctaccttaatcgattttatcagtatttacctagttaccttagtattaattggctttattagtacagagattttatcttcaaattaattaatttagaataatattgtttaatattcacttttaagatagtgatttttttttctctttccaattttaaaataccttatcactagtgtcatttgcttgcttgcttattgttttattcgaatttcaagtttctttgtacaatacagatttcatgtagataattttactatttggatagatatagatcgaaatcttactaatttttaatatcatgtagaattataaagttcaatctggatattgttatccaacattattaaactgagagtcagagacttgaacctaaaataatgaagatggaaggtataataaatgggaaatttgatttttatacttagaaaatcttaaaattttttccctaaatacatacttaataatattggtaatatatgaccacattcctaatatcccacaaatacccctcccatttgaaaaaaatcaaaaactgaaatcatccatggctgcctcatcccgaacctctctctcccatggctgcctcatcccgaccaccacgcccggccaccgacgactacccaccaccccgactacgcacgaccaccgtccgaaccacgcacgacccagcccttctctcggacccagccctctctctcttcctctctctcaaactgaaaaaaaaaaaaaccagaggtccgatg

SEQ ID NO: 194387 - DNA, 1506 bp, Cannabis indica
gaaattctaatttgataatctggtttgttgcaggaagcaaggggatcgaaaaagatctgtttcttacataaatgcattctgtgattcctccctatcttcccagattaataagtggataaaaacccagatccaggtggttgaaaatgacagtaaattactaggatcttcgcctaaagctcttattagtaagtagtaaacaactcttctgattattttattctatttttaaaattgaaatggactatttctaaccctttcactaatactggtatcaatatcatctccagagtgtcttatgaaccttgaggatcaaggcgttgtagtatttgatgatagcgtcttaaaaggccgtgctgaactactacgagacactttcaagacagatttgcaggtaccagctttgaagatggaagagaagaaaagggatgatgatgatctattttttgtagataaggagggagaagagttggatgaaaatgacaacgaaaattcaaatgaagctgtcactgctgcatttgtagctgctgcccactcaatgaaatctactgataatgaggatagaaaaaggaaaaaaaataaaagtgcagaaaagaagaagaaaataaagtttctcaagtacgaagtattgccgacttctgaaccacctattctgagggcccctgctgtcaatgatgatagcgcgagcagtggaagcgaggttgagaacccactctctgattcagagtaaaatgatgaacatatttttaaagtggcaaatgttggaagacaaaggtgggacaaagttaacaatttcaccttatatttgactgtctcgttctggtttttcatgggtttatgtttatcatagactgtctaaccaatttgacatcaaattcgttgaagcaaaatccattgtgagattttgtcaaacaccagcaagaaagtcgataagcagcttttcttgcatcagttttgccaatattctagttatagttctgttaactgactttgatcagttgcgagaatttgcttctggacagtgaaaatggcttaactttgtaaaccattatttgcatgtatgatgaggtataagttaagaatgtgactactactagcccatttgttatgactatgcatctttcttccaggcaggtttaacttttttcttttttaatgacattttcttagcttataagtgaaaaatgacattttttggaatggctagaagcttttgcattaactagactgaggagaattcttcctggtggatataacccaagcagacgcgagtaagtcctgtggaacgaaggggatatgccatcaatttccttgataaattatcaactcaaatcgacattgactggtttttaactctgctcttggattatgaatttcagtaggaaatcatatttgaaactccataagttgaaagttctcataaatatttgggagaattcggaattcctttggcaactgaatcaagaaattaatcacttacaattgcaagaagggatattggcggctaaa

SEQ ID NO: 194388 - DNA, 1103 bp, Cannabis indica
ttacatgcccacaaacatttgcatgtatcgggtcaacttttaagcaacaaagaatatgttgactcgcatgatagctagcattgaattgcacatatataatatatttctatatacaaagttacaaactctaaattaattagctatataatatatccacttgggagatatataagtgtattgtactatatataaaccagtgagttgattctaggtgtggtagatcatatatgatccggataggtttgctaaacaatatgatgttcaagcttcatttcctctttttatcgctagttcttacagccctgcttgtacatctcgttaatgcacaagatgatcaaaaaaggtacgtattaatcatcatcatttatatatatatcactatatcagtatatattactatagctatatgtagtttgtttctaattaattattgttatcgaaatttaatatataggtacgtagctaattaaaatttctgtaataaaaagctatatagctgcatatatcttacgtaattaattaatacatgataattaattgatcaggtttcattagcttggactgtggtctggctgaaaattctagctactcggagaaaacaacaacaataaattatatttcagatgctgcttttattaatagtggtgtaataaaaagcatactccccaaatacagagtcggtctccaacaacaaatgacattgctcagaagctttcctgaaggagttcgaaactgttacagactaagcatacaaaagggtaccaagtatttgttcaggacaatatttctgtacggaaattatgatggcctaaacaagactgctaaatttgatatccacatagggcctaattattgggacactgtgaagatcgaatcagcttcacaagctttgattaaggagatgatatatactcctccacaggactatgttcatgtatgtcttgtcaacactggatctgggacacccttcattcaagctatagagttgaggcctttgaaaaacaccacttatatgattcatgattctggagctttggcatactatgctcgcttggatttgggttcatccaccaacagtacatacaggtgtgatataattaccc

SEQ ID NO: 194389 - DNA, 801 bp, Cannabis indica
gaattaaaaaaaaaaaaaaaaaaacctgttgcttgcccgggccaaaaaaaaatgaatggactgattttgggtagcttaccataaggacttgccacttccggtggccatgaccaccatacagtcctttttttctagaatattctcgatcacttccttctggtacggccgaaaggaagaataaccaaagtaattctgcgcaaccaagaaaaatccatattatacagataaaatctatacacagtaagtaatagcttatgcattttcctacagcgccacattgagacacacaaaaaaatctgacaaggataaaccctaatccgcatagaaaatcatcaatgagtgatgagcagtgacatgaaatatactaagtgtaaatgaagacgaaatcgttcatatattttgaatacctaaaaatactaataataatagtaaaaagaaaaggcattgaaatcttactttgagtatggattccattgctgctctgagtttggagcttgaaaaaatgggctttggggcaggaagaagactcattaaaagctctgagtctcaagaaaggagagacagagagagtactgcattgggtgcactgccaccactatagtctggtgtttgtagtgctttactgtatttgtttaataattttttgaactaaaattatccatttctttttttattatttttgggaaatatgttcccgccatatgtctaagtgggcttgttgaaaactcagcctctaaggcccagtctaggcccattcttcttcatgtttttgataaattttgataaatatgagatttttaa

SEQ ID NO: 194390 - DNA, 1016 bp, Cannabis indica
ttgaattgtgcataaattgtatttctcttcttactctttcatattgtttaacagtttccatcatataaatgcataattcttcttcttatcttttcacttttgggctcagatggaccccatcttcatagatgtcatgcctacaccattgtctacctctctgtagtttgatgttaacttgttttaacatcacccctagttttataaaataccattttttctttctctttttaaatacactattttgtcttgtattagtaataatactattattatactcaaacatgataaattgcaatatcaagacattgtttaaagaaaaaaaaagccaaaaaaagggggggtggtatatctatatacatatatttatatacacacatacacatatcaggcttctctagaaaagaccagtgataaaattgacatgtgatgtagattgagcagaaaagataatattggtaatgaatatatattgaagagatcatcagtgggaatcgattcatcaaagtacataccaaatatatttgtatgtaaatatatatttatgtatatgaaaggtaagtgtacgactctacttatttatttagtggaaagttaacaaattgaatgcttacatagccatctaagctctttgattaggaaggttacatttggattctaaatttattgataccttttcatgacttaatgactagatacagttcatgtttgatcatttttctaggtgttagcatagtttaaggtataagttacaatagtaaaatcctagttagacaggtgcatgtattttaaggctaaaggtagactttttactacttctataagataatcttatgactatttgtaaactaatacagtcagcaggtagtttttggttctcaacttcatctgaaaaacggctgaagagttacaaaaattgtgatcagttatgtcaacttttcatgctgttgatttgtggttacaaatccactcatctaggataaaaagctgctaagaaatataattccaacagttggtta

SEQ ID NO: 194391 - DNA, 572 bp, Cannabis indica
tgacttgataatgtctagaagagcttgaatcttctctgaattagcttcgattcctcagaactacaagtaaccctaggaattccctaggaaaactttaaaggtgcatttcattagattcaacttcattccatactttcagataatagacaaggcttcttctagatcttcgttatgctccatggatgttttttactttactaacatgttgtcattgtaaacttccatgctcttccctaagatatccttgaacattttattaaccagatgctaacacgtggctagggttgtgcttaggaaaatgggggcccatggagagttaaattatgggacccttaaattaattacataaatgtgactcgtcttgtagtttttaataacctaattttttagaaaattttatatattaataataattagaataaataattaaatatatacatttcggtacacacataaaataatagattgagttagtctagtggggaagggttatattttccattatgtggttaggagttcgaactagctctccttttttttagttttcaataatgatttattttacaagaaaa

SEQ ID NO: 194392 - DNA, 2531 bp, Cannabis indica
aaaaaatacatgaaatataaaattctaaaataattatataatgctttattttaattgttaataactatactttttcattaataattttacaaataataaattttatcgattttttaaattattttttaaaaaatttatcagggtaagatttactggtgagtaccctatactcgttacctgtaaacaataataggggtaataggataagatatatgggtagaactttttcatgtcattgaataaggtaattaattgttgaaaaaattaatcagtttacttagtgtaattgtttattatacagtgatagttaattaagaagacgtagtttgtgaataaggaaaatcaagattaagccccataatgtatgcgcatgagagacatgcatggatttgtgtataagcatgcacttaattagtgcacataaccaggttgcgcgtgccaaaaatcccccaattacacaaatttaattggctcacttccacaaaacgacacctttcaaaagttctagtttacttacttggataaataataattcacaattattatttgttttttgaaaaaaaaaagtgagtccaattttgaccaaatatatgtctttgaattggactgtcaatggctatggcccagccaaaatcaacacttactcttatataactactatattaagtcaatctttaattaatgtcttttttcttaagacaaaataaatgagaggttattaattgagaattgtatggagaaaactcatatatatgaaatgaaagtaggttgggtttagaaggtaaaaaaatttgaagaaaatgaaaactgagttgctgacacaaagaacatctagggaagtgagaaagagagagcttaaagcaaagaactttggaaacccagaatcaagtgtaattccaatctgtcctcagaaccaaagtaaagaatataactaaatatcattatgagtaccattttgccctataaaattaacaaaaaagctaaagtttcagtctttgtattggagactggaaacataaaactctctctctttctttctctctcctctctctaatattttttgttttcacatttaaaaattcgagcatgatttccatcactacccaaaggaaagcatttatagctccacacccacatgtataaaactttaacaaaacccaaccccatttggtgattattttaatcagctcaaagctcagaagtttaagttgtcagaacataaaaaaccaaagtattagaatagaagagaagagaagaaagaaagaaaggttggagagagtgaacagagagaaagaaagcaaaagggatcgaaggaatcaaggtagtgtttattctggggtacttcaaacaagaaatagaagaagaagaagaagaaaaaggctttggaaatggtgagagagtgagatattgtaaaattgggttttggtttttttctcaaaataataatgtattggaatatggatatggttggaagaggtgttgatgaattatcttcattgatgacaaaatctaggaatacatgcaagttttgtacttttgattacagaagaagacaacaccaatgtacacaacaaacacaaaaagctccaagcaaacaaacaacaccaccaaaatcttcaaacatggcttcaagttggtgtcatcatcatcatcatcatcatcatcaaatctcaccaattccaactcttctattattctttcttcctcttcttcttcttgttggttcagtccattcttcttcttcttcttcttctttacaacaagccaatcagactagattacggccagaacaagagttactcaaaatgaaattcataaaggctcgtctcaaaaatatcaacaagtctccactcaagacaattcaggcatttttctttttctcactctcacttaattaattcccctgtttttttatgctctttttttttttttcttcataataataataaatactgaatttgatgattttcagagtccagatggtgatattatagattgtgttttgtctcatcaacaaccagcttttgaccatcctcagttgaaaggacaaaagccattggtaattaaatagtaataataaatattcagtgtttaattaaatttcaatatatgtatataaattgtttgaatgtataaatttcaggatccaccagatagaccaaaaactcaaaaagatcatcattttaatgatatggagtcagaaaatgaaaattatcagttatggagtttatcaggagaatcatgcccagaaggaacaattccaataagaagaacaactgagcatgatatgctaagagctagctctgttagaagatttggaaagaaacttagaaaacatattagaagagattcaggcagcaatggccacgaggtaattaattaattacttcttaaattatattttttaaaaataattaagttgtaattcaatcccatgaaaacagtctttaacaaaaatttagtaagtgctacttttttattttcttctaatatgaacaagtaattttatttggttttgtcttgttcttcta

SEQ ID NO: 194393 - DNA, 2314 bp, Cannabis indica
agacccgagccctggacccggacctagacccaggagctggaccgggacccgaacccgagaaacgggacccaaacccaaactcgtacctgaacctaaatccaaacccaaaacgggatcgggacttggacacggacccaaacccagacccggggacccagacccatgacccggacccaaacctagacctggatccagacccaaacccgagacccggactcatacttggaccggggctgggaccgggactgggacctggacccggacccgggacccaggactcagacccgtacctgaccggctgacccgtagttggtgttcgagtcgagtgtattgaaaatatattataactttacacaatctattaatacaagtcaataccaaatattatattgtattaaataatattaatataatacaatacaatctaatccaacacaatacaatataatatgacgtactaaacgagccttaaattcataactcaatacaatttattggagattaatcttcattttcaatagggaataaaatacctaatatttttttaaaatattgtaattttatatttatttttttttttttttttaaaaaaaaagaagtaaatatatttaatgttgtcacttgtcaaaatgctgtacttttaatatgtgttaaaaatgtataacattttgaaaatattatgaattaggtataaaagacaatattataaatatatttactgtaaaaaaaattataaatataatattttccatttttttaacataagctatataaatagaatagagactagatggtaaaattaaacacttgtcacctaaccacatgaagaaaaagatgaataatgggaatgtattttttttaatgtgatgtgatgttatttgaagatgttataattttattttttaaattttcgagggcagttttgtcccatgtgactcgggatgagaattctgcagcgcatggtttggcaaagtatgcccttcggttagacgatgagctatcctagttcgaggaggtgccatcactgattgtggattactgctttgataattttgtgtgatttgatcaccgcgtcaaaaagaaaaaaagatgaataaacacttgtcttgccagaaaagagcacaattgttatttgttaggtattttgcccataccataaatttattgaacaattaattaagatactcttaaataagcattgtaatttacactataattaattaacggtttctcatataattaattaaattaaaatatgtaaggttgatattaaaatgttattatgttaacttttgtggtgcttgacactgcattgttatttgttagatattttgctcgtaccatgcattgttaaatgattaagatactcttaaataagtattagtatttacactgtgatattttataattagttagtacttagtagtttctaatattatttattaaattaaaatatataaaagttgatattaaaatgcactaataacaatatattaattcttgtggtacttgacattttaagataccttttaatcgttctctatgatacattattatttatataatttaataatatagtattaaatcccttaatttaatataaaattcatgaaaatttaaatatacaaaacaaagtattcatttacactaataataatgttgtagtctttatcttttctgtatattatacattatgtaaaagtggtttaatggtacaaataatattcaacactacttgaaatgtcataatagttgtaatttattattaggttttgcatattctaatgtatagtaaatattatgaaacatcattgttattaaattttagtggtgtttaattgagatgatgcccatggctaacataaagaaaaataaagtattgagtcctttattaaaaaattatgtgatacttttaaaaattattaagaaaatatgtatatatttttttttttaaaaaaaatatgcttttgggcccttgaattagatgggccttaggcgcagactaggcccatcttaactccaacccgaccatgatgacaccttacgagaataacttgtagtataatatttattaaattacaatatgtatatcttaatattaaattacaccaaacaaaaataatatatcacgtgatactggacactattcgtagtctttaacaaatcgctaaacacttgtaacacgtcacctataatataattagagaccacatgtgcatgtacaacaatgctcttataatgataattgagtaaatatcattttagattttgtgttgtacacagttaccaattgaatcgtttgttttgttatatg

SEQ ID NO: 194394 - DNA, 694 bp, Cannabis indica
tcgtcgctctttcaatgaatcaagcccttatcatcccctccagcttaattctctgatatattcttcctttttatatttttcaatgccctttgctgtgattttatatttatttatcttaaagttctgcttcaccttcttactcactccctttcaaacatcatttctttatgcattctatttattttttcaatttcatttttcctttcactgactttctacatcccactctccaacaatcaaaatttgacacctcagtatacccaagcctcctacttcaccttcttcactgtcagtacacccacacccaccgctagcccctttttccagtatcaaatctattatttatatcctctcattcgaaacctctctctcaaaaaacctcccttcaaatctctctctcattaaattgttcatatttgggtcagctattattcttcctcgatttctcttgttattttgtagattttaattattatcatatttatttcgttcctcttccttatttataataataatattgttggtattcgtagtgcttctttcatatttgcagttttaacttttaggtttttaaaaatatacgtattgcctgatatatgtatacacataatatatataaatatatacatatatgtatgagatttatttaggtatcaagtttactggtttactgttattttgttatttacctgat

SEQ ID NO: 194395 - DNA, 1535 bp, Cannabis indica
ataaaatcactcatgagttaatgcttgaaataaagatttagttctgaacaattcacataaacaacacagtctagaagctagtacattgggcaataatctatttcttttgtgctatacaagttcaagcacacaatgataagttttcttgtaaataattggtaggcaatatataagagaagatatacatgtttttggaaataagagagaaattttgtgccacaaataaactatgtcagctgaaattacagcatggaaggcagggagtggaatagcatacccaatataaacacgcgaaacctctggtgtattcaaaacttttccaagtgaccacatcaaagctccatatactctcatgagctataagttataatataattaatgatgtcaaagtagacaaatgcagtcatcaaaagtcaaagatatctaggagaaaaaatattcaatagagtatctgaacgtctacctgttgcgtgtcaacttgatctgccttattgagaaccacgcgaatcttgtcatcatgaccacgcagagacgaaattacacgtttaaattcgtcactaatatcaagtttatggggatcaaacagaagaagaataagatcacattttgcagcaaaccaggatataacaccagtgaaatcatagcttcgttgtgtccgttgcttttctccagatagtacaccaggagtatccacaaatgtaatttcgtcaagcaacttcaattatagaagaaaagattaaagtaagaaaacaggaaaaatgagggtaataattcgttttacaagaataaaatataaactcacaggatgtggcatttggctacactgaaattttgataaaaatgaccctccaaacgatgttaggccactgaaaggcatgtcagcctgaacagctattgtgttcccaggaatacttctctcatcaggcccagactagacagcaacaatccaatacaccaaacaacaaagagatataaaaaaacagccttaatagaagcatcaagataaagagatcttcaaatattgatttaagaaaacttttgataagcaaaattgaatgtgttaaaacacacaacatcatgggaagatgacaaattatcataccattacaacaacaaatctatctgttgtaggctctggcccaatatgagctcctgtgacaaagaaaagaaaaaataaatcaacatcatatatcattgcatattgaaaatagaacaaagagaataaaataactttctccaacctgggtagtcacactttaacatatgctttataaatgttgttttcccagttgaatactgacccaataacatgaccatgggtttagcatcaaagtcactactagtctgaaaaaacaaatcaacaagttacaaggtgcttaatgaaaacacaatacatgtaaacagaaaaagagtgcatctacacctgtaagatacaacttacatcataagaatgagttacttaacacttggcattaatcaatccaaaatacgagtcaacttaccagtaaaggtgatacaaaatcattaaaacgata

SEQ ID NO: 194396 - DNA, 2660 bp, Cannabis indica
caatatttctattgctaaacacgactgaaaaatctgatagaacacaccatcactgctacattaactataggacaaagcataatttttactataatcaaaccatatttgaaacttcaagaacaacttccttgagtaactgttgagactatttttagtttttcatttacaagcttgttctcttgttttaaatgataatattcaatgttcatcaggactataacattttctataattgtctgtccagctcctgaaatgattgtgagtaaaataatcggagtacatcttcaaatggatgcagaaaataagattagaagaaatcaagtcatgtcatgatcattgaggaattcaattatatgtggataaacttgatttgcagcctgcaagtgaatgaaaaatcattgaacaaatcatcgacagtgtcaaaaacaaagagagatgggaacaatgtaaaaaaattttatgcaactaaaataggtttaatcagaggaaaatgaaatagactgcccacataccaaatgacttcccacaacatcatagtgagcgtaatgaggaccctcaggctctccaagaatcttgaacgtcagcatatgctcagggatgagcttggctgtttctgttccatttgtttttaaaagaaaagctaaatcatttttgacaaaatggatctcgataagggaacgttcatcgattgaatgtacggaatatatttttttcttaccataaacagcttctggaggacatataaggtcttgatctccgccaatggctaaaatagggacattggttttgtggagatgatccttgtagaaaaacgttccactcctatcacgtaagccacccttctgaaaagctgatgttagctgcaacaaaagcttggcaggtatggtacctgaacagcttatcaaatgcttattaaatagtgataaataattatttatttttttacaaaaataataaaaaaaaaacatttgcaacaacaatgaattgggaacccaacacaataggctcaacttacaaatggagattgaaaatacaaaatcaaaaagtttctacacttacaaaagttgttcaaaacaagcttttcgtacaattcttgccgcatcatctcttgagcagaaatttgagatttcagccaagacaaaagataaggaggataggatgttaaaggatgaatagctgaaattattgccccaactggaattgcaggaacatttagagcttgtgcagggtctgcctgcagtccagagtaaagcaataatttcttataccatatttattttattagtagtactaaagtaagtgagtcataataacttcattttactcaccaagggtaaaagtaatttgagtgatgatcttgaagacgtgtagtctagtgatgatgccaaagtagtaactgatgccaatttgcaatccttctcctcagaaccttaaaaacgcgacagattatcacccgataatatttagtcaaaagaagacatattacggacaaactgagttcagttttcacataggtcttcaccaataaaaattcaaaaggcaccaatctcaattatatgagaaggagaaaaaaaaatgcatactaattatttagtaattgcacagaaaatgtgattattacagtaaactaagattgtctctatttcttgatgattagtgaattagaggcaaagttggcacctgtaatgtaagtgatcttcgaggttagaagactttgaaccaagtacaagaattcttgcatttttgtttaccaataattacttctcgaaatttagcattgcttataatgataaaatgacattaagaagcttagttatagtactataatgtcatgagatagaacacggtgatgtcctaaaagtttaggacattaaaactccagtgtcattgagaaattgttgaagctcatttggggtgagtatgccaatcaatgtttagctgaagtagtgagttctataaccagaccatataaaagccagtagaagcagtttctgcaccatcctttagacttagccttagtctgattttataacatttatgtaaaaagagagttccaacatgatgaaggatcttaacatctaaaacactctggtcagttacagaattagacagatgcatcaaacaggtagtcaattatctatattagaattcttcatatgtccctctgttgcagtcttccaatactatcagaagtcatttggatgtctgatcaaattggagaattagtgaaaaaaaaaaaaaaaatctaacaggttatcatttacaaagtttaccaaaaattgtttattttgagcatgaataattagtgaagagtttttacaatgagctccgattttatcaaagacattagtactatttcacttagttaatagtaaaatcccaaagattatgccaactgagtacaatagaaaactgaaataataataagaatggagttgctccaaagaatgtaactaaggtaacgaatttataggtgattgcagtaaaagttagctttggaacttacagcatcgagagatcatcgcatacaacaaaataccgcccattgagtgaccaattgcatgcaatttgccatcttttggtttgcagtgagctcttatgtactccatctttgataaaagaaggaaagtttcagatatattgaacactactaaagtaat

SEQ ID NO: 194397 - DNA, 3052 bp, Cannabis indica
tgtgattctcgttcgagacaacgtttttcatcgtatgcctcgtcagcaggaccttgaactattcagtgcaattattgttatttattattattattatatcgaaggttgtgtggttggttacgacatttgtgccaactcaactcaacagaatgcaaacactgttcatcttgtttacgaatgtaatgaaatttgctttcttttattgattttttgctatattaaaatttcaatcatgaatctggaaaaggaaatcgttctcagcaatgggaaatagtttataaagactttatgtagagatcttacaagatgaccatgaaaacattctttatgtggaggtctcagcaatatggtatcaatataaagttcatagcttgattcaaaaatggaattgtgtggcatatccgaccaccagaaaccatacaggggttatcgaaatacaaacaattgctgatcagcagagaaaatttaacaatactgattgacaacagaaagaaagcctgaaaatgtcccaagctttatgtttattgatgacaccatgtgctataaatttaacaggcatcaaggtctcggcatggaggaggtttgggctcacttaacaaagttgtgtttcctccttctggtccacatttagttcgtcctggattttgagtgccatgctgaaagatcgagtatttcgatttggaaaaagaacaaaaaggttaagtctttggcattgagaagtcccagctaaatggcgtaaaggaaaatgaaataaaagactacaccctgagccaattttcttaccggtggcttctcgccctttctcaacttttcaactatctctacaactttctttggagtaacatcttcctgaaattgcgaaaaaagactaacataagttccgaaagcttctagtatgaataaaacacaaagatcatgctggtttagtaagtatcaaggacccacaaaatagttataagtatatccttcagatccattggagtagtctgccacagtgatcatgggagcatttacacagcaaccctgcataaagacaaaaggtaacttgaattaagcacctatcattaaaaaccactgcaaatctactttaaaagtgggaattaattcctcagaaaggaccccagttcttcaaccaacaccacaggtagcaacaggtaatgcaaaaaccaataaaaatgtaatgcgtgaaaaaaatctggaaatctacaattgaactggcattttttgctatgaacttcgaaacaggactgaaggtttaaatgatcatagttaatctagaatatcctctaatgaccttagtgtcatgatggagtggaactccttttcaggtcatattcctcaattttttttattccaacatcaaccataatatagacttaagtgaggaaggtagagcatgaagatattcaccatgcattccatttctccaacagaaaaataatccatccttagtcacttctgcagatgaaaagccaggatcattgttagtatgctaacttgattttttatttttgtaaatttcaaataaaaaaaactcctaacaactggctagcaatacacacaccattccgcttcactcctaaatgcttcagtaaggcatcttcaatatctcgtgaaccacggatcatgcatggtgttgtgccacagaccaaaagatggtacttacccacctgaaaaacatagaaattttgttcatgtaattaactctagtagaatagcatcttcctgaaagtgtaatgcacaaatatgaaaatacaaaaaatacattcccacctttgcacgattaaacatagaataaaatgtagcaacttcatatacacggatgggagcaacttctataaccttagctacctgaattatccacaaaaataattgtcaataaagttcttttcgtaccacatttcttaaggaaatgaacatactcaatagtagacaataaaatacatcggagaaagttctttaaactttaaagtgtcaatttaaacatactgcatccattgctgaaacgggtaaccatcctccatgctgttgctgtgcaagatctagcaagggaataacagcggattgcttgtagttggacggatagtgtgaaattatctccttagcctaagcatagataggataacattgtgaaaaccaaatttttccaaatcataaacccacaagtatgcatatacactcgttacagcaacatatgggtatgcacataaaatatgtttgtggacaaatatagatacaaacacctacctaaaaactgtatttctcaggaaaacagaccaaaagttaaattcccagcattgaaatcgtcaacttaagatggtggtgataaagatttcccacatttcccttttcccatcaaatgtattgattctaacaattgtattaattcttaaaaattgttacaatcgaatttttgataacagattacagaggcagacagccttaaacacgaacagtaaatgtaccccaaaataaaaggttctagtgttgaacaattcgaatattatgcaacaatgaaatggaaattttcaatctttgggcatttaactgagcccgcacactcacatattacaacttcaataataaaatgaaagaaattagctttaaacattttcactcaccttctctttgtttgcagcactgaactcccatggtaggtcaggtttgttgtctggggagtcaatatgctgttcaattcccaaaaatcatgaattagtcatcaatacaaacatatataaatatacaaatatgaacatgtacaaaaaagatcaggaattgaccgggaatgaaaaatggtactcacataatttagggcagtagagaaggatcgcgatggctgcccaaacaaacaaacaaacaaaagattagaaagtgattgggaaatgggaaagtggaagaaagcgaggagaataaacaaaaacctgacggaaaatctgacggatctcatggaggcgattggcagcgagccgagccagcattttgacggagcaaaccagacaagacccgacccagttgagagaagatgaaaagagagagagagaggagggggtgg

SEQ ID NO: 194398 - DNA, 2613 bp, Cannabis indica
aatcaagagttgcatcgtcaatgtccaacactttcagaagctttaaatttttgaacaaagcaatcaaaaagtgtagaccattccactggtcatcgtcattgaagttttggagaaagatagagcgaacagttgtgcattgttgaattgtttttataatagtttgtggtatgcttccgtggattgacaagcggcgatgtttgtattctccaaattcaaatttattttttgccaaaatttggcaaaaacctaaatcttttactcttgatagaatgaactcatgcatcaaatcatgcactttacaccccttccctcttccatacattagctcaattgaaactaaacttctttcaacaagctcattcaagtatcctttagcttcttcctctaatgactttctttcccttgcttgaacaagaccctctgaaatccataactgatataatctttctttcttaattaaataatcttctgggaaaataccaaaatataataaacaagatttgaggtggtaaggcaaatcaagatagctcagagagaggatttcagaaattcttacaagttgaggatttgttctaaactcgaaatcgatatcattaagaacttttctccattcagattggaccttcttctttctcgataataaaccagctatagcccctattgcaagtggcaagccttgacattttttcagaatctcatgagataatttcaccaactcctcagggcagcaacccttaaagtcatgtttaaatgcctttttacagaatagctcaaaagccatactatgagaccaaatttccaacctttggatagcatcatcgcaaggggctactgtttcatttcttgttgtgataataaccctacttccattatcattactaggcaaagcatatttcatcttttcccaaaaccctgcatcccaaacatcatcaaaaataattacatactttttggtctccaagtgttgatggagcggtgtaattaattcttggatcatcgtatcataatcaaaagatgtgcattcagctgttagaccaatctgtttcattgtgcccttcaatgaagctatcacatcatacgatttagatacagtgatccaagcatgacaatcaaatttgtgtttcacctcatcgtagactttcttaacaagagtagtctaccaatgatataatcatacgtgcagacattccttctaccaaagagcttttcaattttttgtgagccaaaggaacatccaagtattcatcatcttgctcaagaaaatgagaaccaagtcgtgtgtcttgctcttctatgcacgaatttttgctagttgacccttgtactctctgtagggaatgacccaaggcgaatcctaggccagtctctttgattcttcgtaaagattgattaatatctttaatatgcgaagataaaggataacgagactttaaagctttgattcgaccacctattttgctgaaaaagccaatgaatccactcttgtcagtagcaccctgcgcgagatgccatcggtattcatcaacaacatcctctatgtgatcagcttgttctctgagctgtcatccagattttcacagcattactggctaactccctctcatctgtgtctttgaaaagagactgaatgatctcgagttctttctttaagctttcaacttctttatggacacctttgaaggatctaacttcgtctttaagtagctgaatcaagctctcaatgactggtgttaagaacgtctcagccattttcgtctccgctgctttattacaatataattcccctagttaataacaagttatttcagtacaaaaccattgaaaataaataaatgaaagaaatatattttgggataagaagttacctgtagaataagaagagatagtctttttcagtgaatattgaagaaataactggacatgcgggagttgtagcttggcagatcaaagaaaataagatagtttacaagatgaaaggatatgtagaggaaaggaaaggaaaagaaaacaaaggtatggctattgttacaaagtgaaaggagacttgcttttcaaaactgggcttctttttttcttttttgaagtggagttagtatgatattcattttttttatctacaagacaaattagtggagtttattagtatgatattcatttttttatctgtggagaatatgactttatattactttttgttagttgtaatttaatatggataaatcttattaaaatccatactaaatcgaccactcagtgattatattcgttgttctcgtgatgttaatgaataaatattacatagctaaagagaatcctatgttaatttctactttctcgagtagtaaaaacacaatctacacgtggagtggtacagacaatattccaaaattggtgctaaagccaatccaattgagtttgattaattaaaatatcaaattttaccaatcgaccattcacttgttactcgtaattcactaaaccccatacatcaaactcgattttagtgtttagtaaatgaaacattatattataatacattgaacaaatggacacttaaatataacaacagatcgatctcagtgcccactttgtattgagattaaccagacagaa

SEQ ID NO: 194399 - DNA, 632 bp, Cannabis indica
ggccaagtgatgcaccatattattgtctattagatacaaattttaagatgatgacttaatagtttagtcattctaaaaaattaaataaaattttagttggcgaagtgataatataccatattttatttatttatatttctttaatttatatatttattattattttttaaaggaatttatattctttaatcttttaaaacataaaaggctaagaactctgcaagatctttcaatgtataatgtatagatattccagtaacagtggcagggatttcagtgggctagaaatctaaggagaaaaacaaatttaataatgaatttatactttgggaattattttgtataaaatagtacactaataaaggaggttgttattagttggttgaagcttcatcactgttggaagatcatagtggagactgacagtacagccttttggtcttcaagctgtcccaaagtaatatggagatgatctctttcttatttggtcaaatagttcttgagtacgtgtaaggagtttgttgagtaattcttttttacattttctcaaacgttctaaaaattgagttaacagtcttgatgttatgtccatcgtatatttttggaggtgaatgcttcttttgaactgttat

SEQ ID NO: 194400 - DNA, 1345 bp, Cannabis indica
aattactaattagcctataataaaataattttatagtttgtttggatgcaaagaacacttccctagtaagagattgattaaaatttaaggtaatatccttcactttaaagtttattcatatctcaagacaagaaagcagaacaaaaccataagcattgggaaggatccaacagacaagagttgttccgatgtagtaagaataagctagtgaaatctctgaacaacttgaaaagtatttgaggcaagagaacgctatctatctaaaaggatgtctgtcaacacaagatttcatggtatcccaaatgcggtctttcttgtaacttgtcaagaaggcagaagaaagaataacaaacctcatgttttctcttcctccgacttaaaaaggccaattcagcataaacccgtaatgtcacaaacatggcctccttctccgccatttgtagtccctcattgtctccacgagaagatcttctggccagccatgtgagctgtagaagacgagattggaacaagaagaatgcaacttttatcacccctttcacttatttgtttggcttcaagccaaccaccaaaaaacaagttttgggctttatgaactgtaatgaaaatggattaaactccagcataagaggtattgtgtaggccaaagttaagagtcaaaaaagcatgatcattgaaacgaatgaaactacgttaaaattccttctcaggtgaaagatctgcaacactgaaaaaacacaagcaagcgtgttggagaaaatagctttgatagtctccgcatctgctctcaaaatgggatcttgcacttcattgcagacaaaagcagtcgacaccaactccagtgtttcaaaatgaagagggtcagatatcccttcagtagagctataaccaaatccaaccatgcagagttctcctgaagactctgaccaaaatccacttagactgaatttaaaccatggagagcatctaccaaattttacagggtcaagagtaaagacgattgtaacgtttgcagtctcttccagaatagtgtgtaattccaacactcgtgcgaagtgtcaaagtgcctcgaagattatgcaactacaaagccttagaattcagcttcatggacactccaaaaaatgaatgaaatagttttggagggctcctgtagaaacctttgttttagtcttagattagtgtcgtttcctctggtacggtagaatctgttagagagtctcacattgccaatgtgtggaaagataatagaatatataagaggaatgggctactcctcctatgcccaattggttttgagattgaaccctatgattcttaacctggtatcagagcaaaacaaacc

SEQ ID NO: 194401 - DNA, 1231 bp, Cannabis indica
cataatctaaccgttcaaaacctcacaaaatggttaaaagttgatatgaattagatagaggtgatattttgttcctctttatatatctcatgcatttttttcttctcattacactaaaaaacacttggcttgaaagagtaaaaaaaaaaacaccttcttcctcctcttgtcttaaatccaaaaccaagaaaaaatggttgtcctagaaacacctcaagcagattctagatctcttgaaccaacttctagcccaaggatttcattctcagctgagtttttagatgataacaacttcatctctattagtccaaactctccaataatcaaaagagaaatagtattagagagtgaaaacaaagctcatcaccaccatcgtcataataatcatcaacaaagtaaggcacgtaatccagagtttgagtttctctcaaacaacagcatagccacccacaacaacatgataactgcagatgagcttttctttgaaggtaaacttcttcccttttggcagatgcaacatgttgagaataagctcaacaagctcaaccttggaaccaaagattcagagggacaacaagaacaacaagaagaaaaagatggaggaagaggaagaagaaaggttagtgaagaagagagtaatactgatactaataatactaatactaataatagcaatagaataaattggtcttttgttgatgacgacccttctccaaggccaccaaagtgcactgttttgtggaaagagttgttgagattgaagaagcaaagagcttctactctgtccccttcatcttcatcttcatcatcttcatcttcatcaagctcactagctgatatagcttcagctgatgaaggtaccaaggaagggattagacaaagagctgagaaacatgttaaggggataaggaaaggcttggaaagaacaagatcagccactattagaataagaccaatgattaatgtacccatttgcacacagatgaagactagcagtgctttgccaccattgtttcctttgaggaaaggaggaagattagagaggtgagaatgaaagagagtttgtagctaaaaaaaaaagatggtttgatctgtagtgttgtttgatatgttaaatctttttttttttttaattgtttatttcattttcaagttttcttatgttcctccattagaatgttaattaatgtggatctcaagtatcatagtgtaaattctgactttttagtct

SEQ ID NO: 194402 - DNA, 1901 bp, Cannabis indica
cctggaacacatatataaagttaagagtacagtttactctatgctgggatgcacaaagattagtttaaaatctattgtaaaactgatttgtcatttgaaaaactcaaatgttttatcaaatttaaataataattcagttttccattgcttatcaatttactcaatttagtgtacatgagggtcaaattttgttttcaatttacaagggttttatttatttatttattgctatttttttctaaaaaaaaaaaaaaagtaaaattccaacaggctcttaccagttttccttttcaacatgtggagtttcactcaaaacacacacacatgaaatatgtgttgtatttgcaagtagtatttacagattacagtattcaacatacgaatgatacacacattcaatactcatattttgaatacctaacactcaactcacactgtcaaagaatttctgcatgtttgcataagtgaaaagatattaattatcatctcatagtaaggctatgtttggaagttagattttagtagggaaaagaaaaagatttaggaaaatgtaaggaaaaaaatgtaaagaaagtaaaataatttttcatgtttggtatggaaagaaaaattctatggaaaaacatttgatttaacaaaatttttcataccaaacatgaattttttttttaattctccacacttttttttccctactatcttttactttcttcgccaaaatccaacttccaaacatagcctaacagtttagggctgctaaatgtgtaactttagagaggtagcctaacagtctgtggtttgttatagcaattgcaataattttgatccccaaatattgtagggtttaggccggaaacctaatttagcgcaagtgcattatttcaatgttctatcagatattgtttagataaaaacaattagtgaactatttttctctaagtttcactatttctaaggatagtttctaaagagcatagaacctataatataaattattttgagctttgatgttactaatactatttctctttttacatcatacatagaaaacacctttcctatggatttctgtaactgttgttatgatttggggactcaaaaattgcatttattgtttttttttgttgaatcagaaaattgcattacttcaacttcatttgcatcctacaatctgataattgtaatgtttacaaaagttgcacatattgtttacacacaattatgtgtaattaattttaaagatgatacagtttctacttttctattctgaaaattaaacagataccatagtgtgtctagcattatcgtttatatattaatttatctcttcttccagggatcgtcttccatatctagtgctgatcttttcggtaatggctccgataactctgcacttgatataactacaggtgatctcatcaatcgtctatctttccaggtaaagaccaattggaagttcatgcttaatttgttattatgtatacatatatgtgtataccattgagtagggattgcatcgttgcttgttactcatcgaatttgaatttcggtatttataactttacaggcacaacaggatatatcatcccttaaaaacatggctggtgagaccgggaagaagcttagctcgttcgccaccacttttattacagatttccaggacagaatcctgtgattttagtgtggtttttttttgtgcatttgttacagtacctacctaccaaccaaccactcttatattagggaatgtaaagaagatttgtcattacaaaaaaacaggatgaaagaaaaaagattcttttgaaaagacaccaaaataacatacttttggtattatctcaccatgctttgagaatgttttgtagaagagatattgtttgtgtatgtgttaaagattgatg

SEQ ID NO: 194403 - DNA, 572 bp, Cannabis indica
atatttatatgaaggtgtcttcaaatcaaatcttataatttcattttacttaaatgggattttttgtggtcttttctttttttccctttaagagggtcattgttatttatacatgtatgatgtaacaattgatttttcttttataaatacttctattttttttttgtagcaataaatacttctattaatacaactgaattatttggacttttgtttttcagataatgcaatttgatgaatagagagcaatacaagataaaataagccagtcaattaaggtgagagatttagaatgatttttcatattaatattcactagttattaatatgaacgaaataattaaaaaataattaattttttagtttgtgtttatcaaattttttcctaatacaatcataaacatccaattaagagttttagttagtttcatatgtttataaatatttaaaatcatatctagttattctcttaaaaaaattacactttacattgttttttttctttactcctctcctacctgtttttcatattttctaattttttgctaatatatgattattattattatttt

SEQ ID NO: 194404 - DNA, 1306 bp, Cannabis indica
ataactatctatgtaccaaaatcagacaaagaaagctttttgttaggatttttttcatatttatttgtatactttactattttctttctttgttttctttggacaaactattttccttattttcattatgcaatattacatatatttttccctgcaaaaaagtgtgatgaagcaagagttgatattgtacctggtcaaacaaagaagggttcaacccaacattgaaattcaatattcaaatctttaaagccactactgaaagctttactattaggaagcctccaccgccagagatctccatcttcaatatactcaaacaaaggtcgagcacgatcgaactgggcaagcaccgtgggattattactactaagactaaccctttccctgaagtaatcaaaggcgatggtggctccgctcctctgcatatcgatgattttagttacgtttttgtctccggggccagcgccggcgccgagggtctcgagggcggtcttgtggtggtccaaaattacgacattggggaccttagaagcgacatggggtacgaaaccgggagggccgacgaagtcgagaaggtaaagataggtgatttgatggagaggtaggtcttgagaggtgatggggttgtagacggtgttcggaaaaaacagggttgggattgaagcggccgagaagtataggtgggcggcgagtgcggcgaacgcgccgtcggggcatggatagtggtacagaactgctgctttcttaatggcggccattctttcactttcaatagactacaagcctacaatacaacaccctcaccaaaataaaggccctacaccaattgttttagtttactcaacaaaaaaaaaaaaaaaactacaaaaaatatgaaatattttttcgtttgtaacatttttattttttaattttttaatcaaaaaataaaaatgaaagtaaaatttttgtttttaaaaattttgtttttagaaaataaaaatgcgttctgtaaccacttttgttttaaaattttaaaaacagaaaataaaagtgtgttctgtaaaatttatttttatttttattttttgattttatttatgtcgggtttaagttcggggtcggattcgggttcaaataagaggtcgggttaagcaccagagccgtgggaaagatttgagtccgcgtctgatcgaagtccaagatattgattaagaaaaaaaaaatctgtttaaaaaataattgaaagtgttttttttaaaaaaaaaaaaaatgattctcaattaaaaaattaaaaagtaaaaacagtttatagaacatattttgc

SEQ ID NO: 194405 - DNA, 1668 bp, Cannabis indica
tcacttgccctagactattctattatttacacttaattattttgaatatatatggattttactgaggttctatccttttttcttcttcttttaatcttaagatctaccatatcatcctttttgtctattaaaaaatgctttcatcttgaggtagaagtaggatatacgggaaattagttcctcttgagtgtaaggaaccgaggggtaagatggaaactgatttattaggttgcccaaaaactttactgacaaagaacaattcaacaaaatatacccggtttctcttctcacctcacctatcataattaaagctagtgaaaggtttatctggttggcgggaatgaccaagttaggtaattttatcttctcttgatatggataattaattaaagatttagtaggctagcaacataatagaattgttcctttcaaaaaatgaaaaatgaaaaaaacaattttttttagaattgctattttctttcttagctttcagtttccttttccctctttactttagtgcttgttcttgttatactcttgaatcttagttccttgtaattgcaattgactcacaatcatcattgttatgtttgtggtttaatttgattaggaggctcttattaatgcgatgaatgatgagctccccagattacaggagcaagtttactatgggcatataaactcacacacagatgttcttgacaaatatctttcagaaagtggtatcagtcgctataatccccaggtgcagtgatatatcttaagagaaatgtaggaataatgttatatgcattttaatgctaaattatgtaataattttatgtagattattgctgatggaaaaccacgtttcgtttctatgtctgcatccatccttggagaggaaaatgttttaagcaatattaattacttgcattctcctgaaagtaagtttctctaaagttgaatcctttattttccttaaaaatcttgcttagtcattcttgataggtgttttatttgatcctttgcagctgttgacgatttgaagcctgtgactcatcttctcgctgttgacgttacatcaaaaaatgggttgaagttgcttcatgaaggcttacgctatctggttattatttatgaccaagaatatgcatttctagctcctcttatatcatagcacatctatcataattgagttttaatcactgacttcattagtctcttgatttttaatcatgcagatggaaggatctaaacttgctcgattgggtgtgttgtttagctgcaatcatgaaactgatgcttatagtctctttttcatgaaggtgtatgaaatcactgcttccacatataggtttgtttaatttactaaaagcataatgattaattacgaatggtatgcgtggattattcaagtactttgtcatgtcatgtattgtgcagtcataagttaaaagtactaaacttcttggatcaattatgctcattctatgagcataaatacctctctatggcttctggagctttggggaccactcaagcctttattgataaagtctgtgagcttgctgagcataatggattatcgtccaaaatataccgtgctgctctgtctgatttttctgctgaagatttgaaaaagggtttgagtaaggtaaagatttttggcgttattgatctttgtat

SEQ ID NO: 194406 - DNA, 3799 bp, Cannabis indica
cctctcaacaccacaagtatctccgaagcagcagggtgagtgtggaacgggatgactcctttgggagccaagtcgagcctagccatggacaagccgagaccgttcagaccagggaactgagccacgaatgctggtgttactgcggcgctgataatgttggttgtgtttccggacattttgaggccatcgaacacgaaatcgtcgactgtgacatcagcggcgttcttgcatggaaagcctgctggggtgtctgaggctttcacgtcagccacgcaaaagtcctgagtcagagcgtttgaggtggagaataagatagaaactacaaggaagataatgtgaatcatcttcataatataactagatatgctatattaatgatgattctgatcagcttttgttggtatgagtaataagctaggtgtggtgtgtgtgtatatatataataattatgtgcattatttgggcaacttgatgatgatgaggccattcgatcgatccacaatggaatgaaagatagccacaagtatataattagaaagatatagcaagagcatattattttggtgccccatgctagtttggatcctcgtgatcatttaagaggaagtttctaatcatgatcacgacatgcaaaggtcccaaaggacgatcattattacatatataatcaagcttattgcatgttttaattaaatgatcattgcccaactgtatgaggaaaacgaaagataaacatattatacggtgtgaaattatatatatatggtgtattaatgaataatacatcgaggatatggaaattgtggtccaatatggtcacatgggaagagatttgagacttatataagcagacaaagtgacagctaaaatcatagtgggaaccatttccttactttttttagtcactttcaaagtatttcgatggatttcgtatgtgtggactatagaggttcccttccggtaaggtttgataaaaatggaatattagagcgcatgccacgtacgtggtggcatatatatttatatatcgtatatattacatgtcataaaagaccttagctagcatattaaatatatacaattcagatttaacttgggaaatgttcatatgaattaataaatatatcacgatatagatatcgtcacgcacgtacaaacatatattatatggctttataattaatcgcattaatcgttacactgtttctggaataagacaggctgagagcgttaataataaaatgttactattgacacatttcaatatatgtctgtgagtttttgttttgaaatttataattaatatagtagataacttatagtaccttattaactatgagtctagctagctaaaaaatcaggggcattcgtacttgcttctgagtgaagtttttctttgttataagataattataacttgactccattaattggaatatgtcctagtactgaaatatgccagtccatttgtgggttggttccctttcaaagctgcaccctaagattccagaaccaaagtagtcattaacttgtagccaaataatccctttactctcaaatggatcagtccactttttctgtggatcgagtttccctttaatatattagctgcaaagagtttatataattaatcaacatatgtaatcagaatgatatatatatatatatatataaatgatggtgagcttaattaaaatgattcaccatatcatctggtaatttttactcgttttttcatttctactaaattgtgtattatatatgctttttaacttgagacaacaaaaagaaaaagaaaaaaaacgtttaaaactcattgataaatattaattatcatgtatatatattcgttttttttttttaatattaattatcatgtatatatatcttttcaaattaatatggttagtataaattagccaaaaaaaaatggtataaataatgtgcattaattaatctaaatgatcattattaaatagaaggacgaaatggggtatgagaaaggagaaagaatcttatctatatactattaattaattaatcccaagtccacattttaaaccaagatgttttgtccataaggttctatctttaccctggattggtgaagaaatagactattagtacagatatatttttttttttatgtggggtttgttcctagttctgtagcgcattggagttaaaaacaataaagctgaatgatcaattaaccagagtcagtcaactggtaggtccaggtttcaaaaaattttattgcaaaaagtgagtaaattttttagttttatttttaagagtagaaaaagcatttaaagaaaagaaccccacaccagtagaaaggaagaggcgctgagtttaagtcttaagtaatagtttcaagcttatcatgattactttttttcagaacatatttatgtaatgagacatttgaacaaactaataattaatgtataaaatcaataggataagagatagatataacaaattaaccaataggatctcagaatgacagtaaatatccctaacttgtattttacaagagtagctggatctcgtcaaaaaccaaaagaaggaaagtaaaagaaaaaagaagataactttttacatcatttttggaaaaagccacagcactataatacaagattgtgtttcacacagtcaagaaaagaagtctttggtatagtcaaagaagcatcctcaggtgagctttagacagtgtgcacttcaactattaattgttttaagaaaataaaaataaaaaatttacaaatatatacaattaaaaaaaaaaaaaggaagttttgcttaacatgggtagatgagtgtgacactactaatattggaaataggtgtgttgaaggggtgaaatgaagctaagatgagatatttgatatggattcatgaacataagggtaaagggtgagtgagttagttgaggcacattaaaggagaagggaaggggcatgtgttttggggcagggtatacagaggtccaaacagtcctcacctcagtgcacttgtctgacactttgctgccaattgacatccttcaagaaaaaaataaaggaaaaagaaaaaagtgctttcaagtgcaaccaaacaaatccatacctccttgtaaccaatagtttttcctttgcctcctgtcctgacatcatcacttacacttatcttaatgcctccttactaccacccccttagcccaacccagccaactcccctttcattcaataccattttcttcattggaatatttatttatttataatagaaattaaagggaaagagaaagagaaaatagggatatgttttgttttgttttgtttcatttaatacaaattctttcttccaagaaaaataatgagcttggccctatataaaagtgttgtgtagtaataaagtttgtatcagtaaaaacaatgttcataaatattaaaacaagtcctaacaatctgtaatacgtgtaagataaccatattacaagctctaaattttattccacctgcgaccaattaatttcaagataaactaaatgtcattctaaccttaactactttctaagctaatagtttttgtagagagatttcaagtcggttatatagatttgacagcagactctatatatacctgctgtcaagtgtggtttaaattctctatagtaattgtagaagtggttctataacttcttagtcttgacctccaatggaatcttcaatctgatcaaacaatgatataatatataaatatatctatatatctctgtgtactgctacagctacagtagtcaaatatatttgtc

SEQ ID NO: 194407 - DNA, 1541 bp, Cannabis indica
cgggaagataattcgaaattgggacctcataaaaccactgtatcacacttttacctctatcgacacttttttttttggattttttttcttttatgttttgtgttataccttaaagttatggtaagttacattgcaaaagaaaaaaaaagttacagtaagttgcacgttttcaaaaaataaaattcaaaatatatagttaattatttgagtcttatttttaccattataaattattcaaaattttataaagaagaagttgataatatttttatataagaaaaataaaaaatgcgtaggaataaaagtcatgatcctacctgaaaattttcttatatataagagtctttaagttgtcttgtatttatatttctgaaataatttatagtattgttaaatttaattaaaaatattattgcattgataatatatagtaatcaatatatagtattctcttcttcttattattattattattattattattatcaataattaacattactaacaattaacaaattattatttcacagagtgtttcgtataatcaacaatcggattggacaggatttgttgacaatgctacacaatggcaaaataaaaatttgaactcgatttggatggagattgagaatggtcatcctcttgtgaagaagaagaaaattcattagtacaccagctcatggggaaactattgtaccatgaagttatggctaagaagattgatggaggagatactgctaattattatcattatcatcatgttgaagatgatgaaccagatactggtaatagtgttgaaattgatgatggtaaatttttaattagtgatgataatataaaaaaagatgaggaagccattctgaataaagttgttgaaatggggtttagcttgaacaacttaactgaggagatattgaaagtgaatgactataacttagagcattctatggagtatttgtgtgatgattttgtgggatttaatgcttgaagacctctttgagattagagctgagaggttaattgatcatctatttctactccctaatatatgtttcttcttttatctttttcttttcaaattgatttttgatgtgtttggttgcaggaatatgtgaacaaaaatgaagaaggaatccaagtgaacaatctgtggattgtgcattgcagctgctagatactgaatcatcataaataaagctagttatttagttaatttgagaactttttaattagtatttggttatgttttattctgtgttttttgggaaaataaaaggcacaacttctttcatgttctctaagacatttgtatgtagataattcttagtaaatgatctccttgctaattctaagtctttgttacttaattgtaccttaaacaatgcataattaaggtgatcaatattgagtattaataaatagcctacacttgcttaatgcaaccccttagtctctttgtatggccaaagacagcactcctttttccctaacagagtaaaagcccaaaactctcaaaaatatcaactctggactcaattccc

SEQ ID NO: 194408 - DNA, 1407 bp, Cannabis indica
ttttacaagggtcggtttgagtatttacttgaatcctttattctcatcatcttttttttttttttttgggggggggggccttcctttttgtgctgtatttgtcttagatcccagttggtgagcgtttagtggaccactttttccttttttggaccaatagggagggataatcagcttccatcaatcaaattgattggagtatccatttgttggcccggatatacattcataaatgataggtgtcatcactaataatgatcatttctagtgcagtatataatcatcttgggctgggtgacccaatccatatttcttctgcattttaaaatgagaattggtaaacgactttcattaaaacctttaatatcactattagtgtaatttaatataagtctcaaataatttaatttaatcactattaaagggtatcactaactatgaagcgtggcctgtagataatattaaacactacaaataatcaaatagttatactaaataattagaatataaatgcttactaaaaatactcaaatttctaagttaggttttacaaataaattaatgtatagttctaattttatattttctaatagttatagctatgtaattttattattataggtatatttgagttttattatttattgtatgtgttttttttagtttttcgagtcatgtcgtatagtattaaatttctatatacatatatatattggtagtgtgttatgctgtattatgatgcgttctacccaaatccctatatttttgtatcaaattatgtttgtgtcttttaaattcgtgttaatttcatgtcttatcaaaaagccagagaattaatcaataaccaattttacattttaaaattttgcattatatatagaatttatatgaattacaatttgcggttcttatgtattattttcaaagagcaatttggcactttatttattttttcttaaaaaaaagctcttaattttcttttagagatttaattaaaccagtgtaatacttatctaaaccaatgcaatatctagttaccaaaatgttattatggagttaaaatttggtcaaataaattaattgtactgcctattgtaccatttaattaaaataagactaacaactattcaaaataataataattgttgaatcatttttttaaataatctattttattttattctttcattaataaagaataaaaaaaatattaagaactagacattccaagtgaagtctttcacctcatctaatcccaaataaagttattcacctctataaaaaaaaagtttaaatgaggtcattcaccttaaaaatcccaaatgagatcatttaccccaaaatatcaaagtgagttaattttccacaaagttctctaagatacaaaatttttgaacattttaaact

SEQ ID NO: 194409 - DNA, 2025 bp, Cannabis indica
gagattatgaggttaatcccttcttttatatgccacgtgtcacaagctcaggaatacggataacatttacaccccaagcttccaggactcttggagatccgagagcttgcaatcttcttccgtctcttagataagtttttgacacgtggtaactgttgggatcgcggatgtaccccatgagctgtcatcaattaaaggaccataaactgaaggtaccacaggcgtggcacgcatgtggcgcctttagtgcggttgttgacaacacgcgcgtgctgggggcgcatttcttgggagaagttgcaatgatggtaggacgattgaaatgacctctcctttaatgcgtacggtactcgaggcgtgtaatgatgaagaataacgctaggggtgagtttgtaatgtcatcttttcaacttcccatccatcggatcaagttgtgctttttggaagaagagatatgggtcgtccatttaaaatcgcaaggatctcggtcgaagtataaatggatttgccaaacccatttcttctgttttcatcacttcagactctcaaaatatccattttcaaatttcaaacctgaacttcctattttccaaaaaacttccttttcactgacgtcttcaatagtgaatgcaagaggtcttcgactacttgattcaatattttctaaatcaccgttcagcccgtttcccagacattaagtcattagacctcgaactgttccacccccagactaacgaaagcctcgacgctcaaaccggcaacgatcgtgcaatcgactgggttctacactcttcggtagatttccacgacaaccttcccaactcatatgacaagtatcctaacgctttgttgactatttgctatttcgtatctaagatagaaatgcttagttcaagctaggtctaggatgtcttgcatgtttgaatggtaaaatgttgtccgtagagattcatttctagaacaggattgtgtgaaaattttgtgcgccatgagggtgctgatactgtatggaaagctaggatatggttgtttgtactccataaacatttgcatgtttttaagatactggaattagagtttgaacttggcatgacaaacttttgaatgaacactaaaccaatgtattttcttcacgtccatttggagttgttaagacttcgaatggccttaatttttggaatttaacaactatgtctttcccacacttcagagaatatggcagctttattggctgggaggacatagtcttatttgctcgtggggaaccttatagctgctcactgaatggttgcacccacacatacactttttaaggtatgttgttgtatactaactgtgattttgattttgctatttagagttggcttactaaccatttgttcgttatgtttgcagatactcccgaagcaaaaatgttgaagtcgttgagcgacaagataacgaagagctttgctaaaacggagggctccaaaggtaaggagaagggcaagactaaggcctacaggacctgtaaaccaaggcctccgtccacctcttcttctttagatgtccgagaagttcctcctcctgcgaaggctaacaccaacgctccaagttaccaagcccttgctgaggcagacaaaactcttgtcgcgactggggaggcttctagggaactggttgtgtccgagagtggcacagcccaagcaagccatctcacacaacaagctcaagtggaggctttgcttgacctggtcgtggaggggaccacctaagagaacactaggacagccaatgtctcgaacgagagcttgaattggcctgtgtttcccaaaaagggtgtttccgtgacaccgaagcgcaagactcctcccccatcttctgacaaggacgccaaaaaggccaagtttgttgcggatagacaacatttttcgggaggagaggggtgatgtttgcaaatccaccgctctactcccaaatccatcatcatcaattacaaccaaccaacaacaacagcaacaaaactagcaacaacaacaacaacaa

SEQ ID NO: 194410 - DNA, 1267 bp, Cannabis indica
tctccgattgggtcgagcgggtcgggaaatcaaaacagagaggaggttgggatgcgacgggctgagttccatccgaggaagattgaattgccggtgttcacgggatctgaccccgatgactggacctatcgggcggagaggtattttggcttgcaacgatttacaatcgaggaacaattggaggcggcggttctttgcttagaaggaccggcacttcgttggttccgatgggagaacggtcgccgggaaatcagaagctggggggaattgaagaatctccttctccgacgattcatgccagcgcacgagggaagcacgtatgaccggtttctggccttgcatcaaacaaccacggtacaagagtaccgccagcagttcgaagccttgacggcgacgatcgggacagtcgcagagccattgttggagtcggccttcatgaaaggactgaacgaggaaatacaggggactctgcgtttgctggaacccattggcttggagaagacgatggagttggcggaggttgttgaagccaacccaaaggtggtacgggctttttgagttgggccgaataggaatgggggcccaaacaaggtaactaatgttaattcaagtgggcccagtaacattaattccagtgggccacgaaattggtcttcttctaaaggaccaagtcaaaatgggcaagggaattacagcccaggaaattacagccgcttccctgcgactacagtggccagagacgcaccaccaaaggggtatcgccgtttgacggagtcggaggttcaggaaaagaaagccagggggtatgctacaagtgtgatggtccttgggctcgtggtcaccagtgtaaggctccggaactacaaatcatcttggtccaagatggttttgaagaattggaagacatggcagccatggatgaagctaagggggctgagacagaagcgcaggtggtggaggtctctttgaactcagtggtaggtttaacttcccctaaaactatgaaattaatggggagtgtttatggtcaaaaggtggttgttctaattgatagtggggctactcataacttcatagcttcttcattggtggccaaacataacatctctatttcacctactgactcgtatggagtgcaaatgggaactggacaggcagtaaaggggacaggaatttgtgttagggtacccattactcttcaatccatagatattgtggaagatttccttcctctgtctttgggaagtacagatgtgattctaggggt

SEQ ID NO: 194411 - DNA, 1521 bp, Cannabis indica
ttataatgttttactgcacaatataaatatatataggtatggttttggagcatatttcaatattcttccaggatcagaatggtctgccatcatgctcacatatgggttccctcttgcaattattggcatggctctcaaggtaggactaggagcttcataattttctttaattgttagctctgttaatccactcattatgtcaatttgttattagctactatttgtgaatatcaattgagattagaaatcagcaggattttgctttcatataacgaattaaactcaataattaactatgttaggatatgccaataaattgaagatagaaaaggaaagtaaaaaaaagaaaggaatgaactgagaaagagatatatttttgtttggaatggcctgtttaggccaaaaaacagtaatggctttttaactttgtgttgcagtacgcagaactcaaaccagtgccatgcgtgacttattcagatgctctacaattgagggaaacatcagctactccaattcttaaacaggtgcttttgttgaagtctttgtaaacttagttgacaataatttataatttacaataataattctgcatattttctggattatttgctttttgtttgaaaattttcaacttcactgtttagttcccttttctaagtaaactagtcctttgaggtctgttttacccaaattccctgtactggcctttgtcaattgttttcagttgtatttatgtagaggatgcagtgtaaacagtcaaaggctctagtttagtctattggtcaattcatagaatagattagctctttgatcattggaaaatcttcatgaatttatctattagaactgggtccatgcaaagcagatgtatttttggtggttggtgatgcaaattaaagttttctataaaaatggagaataagtaaataaggaccttattcttgtgggctgcttaaaactatactattctcgagtatacgggtccatcacttatcatttgcttttcttgatttataatatgtgtatcttaatctaaaaatgaataataatttcatttccttaaaactcatcgtccatttggtgaatagcagaacaaaactcaattgacatgtttctggcatataccttgttatactgtattattgattgcttcttcagcttctcatacataagttatgctctgtgtatttagtgtccattactaatagactgacctacaaaatctttttcttcatggaagatgtttcttacacagtggattatttttcctatgaattaggtcaggaatgatgtaatcagatatcgctatggggatgagcagcatttggaggaggcattgaaacggatattccagtatggtctggtatgttttccagtattctgatgctctttcttaggttggtaggaataatttggactgcctgatgtgtattaatctagcaaagagtgaaagccatatttagaagataagtaaaagataattggattggacaagcaaaaattgaattatcttgcattatc

SEQ ID NO: 194412 - DNA, 3036 bp, Cannabis indica
aaaaaaatgggaaaaaaaattaaaaaaatacaaaaaaagaaaaaaaaatacaatatactatgggccggccctttaaatatgaaattagacagatggagaatgttcagcagaatcatgggcctcctatttttgaattaccaacccctgatttctctgtgaattcagagggattggaccttatccctgatatgggacccactatagcccaaagtttggaaatcccccactcatggctagaatggagtttcctcctaagagttttgcaagctaatgatttttgtgacaaggcctgcagcttaattatgagttgtgttatctcggtgttgtatttcattcttctcaatggggctcctctagctcccttcaatcctaagcgtgggctaagacaaggcgatcccctatcgcctttcttatttatcttatgcagcgaggttttatctaaattaatttccaaggctgaaaacaggggagagttttcgggaatcaaagtgtcttgcaattctagcctatttttcaccttttttatgcagatgatgctattttcttttgcagagcaaactccctaaatgctaagacctttgctgaatgcattaccatctatgaaaattggtctgggcaattggtaaacaagaggaagagtggcctggttttttcttccaatactcattcagatattaaagcggaggttaaacggatcttggatatgaattgcttaagtcgcgaagaaaagtatcttggcaatccctttttcttctcggctagcaagagaaaggatttccactttattaaggataagatcatggctcgtttggaaaggttggaaggccaaatgtctctcttaagcgggaaggacaactcttgtggggtcggtttttgcagagtatccctatttattttatgtccacctttgactctgtgcaatgatctcgacagattagtaacgaagttttagtggatcgggaactcagataagtctcgatacagagctttcaaaagctggaatgacatttgccagcctaaaaactgtggaggcctgggtttaagaagatttggagatactaacttagctcttcttgctaaattgtgctggatgatgatgaaggaagaagataagctctgggttaagattctccaatctaaatactgctctcggctagatatctggaaggtggaaaagcaggctggggattcgagagtgtggtaaggaattcttgatcaggctagatctatttgcaaaaatggggcgggaattttggttggaaagggagatactgaattatgggatactccctggattcctggacagtcaatggagaagattaaggaaagttttcaatattctaggggacatagattttgtcaagtatctgatctttatgtggaaggcactagaagttggaatgaagatatcattagaagaagcttctcagcggaaatggcgactgcaattttgcaaattaatcctatcttgacggattcagacattctattttggaaagcctctaaatcgggaattttctctgtgaaaagtgcgtatggcctaagtcaacaaccgaggttcaaggaaaagaataggatatggattgatctctggaattcgacccttcatcctcgcctgaaacttcttctctggaagatttggtcagacttactgcctactaaagtccgtctaggtttggaagataaaacttgtgttttttgtggcttggagaatgagtcggccttgcatttattctgctcttgcagtgtcaccagagctctttggtttcaatgtaattggggttctcgcacggattccttcaattggtcatctgtaacagattttgggatgtggtcgggctaagttattggatgatgaggctcaatcttatctagcctgtttgtgcgatattgtttggcgtaaaaggaataacataatctttagaggggattgctgtaatttgcagaccatgatcaaggaaatcagagagagagcagcggagttgcttctctctatggccacgactgaggtgatcgcatttcaggatgatgtggtaactgaacaaattatccatcaggattttatcaagtatagtgttgatgcttctgttttgaattcgaaggctgggttaggagtggtggagttttcgggtgaagctgtttgagattggtgggtggctacagatttttgaatttgtttttttcactgggctttatttggtagatgtgtaacgtcataattagccatttatatattataagatataattgtaaaatatttattttattggtatatatataaaaaatgtgtgagttgattatagttgtcttatttcttcttcatatcatcctttttttaaaaaaaaaaattattatgtttttctaaagtaatatacatctaaaaaatacaatattcaattatttagagaacaattattattggtcaacaattaaatataaggaagtttttttttctctgtctttttttttttttttgaaagaagtctttttctcttttattaggaatcaaatagttgtatttatttgactttgaaacacaccttatttattcttcgccgtgtaaattattgaagcaaccttgcctggtccgattgattctctttccttttttttttcacaagaagcttctatatatagtatttattttcttgaagaattttctatgaaagaattatatataatttaacgtatgaattgtaatcaatattaagttagtcaaagtagctcttccaacaaaaaaaaagtttctagaacatcataattgtactctaagtacaattttctcaattaaaatttcacaatctagcttaaaaggtctctttgaacaaattgatactccaaggtacgtaattaaaatgaagcttaccttttgaatgcatttcaatgtttattatataagtaatataatttctaatgcattttttattatattctaattatattaaaagaaaaatacaaactatgaatattcaattatctagagttaacacttcagcaaaaattatctagagttaacaattattattggtcaacaat

SEQ ID NO: 194413 - DNA, 1019 bp, Cannabis indica
caccatggaacccaatcacagtcctgagctctctcaaatttgttttctcattctcaatctcactcgcagcatgacataccaccacagaactcaaccactacttcgcgatgaaacccagccctaagctaatgagacatttctggccaccgttggcaaaaatggaggccgcagttgaactcagagtgactcaaaacctccaaccctgtgatcttgagcctgtgcgctgctgtcctccagtcacgagccactcttcagagttgaagctccatggccccatcttatttgcttcaagtctcgttttgctaaataattttcagaaacgagatctactctgagagatctttcagaacctaacgtcgacattacatgaatggtcattgatatggttgacaaccaacttgcgcagtggagcttcgacgagctttgacagtaactattgtcaaggtttcaggtttgttttgagctattaaaaccactgttgggtagtagctatatatgtatttgtttaattatctttttttatatataaaggcataccttatggttttaaatagtcagctatagtacttactatatccaacggttttgcatagttgggaaaaatttttcttgacggttttttgccgtggcctattctacctagttttattgacaatcgaatagacgtcggtcttagaaaccgacgagaatactttacttgactgtttaaaaagtcgagaaaattcagtttgtagtgtatgctaccagatatcactagctagaaacgacaccgatgaagctactaagtgacaactccctcaagttctacattgagctcaaaaagacacaggtaagagtaactaattctccactttatatcacaacaatacaagagacaactatgttgttgcacaactaatacaaatacaaacaagattgttgaagaatgggttctacagatacataacaagaaattcaataatcaatatcattatgaaggagaagattccactgtgaacaattaggtacaaagctctcca

SEQ ID NO: 194414 - DNA, 1528 bp, Cannabis indica
atctacttttaaaaaagagttgaggttattgtaattaccggtggatttggttgcgttatggtgacacttgaaatgttattttcatatattttgtccatttatttatgcagatactacacaccacaaaatgcctttgataaagataccaacattcaaaatcattcagtcattttctttttcttttttagatttattattattattattggtatagattaatttatttattaggaaattatcttctatattactttttaattttttatttgagttttttgcagttaaatcctcttaattattatttcagataaaactctcagaattacttaactgttagcgaagttagagtgacatttattgccaacatagattgattatgtgtatattctggtaaacgtggcacgtttatattagtacacttaatactattatttaaaaattataaaaaaattatttcaacacttgtaatattttttatttattatttttatagttttatttattttttttaaaaaaaattaaataataatagttggtataccaatataaacgtgtcacgtatacaagagtgtacacataagccgtccatggtagtagttaaccggatgtcactttaaatttattaacaattcaatagtttaaaaattttaccgctaaaatttaaacttagagaattaagcgtacgtgaaatgataaattgagagagtttagccaccaaaaatttattttctttcttcatttttacagtttaaattgctctagtaatttctatataagttgctatgtaaatttagattacaatttaaatcgctccattaattattttgtaaatttctataaaaatacaaaaagaaaattattttaaaatgtaaaaaaaaaaccccaaatttaatttaatactcaaaaccacaaatttaaatagaaataaaaataaggtaactaatgttgtctgaattaatagataccattaaagaggaatatcatacaagagtgataagattacaaaccagaaaagccaatgccaaacatagatattacaaacctccaaattctaacacattccacacaaatacaactgaaaatggattatagacaataataacatttatatagtctatattatagacacagagagagtgaaagagtgtgtgtgtgtgtgtgtgttctgcatttgttttgttcttgttggttaactttgatcagaaattggaggacggccacgtccgatcgtgaatccccgagttccatcgggcattcttggtccaggtggtggctttggaggttcatgtggatgactagccgaccaactatttccatgacctgagagaagaaagtgagatacagaatgtcagattgtttaatctttttttttcaagtaagaagaatggtaattaatagtgtagtgaagaatctaagtacccatcccattagcaccgcggtgtttttgtcttcctgatctccctcggtttcgaactctgtgctcgtttttctgtttgtaagagtgggccgcatcctaaaatcatagaga

SEQ ID NO: 194415 - DNA, 1453 bp, Cannabis indica
caattgcaactgacctaatgtggtagtaaggttaaaagagcagctatcttctacacaagggcttttgacttcagtcacttggacatccatgcaatcttctatcgaattagaggaagctgtaccagtagtagtagtcataccaatcatatttagaaatccaatggttttattacttttttgctttggtattgctgtaattctctgatcaaaacaaaattatacatcaaggtctaatttgcttgagaatttggattgttaaatatcaaccttgaaatatatatttgcatatatgacttgaaaatgttaagtagtgaaaataggaacatttaagtacatataggcctacctttgagaaacttgccacatgacttggaagccccacttcctgcaagaagtgaaaacagccaaagtcagaattatgaaacaaaaacccaaaagccctactccatgagaccatcaccatattttgtgttcgtgtaaaattcagtgtcttctagtagagtttctcactcaaatgttcactactctatttagatgttcaaacaaccatattttagaattagtggcaagagttctgtagctcccccacctttcttccatgttcacaagcttcattactgttcacaaacaccttagtggcccatctgttaattaatttgcataacaaagtagttaatggcctctggtatatattatttaaaatgaataaaaaaaaattaagaaaacagtggcttgggtgggataaaacttgaccaattcacagatgcaagaatgggactatttattgtcaagcattgtcaacttgcctagttgttgcatggtgcacttgtattaaactatgcactaatgcatttactttatatgcaaaaaaggcaattcattggtaccactatgaaatatctaaacattttgttattattaattgatgcatgcatactccttttgtcgattcctttagaaaggaaacattttgctttagactggtctaatataaagtcctcaccttgaaagggccaatttcaattcgtaagcatccacttcatttttttattttattttcccattctcaagcaagttagtttaaatatctgtgtagtaaccgacttgtaaaggtttcatcttttttacttgctatgatagcaacttaagcacactatacattagaagtgaaagtcagagatactttgatatgatttatgtcacactcaggtcctaacaagatttttgttattttttattctatatttgagaggcatgttacataacaatattataataatgaagcaagttgatttgtgaaaaacttacgcgcaagatgttggtgggttccatacaagccccgcaagcacaacgagctgaggaaaacagtgattaaaaaatgttggtcacataggtctgttcaaatgaaactcaaaaatatagtgtacaagaataaagagtttatgtggagcat

SEQ ID NO: 194416 - DNA, 1429 bp, Cannabis indica
taaaaattaaatttttacctattaataacatattatagcatattatattatagtcacatatataaagccatataaattgtaaaaagtatatcattgatgtattcttgatatatatgcacttttttttccttcaaataatgcatggatgatatattattgatattttaccttcaaaataaaataatcaatagtgtgattgtttgctctaaatatacataagagtattgctatggggtggatgattggtcttaggttaaagcgagttaggtctgtgtttagtatttaaaaaataattctatttaaaattatacatatatttttttaataattttcaaaaatattatatattttttaaataaagggtaataatttttttttcttaaaacccactcaatctcaaagtcgaccttagctataaggcattaatgtgtctaccactactataaggtcacattgtcagttattttttataatttttattaaagtaaaataagtaggacccgatattaaattacaacaattataatattatatctcacaagaatgttaaacagatgtgagatacaatattaaatgaatatcctttttaacatttcttgatacataaatatataacaatataatttgtttttgaaaaaaaaaaaaacaatataatttgttttatatcaaattccaacaattttagtaaaagatttatctgcatatatttatttatttatttaatataattaaaatttagatcgacaaaatgattgatttctactttaagccatataaagttagacataaagatgtataattttagctacttaagaaacacataattgctttaattaattgtatataaaactcattacttctcattattgttatatcattcattcattaattataatttatgttagaaggtgggaaaagaagaattaattaattaattaaaatgaaattcattaatttcttagtgaaaaatctcattcattatatttcatgggtcctacatatatattttattccctcacaataaataacataattacaacaaatgaaaataaaacccatttatatatttatacataaatacaaattattgtctttaagtgtaaacttaatttattttttgttttttattttttgagaaaaaccaaagtttgaaataatgttgataacataattcttttggttttcatataatagagcacaattagtttacaattttcttaatatatatgaagaaaattattgtatactaatattactaattgtgattaattaaagccctaagaatctcaataattagagattatattaattattaatataataataaatggatgtttgtatttaattatatattaatggatgtttgtgttaattaaatattattctctcattttgtttggatgaaagtttcttgtcctaattttcaagc

SEQ ID NO: 194417 - DNA, 1042 bp, Cannabis indica
ttcaacctctcaactgtgccatcagctcttaatatgattcgatacacccacttgttgtcaagtacatgcattccatcttgataaggtacaagaatccatgtattatttcttttaagagcatattattcctctcccatggctttgttccataaaggattatttaaggccatttttaaagatgttggctcttttaaagagcagtcatatagtaattcagctacaagaatcttaggtttatatatgccagatttcgatctagtaatcatggtaggagatgatgttgtggtgggtagatcagaggacatagcagagatggtggggcagctggtttgagacattggttgtaaattggcattgacagaagtaggaggtggatttcttgaagaactaacattggttcttggtagggaattggatattgggagatttgtgatatcaggattttgtgggggagaggaagatggggcagaaacatgctgggagggagctgagatgtatctgtgagggggagtttgggtgggaaagaggccagctggtatagggatctgatgtacagcagtagcatcagttgctgaagtagatttggatggaaaaaattgagggtaagggaagcaagactcatcaaaagtgacactgtgggcaatataaattctgccagaaggatgtaggcatcgatatcctttatgagatgggctgtagccaagaaaaatacacatagaagtcctgaaatcaaattatgtttgttataaggtctaagtaaggggaaacaagcagaaccaaaggttttgagaaaattataatcaggttttgaatgaaaaatattttcatagggagatatatattggtttttctgaatagggagtcggtttatgagatgtagctgcaacaaaggcatcccaccaaaatgaaagaggtaattgtgcttgtgcaagaagagtaaggcccatatcagtgatgtgcctatgttttctttccaccctaccttgttgttgatgtgtgtgaggacatggatgtctaaaaatgatgccaagttcatagagaa

SEQ ID NO: 194418 - DNA, 1223 bp, Cannabis indica
aaaataattgttggaaacttactataaaaagttttagattgttactttattaattttttttagtgccatcaatgggtattacccattaaaaaatatgctttctatttaatttatatataattttgatttgattgatgttgtcactttgtgataagtttaattatttatttatttttttacttaattcttatttagtttgagtcattaaatttttattttttatttaaaaaattaatttagatatacaaataaaaaaaacacatttaacgattattaaaaattgaactgtaatatttatctacaactaagaattaaacttaaagtatttacgtggcgagttactcatattaaaaaatgcataataatttagtaattatattcaaaatattgggtgagtgtgtaaatttccctacaatttgcagttcctttgtcaaaaagttagacagaagatttttgttctagaaagatactctaatataaacaaagaagcactatcaaagaagttaaattaaaaatacttaaataatgaaacaatatatattcttttatacagatatttttcaaaacaatacatttggtagaagataaagataataatataaattagaagtcaataataattgaaataattaaatttgtttgctaaaataataataataataataataaataataatgggtacagtttgccccataaataggtgccacaccacctcaaaaaacatgtcacaaaagataatgacatcttccatagtgtgtagtgatgatgatggaaaataggataagaaaatgacccaaactcttattattattattattattattattattattattataccaaattcatatatataaaatacttgtattcaaagaaagagggttgttgggtatcattggtgtttgattctcgagaaaattttgttcattcatgtacacctgtctaataatgtatagaaaaattacaaaagagtctctttcacacttgcaaattatttcaaatcataatttttttctttttaggatgagaactatactattcaataacccatcacacacgtcaatcttagacaccatcacaacaacaactaatgtacccaagcaagaaaaatcaaatcaaatttctgttataaaaaatagggattatggggattaagacaaaactatcttgattgtaatttaaaaattttgtcccctatttttttatcttttataaattaggt

SEQ ID NO: 194419 - DNA, 2819 bp, Cannabis indica
tactaaaacttatattttgttcggctaaccagctaagtacatacataaatttgaattagcataatgaactgattaattagacttgtccatgatacgtcaaagttttttggactgtgcttcatgtaatacataagtaaattaaaacatgacaaaagaactctgagctttgtagaataatttgaggccccataatcagattccaaaatctctttttatatttaattgtgggggggagcaatgactccaaaaactttctttcatagaaaatagcataaatgcctttagatctgattagcttgtagattatgtgctggatttgctcacaatacaactcagccactgatacacatcagcttttaattaaaaataaagagagttaacaactaagtctaaagtctagcttaatgtggtggcttatcaacatctcctcattttttgaaaaaaaaaaaacttaggtaaatcctgtatcatatggtttccttttccatcttgtaaattgtataccaaaactagggaaattttatataattatcaaatggatgagttacttaggcctagttttttggctttcccaccttttattttaatattacgcttttgatctaaaaaaaaaaatggatgagttacttagcaggctccagaaatgcccgaaatgttacttgtattataagattttcttgtgttctttcttcttgctacattagaaaattatgattatttttcccgctaataagtgaatctatagtaaattactagtctttgcacttctctctctctctctcaaaaattgtttctgatataaatttttactcgcatcttgaactgcagaagaagaaactgatccatacaggattccaactaaacataacattaggatggctctattctggctattacaaggatgtcaagcgggtgactccttggtatttcactactctggtcatgggtcacggcagagaaactacaatggcgatgaagttgatggatacgatgaaactctgtgccccctagactttgaaactcagggtatgattgttgatgatgagatcaatacatcaattgttaaacctcttccccatggagttaagcttcatgcaataatagatgcttgtcatagtggcactgtactagatttgccattcctctgcagaatgagcaggttagttaaccagcacgaataaatataaatgactctgttaggagcaaataataaatatacggatttatgatcagacatcaccttcttcttaacttaatgctttttgctaattttgaatggttttcaagccctttcttccatttgcttgggaattggagaacaaaactctcgataatgtcaaatttcattgacaaagaaaatgtcaaatttctttcatgagcttagcttttcttatcttgtgatactgataggagtggacagtatgtatgggaggatcatcggcctagatcaggtgtgtggaaaggaacaagtggtggagaagttatttctatcagtggttgcgatgatcatcaaacctcagctgatacatctgtaagtataaatgaaattcaacctggtaccactttactattgtgatgagtgacttcttatgtttttgacaaaagatacaacatttgactatggttttatataacaggccttatcaaagatcacatcaactggtgctatgacttattgctttatccaagccatcgagcgtggacaggggagcacatatgggagcatactgaattccatgcgatctaccattcggaatacaggtagtggtgggggcgggattggcggtggcggtgatgttgttacaactcttattggcatgcttttgacaggaggcagtgctggtggtgggctaagacaggtattgttgttgtgactaatctagtatctatctgcaatgatatcttaaattgtcagttcaaacatgctgtttttagttactcatatcatacagtcatatacttcatcagttctcataagcattttgttttttttctgtgcttggaacaggagccccagttaacttcctgtcagccatttgatgtgtatgcaagacctttctccctttgatattttttgtattcatagactgatttatttacacatctactctattcttgattaatgaacgttttttttctggggtgaaataattagaactgttgggtgttttagtgagagtgtacctaagaatgtataaaaatttcctacatcaagccatctttgtaattaattcttacatttgtttgaacatcggaattaatgttgaagtcaattactatgtttaatagttggaataatagctattctatttgattttttatattttttaaaagaactatttctatttgattttttttttttttaaagaaactatttctattttatccgaataccctaatacctaaaaagaaggcacttgagatatttaagacaatttaaggaattaaaaaaaaagaaagaaaaaaggaataagtgagatgaataagtatccaatttttgtcataaaaaaatatgaaacaagtgggttctttttccggagctaccaacttgttgatacaaattatattttgttcactcacataaaaaaaacaaattctattttattaactttgaatagatgtgatggcacatatgtaatgtaagtgcatattttagataggcatatttgcattaaaacttccaacctaaaccaaaaacctcaaaaatttagcatagaagttcctaaccttctaattattttcaattttcaatctatttttttgctctaaaccaaagttacaagcataagttaaaaatttatgttaattttaaataataa

SEQ ID NO: 194420 - DNA, 2137 bp, Cannabis indica
atattatatatctcatcagaacttggatatattctttgttacttagtatgatattaatttcgtaactaataacgtaaaatcaattcaaattcgttgttttataacgtacttagccacgtggtaattaattaagttttttctctttatattattctgataaaactagaatttgtttcttaggacttctcgatataatgatgtatgcgtacaatttgcatgtgtatatataatcgggctatttaaagagtacgaatatgtataatctctggccatttatatgtattaataattaatatgtttgttttctgactttttattggaagttttaattattagtttttaatctcttctctctctatatatatatatagtctattattatatcttatataaaaaaattgagtttgaaagtaactcattatgaaaaaattaaaaataataagtattttaacacattttaaaatatatatattaactggccgcaaacttccattacctaactaatataaaaacattatccctccaaacctttacttacgctcaagtttgggaagttaattaattaatcatatatataacaaagacttcatatttcttgctaataaagatagtgagacaccaaataaaccagacatacaatatatatatagcaactaactatatccttttggtaaaaaaaaaatgactgatgatggtaacatttaattagtatataattaataatatttttttattacgaacatatatattaatgaataataactaccaatgcataatctttagtctgtggtggatggagtactgggcgcacgcatgtgggatggcccccataagtatgagaaaataataatataaaatttttggtgaccaattttattttttcttcatgatttatccatatcattattctctatattagtcattctaaattgtaattaatcttttataactgaattttcgcataacgtacatatataatggattattaaagcacatatatatttttatgtataatattttatacataatgacgatgatcgataataagatattatgcttatttgatatgtatatatacatacaatcatgctgtgctttagaagcgaataataaatatacgtataaagaaagagatagtcaaagaatattataatagggtctattaatcgtttatatactagatatggtttttcgatgcacacacataaattgaaacttaaaagcaaatattatattagttcagaacaaatattaattatagcaaagttatatatatatttatatgcatgtcatcattaggcatcaatcttttattcttttcccatttatatactaaagttgtaaacaaatgttcatgaaatataatccttaattagggctataattagatcatattgcattattaaagagaaaaatgtacgttatatatattagtgttttatatgttagctttattaattattataatcaatcttaagagcttaatttaagtagtgggctagttattagtacctaacgcgcacttgatttcaacagcagcttaaaatggatgattggattcgatatgccatataatctgtgcaagaaattcctctctgactaatgactagctattgttgggggtggggggatgagagagaggtcttaagattcctgacataatttacatatttttgctttaattattaattcaattatttatatattttgaatctttgaatggtgaaagaataagttcaaacattgttccgtaaatatcgaggtgatatccatttatcttagtgattggtctccttcttcagattttaatatcactttttattaatttactttttattatttatttatgtatatatgtttcatatgtatcagtgtccagctccctataaataccaccttctccacattataatttcgctccaaagaagaagaagcactcagctcgaaactgatatcaactcttcaattcctagctagctaccacttcttcatcttctcaaaaactctttatttctttacatttattaccatgaaatcagacattgaaaacctttgggtcttcgccctggcctccaaaacatgcagagccttctctcaagaaagctttgcatggctgcttctcatcgtgggcctcacc

SEQ ID NO: 194421 - DNA, 1036 bp, Cannabis indica
attacatatgagtgctttattatgtatatgccgactcttagggtttggagagccataaaacaatgagagaaataatcaatgaaagaaaaagtttgggataattagaattttgcatgagttcttttctatactgcttgataattctcagtttttgcacataggtttgtgtaatagtttttgtaatgtttctaagcatttagaatttgatgaacaattcctgttttaggatcaattataaaaattaatttcattttaatttctgttgctataatatctagttatctgtacaagtaattttcttgaacaagttcatttcttgaaacttaatttgtttttcataccctgtatttctttttcttttcttttttttcttttggcagttctgcttatttggtgagcaattatgtattcctgttgtatattaagtcaatccattttaaagttggttcttttctttgttgattctaatgcttttaaattttttctgtctgcggtcttgaagtataattatttatttcattggttgcggtttctgtttttttttggtaattgtaattaatttggttcatattgttacttcttttctgtatattaatcccatctgaagttagttttattttgatctgctaagcatattgggccctgaaatcttggtgtatatgccctttatttataacaaataagaattttgattgagatataaatattgttgttcctgtattgtatgttttggagagagagtgaaatgaaaatggtctaaatctataatatagtagctcctattagttttaattttgtgtgagcgttcataattcattgctcacaattttcaatttattttattatatttggcagggagttaggaaattcaaatttgtcagggcattttgtttcgaacttgagaagcttgagcatctgcagtatctgtatgtttcttattctgtttttttcataattaagcagttgaattagtgatgcttgcgaatattccttgtatgtgtttactttatatgtatctcacttttttaatttactt

SEQ ID NO: 194422 - DNA, 1538 bp, Cannabis indica
aaagggataattacataaggttattttttttaataaaaaaaatatatttttacgtttaaagtaatttttttttacaatttttacaatttttttaataaaaaacaacaacgaaaataaaaaagaaaattacaaaaaaactaacaaagaaaataaacaaaaaaaaaataataataacaaagataacaaaaaaatcaaacaataaattaacaatagtataatataaaaagaccgtatttcggtaaataaaataaaaaaaaaatcgtaaaaaatatttaaaattctatgattatcgtatttttgtaatttttttgttatttttgtgtatttgtaaaataatcctgaaatgagcatccataggttatatagtctatcactctataagagtataatattattattagtgcaatttaatattgaaattgaattctacttattttaatttaataaaaattataaaaaacaactaattaattataaagcgtcatgttatagaggtgctagatactttagtgctggatcatttagggactatcatatggataataacttgatatttaacggtcaagtacctacgaaaattttaaaaatataacttaggacgtattattgccgtaaaaaattaaacttagatatttatctacaactgaaaattactaaaaatatttatagtaaaaattactcttacatataagattttgtgtttaatctcttttttctcctcttaaattagtgttaattactgttttcatcttttactaaaatatcacataaacaatttaacagttaaatatagcaaaaaaagtagtataagggcacatttctaaggagtatttttaacatcataagagacattatttggtaattggtaatatcacaagtttatggagttaagatgctaattattctcatggttaaaatatatagtcaagactccaaaatttagaccaaaagaaattcttacttgatgacgatatgagatcatgtagtagacttatattagcccaataatgtactctaccaaaagaaaaagatcaaacttggagaagaagaagaagaacattaagaatttgttaatttctctttagaaagtcaaaattggactgataagaaagatgaatatgagttgaatactacctactataaattttaattaataccctattcagctttacattatcccaaaaggaaaatattgatataaattaagtttcaatgtgagaaaatttcaattacaacaacaaagagttttcaaaatttttaaaataaaaaaattactttcaaaatatatttaaataatttttttcttaatagtttatttgtagtcgttcatcaatattttaaacctaaatcaggcaattgaactccgacctcaacccccaaaccacgacctggaccatagacttcgaatccaaacctggactcataacacaaacctcaactagcaagtccaataaaataacatatcatcaatagtttataaaatatcaacaaaataaaattaaataaatgaatcagcccctaataataatattaataaa

SEQ ID NO: 194423 - DNA, 2419 bp, Cannabis indica
ttaaactagaaaaatattatgttaacttaagaaaatttaaatttttggacaaaaaaaaatagactcaagcttgttcccgtaaatttttttacgaaaattaaaattttaatatatatatttttatatctaaatgaattttttcataaaaataaataatttctaaatcatttaattagttttaatattttaattttgtatttagttttcttaatcatttaaaataatttttttaggagctaagttaattttttaagaaatactataaaacatattgaatctttcttatttttatttttaaggaaaatgtttgatagttatcaaaatttagggagcaaagttactaattagcaaaaatacattagcatttaaacagaataatgaaatgaaacctaacagaaagactaaatttctgtaaaagtaaaaatataaagaaaattcttaacaagccgtatattttagggaacaaaattaatattgtcgaaaattctgaaaaataattttactatttctttatacaaaatccataagaggaacatagaaataaagaaaagtaaagagttggtggcagttgaaataagattactcttttgtacttcacaaaaactagaatacaataatataatttgcaaaatatattagctaataattattacttcctttataatgtattatatataagtatgtataagtatgtatgataaaagtactatataatatatacttcattcaaaaaaagaaagtactatatttacttttcaaaactagcaagcaaggtagtacatattattaaaagttgttaagtttaacagcctggttggttggtttggttaattaggttactcatagcttatattttggaccacaagagcaagaggtattgtactttttttacaaacaaatacataaatctcctcaaaaaaaaataataagaaattacccttacaacaactataaatcaactataaataaattataaaataattaaaaatataatctcatgacaattttgatacaactatagataaactataataaaaccaaaaagacagtttattagttttacaaaagatatgtttttgtaaataaaaaaactcaaagcgcataaaaataaaattttttcgtgttaacgtatttttctaattttttaaaattttttttggtctattatgtaaattctttttttagaatattatctcaccaagattttaatttctctattttacttcaaatttttactttacaatatgcatctatttttttattttaatatattttattcatttcaaatataaaatattaatatttacatatattcttatataaaaataaaattaaatctcaaataattaataaaatatgttaaggataatgaatattagtattttgtaaatgtagaggataaataataaattttaaagaaactttaaaataaaagagtttagaagatttaatttaatgtgtttttagtttaggtctaatatttttaaagattggaattatatcccatatgatctaagttctcttaagagcttctaccaaaataaaaagctgaatccaaaacattctttttgtacaaacattgttgcttatttatttcaatttttatacatatatataagcagttgtgccataagtacctaaaattttaaattcgtaaacaatataaatctactaatttttatagcgatataagtatttaatattagtgaaactgtaatttttatctttgttagtatcgtaaatttataatcaaacttaacttttgaatttgttaaaagaaaattcatttaaaagtaattaatattacacgcttttattcagattcaataacttagaactttgagttttatatgtgtcatatactaatgaaatttatattgacgaaactaaataaaaattacaatttattaatatttgatacttatatcactaaaaaaaatattattgagtttatagtaattagaaattcaaaagtatttatgtttgttaatatctctaaaaaaatatatttgtttatggtaaatttaatctttataaatataattcattaaaaaatatttattacatatattatattttaagtgtatatatattattattcggtttttttttatttgaagtatctatatatatttatatattaaattcgatttcactcacaaataatggttgaaagtaacttttattttatttattgcaggttaccatttcccaattgcagttataattaaggcagtgtgtttgtagtttgaatattaaaaatatttactttcattttatttagaataagacaaagtgtaataataaaagaaatatatgttgtcaagtataattttatatactttctaccatttataatgctgataaattatttattcacatgtattattattttttttagtaaagtgtactaatacag

SEQ ID NO: 194424 - DNA, 1799 bp, Cannabis indica
ctattatataaatttaaaaataaaataaacacaatttcgccaatctatcacttattctaatacacattccaacaacataccaaatttttaatcgatttttattattattcttaattcattactattactattactattatattctactattaaattaaacatcacattaattattataaataataaagtttgtttatcatagggggcagtttggctgtgcttttaaaagctaaaagcacttgaggaataatttgtggctaaaagatgttagcggaaaaaaatagccaaatttgtggctaaacatctcaatcaagcctaaacatttttttcttctgtctccaattatgcaagaaaaagaatgtgttttggttttttagctttttgaaaatatcttaccaaaaacaaagacctcttaagtctacaaccaataaattcaattaagctttttaacttaattaaaaataaaaattattttataccaatctttttttttttctcttaaggttataccacacaagtcctaataccgtattaaaaagtgattaacaaaaataaataacttaagttaattgaattaaaccaaccttttcaatggttccaaatagggacttatgcctaatgtcccttcccttgagtcgtaccctgccattaatcccgagctgcctcaatacagccgacttcctcgccggcgccggagacggaagcagggaccttctctctcccaatttggaggcttgcccatttgatgatgggctctcacagtcatcgttctctttaccttctcggctcttacgtcgtcgttttgcccgaacaagctctttgctcttcgccggagattcatcatcatcggcaaactttctgagcagctcatctgatgacttctttgtcacatgttgaactttactgttatcggaatccattttcagagagagagagagagatttaagagtttatgaaatgtaattgtgaaaaatgtgtagatttgggtttatatgaacttagtgtttggattatagtttagtaagtagaaaatagaccgttggaaattataatagaggcgaaaatgaaggaatattggaataatttaaataaattgggaatgaaagaaatatagccgttgaaagatataatgtatgattggcatgtgaatttctgtggtgggattatattaataaatcaatcaataataatgataagttttctgacaatatttggattcagtcaatgtaacggtttctaatgaaaataaaactatatattttaattttttgagaggtaaatactaaataaaattgtataatgagaaattagcaacataaagtttattttattttatttttcaagtgaaagttactactattattaagaagaaaattattgcaaaaatagtaaaaattagggaaggaatattagctaactaattacaatcttaatctaactaaaaagcatattaattagcatttctcttaatatgagacacttttgtttcgagaaaaaaattaaaaaattaaaaatatcatcaattaaatcataataattaaccatacatgatgataatgtaataggatcattagacaccaatattagtccttgattgagcaactattgtaaagcagcagaaagtgctattgcttccatttccttgggtggatattgaacttgtacaaattattagaattttatttgaatttacattaatttttattgattttaataaaatataagtttaatggatagttctttcctgtgttagcctatattgttagtggtcaataattaatgagcttaacatctctgtg

SEQ ID NO: 194425 - DNA, 1186 bp, Cannabis indica
cctaaaaaaatcagaaagtataccaaagctgcaattaatatggatcacagatattcattattaattcaaataaaagattatattagctataaattcctactaatttagtatatatatatacataaaacaagccactacaatatattttttccatgaatgaacatacatattgagaataaattattatatttattcttaaaatgcttgaaaatcgagtttaattttgaccacagacttaaaatatgctctctctctataaatatatataatataatttactttttttttatggatattgttattctttaatattatcatttatcaattagattattggagaacaattttatgggattttttcaaagacagctagctagaacactttttttatgtctcatatataataagtaaattaatgtgtagtttgtttaaataattttctatatatttttctcatagatccatgatatctagtttttcagatattttttcattattaattgtttttgaaaaaaaaaaaattactaatcttctatattgtaatatctcacatatcgaatatagaggacatatcaactaatttagatgaatataaatttactccactcattattttcatcacattacttttgaaaaaaaaaaaaactcatgaaaatcttatcatatatataaacacataattttatatatactatgtaactttctattccttttggtcaatgctctccaacaaattgtttacataaaacattaaatagtacaaattaacaaatcaaattaggactgcctcaaagttttgttgggtcttctgaaaaataatatttttgggtctgttattaaaagaatatttgatattttataaaatcactaaaaatatatatatataaatatttataataatgctttacaatgcatttaaaaaaaaagtgtaattgatcatacatcccttgctgattcgatattcagaaaagaaaaaagaaatttatttatgacgtgtcctgtaaacttttaaaaaaaatcaagagtaatttacagtatagaaagtagttttcaaattagttattttcactacttgtataaaataaaaagaagttatgtgtacaacaaactgtttgaactctgtttttggtagtgttaatttttttttttcttaatttctttaaaattttagttaaatagtcttaaa

SEQ ID NO: 194426 - DNA, 681 bp, Cannabis indica
tatttaaaaaaaaaaataaaaaaaaaaacaaactcttaagcgtatgtaccgtgtatagactttagcatttagtaacagtagatggttcatcacggcattaagtaaccataataaataacaaagaagcaagcatacatataattcagttacgtactagcaatatgttgtctttgtcaatactataatagaaaaccagtatattatatagtgtttattataaaattaaaaaataataagctaatcatgttcttctttcgtattaagtactctaagacgttttaataggtttttactctatataagatcttacatgagagactagtcactcaacctcacacttcaatctgcaagctacctacaagagtatcccaagtgttaaaatgtcactgcaagctgaagcctagagaaataggtccaaataagtatttgacaatttcaacataattgaaaaatatcaaacatagattaataaaatcaaagagtgaaaattaaatgataggcgctcttagcacgtaatacaggatagtaagactaacaggaatataaataaatattataccgttcttgcagcatgaggtttttctctccaataaatctggccttgtcccatcatttgttgccgaaagaagatcgactgaccctgtctcctcaataagaggggacttttacagattcgacaat

SEQ ID NO: 194427 - DNA, 1536 bp, Cannabis indica
ataataatatctccatacataaactatacacgcatttaatacacagttacatatatagtatgtattaataatatattcataataatttttttaaattaataaatttcccttcaaaaaaataaaaataaaaaatgaataaaagagacaaaagaaaatgaatacaggacatttatcaaaaaaaaagaatagtttggcttttattgatacacaaatagttgaaaaaacaactataaatactgcataatctttagttgaaaaacctaacacaaaatatggataacgaaaagctggggttactctttgcactaataactttgttatcatgggtttcatgggcagtaataatgataaaacgacgtcgtcatcgtcagcttgaaaagctaggtcggcttccgccgggcccaaggtggtggccaatagtaggaaacattttccaactgggctgggctccccacgagtcatttaccaagctggcccaaatccacgggcccatcatgatcatatggctaggctccatgagcaccatcgtaatctcatcccaagaaacggcccgtgagatgttcaaaaaccacgacgttgtcttagcgggccgaaagatctacgagtccatgaaaggaaaacacagcaacgagggctctctcatcacggcccaatacggcccacactggcgaatgctgagacggctttcgatgacagaatttttcgtgacgagccgactcgacgcatccagagccgttcgcgagaaatgcatagagcgcatggtgaaatttatagaggaagccggggcgtgtgggagtgatccagtcgatgtgggacggttttttttcttgatggcgtttaatttgattggaaatctaatgttttcgaaggatctattggacccgaaatcgaagagtggggctgagtttttttaccatacaggtaaagttatggagtttgctggtaaacctaatgttgctgattttattccaatttttaggcgtgtggatcctcaagggatcaggagaaatacacagtttcatgtggagaaagcttttgaaattgcgggagggtttatcggagaaaggatggagagtgatgatgatgagaagagaagggacttcttagatgtgcttttggagtttcgagggaatgggatggaggagccctcaaagttttgttcgaggaccattaacgtcatcgtctttgtaaggacatgcatacatgcattaaatgcactcaatattatatattattgttgacttaatgtccattttcattccatcaattctagttttttaaaacaaaatcattctagtgtttgccagtacccaccggccattccatagtactatatatatatattttcagaagtaatactatatatataatttaacaaatacattcgagtaagaagacaagatattttagcaaaaaaaaaaaaaaaattagaaaacaataagataagtaagtagcatatttgacatcaataactaaaaaactagttttttatttttaaaaacaaaaaattagtttttaaaaataatttaggtcttg

SEQ ID NO: 194428 - DNA, 998 bp, Cannabis indica
attattttatgagtcacttgcttgggatcatgtgagataattaaatgaacaatgtgactttagaggtcacaatccaaatccaaacctaaacaatggacgtacacgtacttcacttcatttgcatatatatattgtggtttttgaattttccaagtgtgaaacagagtccaaagacccatctctttcatttttagccccttctattcctttcttcttttctttttaaaatattgttttttggttatggtgttttggacccttcttttcctaacttttgtttgctggctttgttgtgtcaattattggtgtcatgatatttttttagagaaaaggaactaacttttatcacaattgttatccaaactgcaaattattgctttctttttctcatatctaaaattagctcataggttttgaggacaccaaaaagacctttacaaacaaatattaaacaaaacaagctcaactttttcactctatttccttgctatatataatttctctttttgttttgcaagttaatggtgttgatattattactataaattagacagagttactatttgcattgctgacacattctcctatctaatgagggtaagagattaaatatcatttgataatatatttagagcaaactttgatttttatatatacataatacatttacatatatagagtataagacatgacattgtacctaaatgacaaaatagtactatacccgatctcatagaaagatattacaatttatttatttaaaaaatgattttagataaaagaaaaaaaaagtagaaataaatggaggtctcaatcaacatcaatgaaaaaaatacatgcaagttgatttattataataatgaatatagagtacataaattccatgcttttgggcatcaaaatgcataaattcttacttaagaaacgttttgtctggactttgaatgctccaattgagaaggtatagattccttttataatggagtaaaataaaacaa

SEQ ID NO: 194429 - DNA, 1288 bp, Cannabis indica
agttaaattgtcctattttcatataggataaatatataatagtgttactatatagacactcatatataatgttgagtttgaagataactggatatcgaaattcaaagtagtaagttgagtttgaagatgttataataccaactgggaatcaaagcatacattatttaatttttttttcacagaacttgcaattaatgctatcctattggtacaatcaattcaaacacaacagtgttccgtaaatcaagtagtattcctgtaattaataatcaagaactcaaactcacatggtcacaaaccttgccaaaaggcctagcgggtgccaataagccacctcagctataaccggccaagaaaaaggccttgcctttctttttctcctcttcttcctattctactaacccttcccacaaaaacaaagaaaagtaacagagaatgttacacatattatacactgtcacacatcaaagaagaaaaaaaaggtcttttctcttttttctttttcttttctaattttttattctattttagtaattctagacttgggcgccctcaaatgtttgtccaaactgccaattagatggtgccacgttgttgctggtgataacccttccatcactaagagtgatttggaaggaaagactctgaccattgaggtaagagttactttgccaattctgaccccagttcctcgacatggcttgccaccctgtcttggaacctttgattgagaccgcatgaacatcccctgcacccccgacgttggtgatcaaaaccaagttgaagtaagagtgtccattcactgtgaatctaattccacctttctttacacatggcaccctgcaaccaaagaaaaaaaaataatcagctgaatgttacaactttcttcatatcatttacacgaaacagaatgttactaataagtattaacaaacaaaatattaatatgttattaccttctgaaagagactggaacaattccagctttgtactgagcaatctgtaagaaagcaggctcggccaaatcaaagtgctgaagaggagggttgcaccagccaccattgtcgttggacaaagcaaggtttggggggcagaaattggtggccgtaacgatgaggctgccggggagacaccatcttgggtcattgttacatttcatctcgtaacaagccccacagcttagcccattgttgaacagagctgtgcttagtgctgcagtgcttgtcccgtacccttggctgtacaaatttccatagccacaagcacctcctataaaacaaataaaaaa

SEQ ID NO: 194430 - DNA, 1500 bp, Cannabis indica
cttttcttcaatttcgatatgtatcaaataatgttttaagaatttttaatatcgttaaatatttctttaaactatattaagattgttgaatttaagaatttttgtctaattttaataaaaaattctaacaaaaataaaagttgaaaaaacataattttgtatatatagttatgatttggtagatattagaaatatgatttagtagataaacagttaatgaattagtaaaatttaataaaattaaacaaaatttcttaaatctaacgattttaatgattaaaaaaattcaaaaaacataattcaaggataaaaattctaattaatcttattattatgaaaaattcaagttaacgatcagattgagatagatagagatcaagatattatatatgtatatttatataatttgttgttgttgttgttgtgtttttggtgttggatgcatgaattaatgaagtggtgttattgggagatggaatgactcgccagataccgtaattcccgttattcgaaggcttttaaatgctggcctacgtatatggatctacaggtaatcccatcttttttttctcttttccttaatttcttattttttatttaacaaaagaaaacagagctctcagcataaataaaacacaatttaatttaaggctgcttttatagaccaaaccatgcataaattaataagtaatttttgagggacgaagatgaattagaattagagatggatagtgaataatataaataatgttttggagtttgtttgattatgtagtggtgacactgatgggagggtgccggtgacatcgagtcgatacagcataaaaaagatgggattgaaggtggtggaagagtggagagcatggtttgagaaagaccaagttggaggttgggttgaggtgtatgaaggtgggctaaccctagccactgtcagaggcgcagggcatcaggtccctgttcttgctcctattcagtctctttctctattcactcattttctcaaccacaatcataatactaccttgccaccttctaggttttaattctaattattattaattaattgtaattccaaaaacattattaaatacatatatcaataaatgaacttaattttaaatggacattttttattattttttttttgtaaatccttttattattagttatattaagggacatttgttacctattattggacatatataatcagtttattataattccaagtatatacacacacgactcacacctcaaaagaaacaaataaacaaaaataatagtttaatatatatacgatcatcagataatgatacataatttacagtccaaataaaagttagtaagtcttttttattttcattttctatatatatataaataaaagtgtacgtgcatgttgaaaattattcgaaaagctttattaatcaaaagagaacaatataatcatctaatggtcaatatttaatcaagattagacatactacaaataaacattaa

SEQ ID NO: 194431 - DNA, 1806 bp, Cannabis indica
tgtatttcattttcagaaccacaaaggccagattttcccgccacgaaatattgggaagagagaagagttcgaagcagagggtctagggtttccggggaaagggcaactggcgaagcaaaatctcaacaatggcttccgctcttgaggatttatctcaattcgatgtttcaaacgaggtaccttactccgcttttgaaagctttcgagtttcgattatttaatttcgtttagagcttagatgagtgatgatgatgatgataatgatccatattaactatgtaaaccccaggagaaggacaggctggtagcagaagttatccgctatgtgctattcaaaacccaccaaactgcaggctgcccaatcaagagagaggagctcactcaactcgtctccaaaaactatcgccaacgagctctacctggctttatcattaacgaggccaaagagaagctttctaccatttttggctatgaaatgagggagcttcaacgttctcgaccttcctcggcaagccagggccgctcttctcaacagagtgagaattttattatttatttatttcttttgctaactctaattccatgttctatgtgaaatccaactggcataattctgtaaccaatattcggctgaagtggacattggtaagcattgattaggagctgtgcgagagcagccatttcgtttgatgatttggttggattcaattgcgagtcatcgagatgcaatttctatgttttggtcacgactcgtgattttaggttttagtttgcttcagctgggtaggggtttctctcgcattaccattggtacgtaggaattttccatattctaattagtttgctggtccagactgccgatttgggttgattcagattaagattaattaggtgtattaatagtattcctgatgtactgattggggttttgaatagagtaaaccctttgaccaattggggttttgaaaattcggtttgagtaagccttaaattaattcatccttgaattagaatacatattgatttgaaattattagataattccatgtaattattatcctcggttctaattttatgcgtactgccgagactactttctgttggccaccttctccgccttgacttttcaattccaattgtggcttttctctacaggtgtttcagatgcaaaatcctacgtcataatgagtaaattaccgggtgatgcttataaaaaatatgtcgaggatgcaaatacggctcatttgtctggtttcacttttgttgtaattagtattgtacatcttgctggtggaaaagttgctgaaggtatggaacttgctgatttttcattattcataaatacaaattatgtaattttcggaagcatgaagaactctgggttagaagctcttttccgcctagaaaccacattttttttttcctttctcgttttttggaccttcatcttaaaatgccctgataatctggttggtggactctaccacctcattgtatagtaagatattaacttactgtaacatattagacttcgatgcccaataaaagcgtttcagtcttactaggaactatcttatctatgttattaacttgtattttatattataagggctcgtttggaatgtcgtattaggtcgtattgtattgtattgtatttatattgaatttggattatatatcatatttttatataatactacattaaactttaatttatactaaaaatattatatatttaggtgttccataaaaagttaatactactatatagtttttacgtaaaaaatatttgcataaaatacaatt

SEQ ID NO: 194432 - DNA, 1136 bp, Cannabis indica
attattggtattaatgtatcctatatgtaagtactgtacagttttcagtatataaataattaaataaactactacatataagggctatttgataagtaaataagttcataaaataataaaaaacggtctgaaggactgcgattgagaatactggttttagacctgggatttatggcctgtctatggttattattctgcatgatgatggcgggggacacggtgacggaagttgacgacattgtgtcgatgacaagtaaattgggagtagagcaggaggaggattgggaggaaaattgtgaggctgtgacctcgtctgggggcaattctttggtgaggaaagtcatctctaaacgtgatataggtgaaaggttactgttgaatatgtttggaagaatgtggaaaggaattactgattgggaggttaaggtgtatgatgaagatggggattcgtatgttgtgggattctcatttaaatccaagaaggatgcatctgtggtgctatccaaacaaccgtggttttttaatggggggctcttgattttggaggaatggccggatacgggtcagtggaaggactttaaattggaaaaaatctcatgttggattaagatgaaaggaatgcctctgaagatgttcactcaaaaaaacctccagcggctaggtgaaatggcaggagagatagaggagtttaagtggcataatgatagaaggatgtttttgaatggatatgtcagaatgcgtattgggtttccattgaatagaaatttgtttgttggccggtttattccgagcgaaggaaaacaacattgggttcagatcaaatttgagaggctttctatgctttgttatggctgtgggaggtggggacatgagcagaaagaatgtgataagccggtggcaatggagaaggatgtgcagggacaactggttcctaaatatggttcgtggttgaaggaggatgacccaaggccgaattgtttcgtggccttcaagcaagctcaagtagcctctgcttctgaggcgtatggaatagatgaaatggtgggaggtgagagatcggtgagatttgatagggacagaggagatcgatcttctgggaacccagatgaaagaaccgacggtgctgaggtggtcgg

SEQ ID NO: 194433 - DNA, 2081 bp, Cannabis indica
ttgcaacaaagaaaaaaaaaaaacagacaactattatttaatcaattgatatttttgaagaaaaattgtataaacatttaatatttataattttggttgtaaaagtcatatgacaatcatttcaatgcttgtgtaattcgatcttttgttgaggtttcgatagatgacacttgttttttcttttattttttatttttttgacactttatatgatagtatataataaataacatgcaaaatttccaaatttgaaatgtttttactataaatggaatactattatatatttaataaaagaaaattgacatgagattttggagaatcgtttgtcctatattaattattcctcgaaaaacgacaaactaatccctcaccgtgatgaaaagggcttaggatgtgggcccaagctcacttgaataatgtccattataaacataatgggccaacctcaattttgttggagtcggactttgggttaggtttgatgcttaaccggtagggtttctagttggtggggattttaaaccatctttttttgtttatctacaaaatcaatagacaaatatttattttgtggtgctggttgagacacccaataacacataagaaaagtgtggttcttctacattgaatgagtttttcgagttacgtgtcactttcaaattaattagaaagattaaataattatcgagaggctcgagatgaatagcagtatagcattagtgcaaaagagagtaattattttgtatttatcacgttacctatgttagtttatcaatccaattcttacattgtaagaataggcaagaattgccttaaatataagtgttccatctactctagtagtatcaggacttttatgaaggtccccaaaaataaattcgtgcgaactaggcccaaatcggattaatgtaggagttagggtgtgtggtccaacaggtggtatcagagctaaatgttcaggagatggaatagtaaagctgcatttgcattgtgtgggagaagtcctcaatgtaaccttgcgattgaagatttgtatgatgcattgtatcaaaagtatacctaatattatggtgctcaagcggtgtgtcctgttagtaattactctagtacaggatggagatttatgtttagtgtcctgtgtcgaaagtcttcctcacaatattgatggtcagatcacaagttccgttagtgataacggcagtacaagatagtcttgttggaggtaaggtcacgagtacgtcatccttcatttgtgaagaggattgttgagatatcaatccaagtaccacatcgaaagaataggcaattcttccattgaatataagtgttccacctattctattaatatggggcattttaaaaatgtgcccaaacaattctatgtgggctagacctaaagcggacaatatcttataaatattaaagttagatgagattgtaagccaacaaattagatgaacagaccccaacaatctacttattcatgaaaattgctcaacctacactgcaatacaaagtacaaagtatagtgtaattgattttatttatttatttaagagtgtgttgtaattaaggagaataaattttcatcaatatccattaattttttttttcttattgtatatatttataattaattgcatatatatttaatattttttattatataaatgttaatatatatatatataaaaaaagtaaatacactaactataatctcccttctagaagattaaataaacccaaagttaactacatgattaaattgtaattttatttctattatttgtaaattacatcactttttttattaaaaataaaatctccattttaaaagtgcatagctaaaaagtaccaataatgtttaataatacttagagattgtattttgaaaatagttagtaatattttataataattattaaaataaattatgtgagatttaatacgtaatgacaccaatagcgatgattcttttagcatttattttttaaaaacgatctagacacgtgcctactcttcttacgtttgaaaccaacctgataccattttatattgatttttaaattatagagtat

SEQ ID NO: 194434 - DNA, 836 bp, Cannabis indica
taggcttttttttctaatatcatatcaaatgtcccatctcttcttcacccggaacatcaaggctgaggattttatgtcatcttgtggcacttgcagcataaattgaattttcatcttcaacggagctgcctttgctttaccaccttcctctccaacctgaaacccaaaccaaaccaaaccaaacccacaaaccaactcattttcatttcaacaacaacaacaatcatattactcattcactcattcagacttttcaaaccctgccctgcaataaaccaatctcacttacctagcttggagcaaacaaaaacctgcaattctcatacaaactaacaaacaataatacacatatgaaactatattaaacctttatgactggaaccaaataccaataaaacgtataacatcaggaagaagtcaggtccacatacctgacacttaatgatatgtttactatcaccatatgaaataatgtataaacagcagcaataagtttagcatgtaggaccacatacccaaagagatgcccagccaagacgtacttccgaatcataaccagctttaaatttcaaatctttaccatatgtatgcttgtacacagcactccaattgtttgcatcgaaattgtaccagtagctggaaatgaattttattgaaataaaatcagaaagatatcaaacattttgcatggggtggcttgtacatatcactccaattgtttgaactaaaattgtaccagtgactggacacgaagtcactaaaataaatcagaaaagctatcacatattccatgtgaatgcttgtgcacaacactccaattgtatgcatcagctttt

SEQ ID NO: 194435 - DNA, 1551 bp, Cannabis indica
ttcatgatctgaacacattttttgcttgaaagaccgttggacaagcttcatttagttttttacgtgtggaaatattttagagattctgtgggcatttacttgctttaagacattacagatcttctggtgaagcttcatttagatgagtcaaaagttgccaaattcaaccaattcagcaacaaattgccttaactgagggtgcaccttttgaagatgttacattgcacagaagcactttaagtgatctacaatacttgactctaacaagaccgatcgaatgttgctttcatcatcaacaaactcagtcaatttatatatgctccaattatagtttattgggaagcatgtaagagattgcttcgatatctaaaaggtaccatttcatatggtcttcttctcaggataataactactatgaaactcaatacctactctgatgcagatttgggctagctagctgtattgatgattaacgttccacatgaggatatattatttttcttaataaaaatctgcccttggtttgtccaaaagcaacaagtagttgcaaggtctagacagaaagtgagttcatgagggcccttgctaacacaattgaaatggcttgtctatcttctaactgaactacaagctcttctctctgaaccaccaattatttggatagattatcaaagttcaactcagctgcttttgttgccaattcagtgtttcatgcccaatccaagtacatagaaattaatcttcactttgtgagagatcaaattcttgccaaagagcttcatgtgagatttgccttctccgttaatcaagtggctaacactctcaccaaagttctcaccattgatcggtttcattatcccaaaaataaactttaaatggttttcaccccattttgtttgagaggaaatgttacacaatcaaaccaattctgctgttatggttttttgttgagagttaattaataattgtatagtgtaattttgtcatgattaattcttgtaacctacactagttctatataaagctagttcaatattggatgaagctttttctctgtgttctacctctctgtttttcctttttttttttggtttttccctcttacaacattggttctacacacaaacatattttcgtacctaatttaattaacggttctgatcatgcattcgatcaatatggaggggcagctatcatttgcatatcaaagtcttaattttgcaaactatatatttcaatcagcttaaatatattgatcataattaaagtaaaataatacataaaattaagattgagtcttacttagaagtgaaggaaggctatatatatataataaaggagaaataaagaaagaccaattctatctgtgcgcactactttcaaaaaatcaggaaaaaaaaaactatctttcttaaatttagagagaaaaattcatcaaaacatgcatatatttacgtagataccctgctgaatattatagttgggcatgagctaattaatgtgtatctatttattttctaataagctatatataattaaaacgatcgatgt

SEQ ID NO: 194436 - DNA, 2331 bp, Cannabis indica
tagggagttagttaaaagctgtttagttgttatctttgctaactaacttctctgatgtattcctttaattctctataagtaaaggatcttagctctcttaattgttgaggcttttagccaaactttctcttattctctttactctgtttctctgttttctgctcttaattcattcaaagtttttacattctacacaaattgacttaactatttttaccggattagttcagattattagagttctgaattacaaattatgaattatatgaacaacgttcctagtaagatagttattaatttacaaaaaacaaaaaaaaaaaagaaaaaaaaaaagaaagaaagaaagaaagtagtccattaataaaattgcggtcttttcttttttctttcttattgatttatttatttatttatttttttaaaaaaattatggtaattctaaattatttttccaaatttaattaagttatttagtggaaacgattttgttttgttttttttttttttctttcttcctttgagaatagatttcgtcttttacctagttgattaattccttttcttttttaaaaaataaaaataaatctacgaataaaaaagaactaatttacaatagacaaacaacaaatgttagaatcttcattcatttatgtcacaatcctggaaagatatatatacatacatagataaaaactacaaaatataaacaaaagcaaaaatatgaaataaagttggaaatatccatttctgtaaagggaataaaagaaagaatatgatgatgaaccttagttttgttttgtttgtatataatcacaatgccaaattttctaaagtcggaatgtaacaaacttgtcacgtttttcaacatttggaggtgtttttttttcacttgatgatcagaataatcaaattgtatccagtttggattttgcaatcttgctttttaccaaggatttagatttaatgcatgcttatacatgtgggcatcatcaccatctacacctcttatatatttatatatatatatatatatataaataaatagctcgagcttcaacaatatatatatatatataccttgatctaaacatcttcgagtgaggataggatattatggagagcaatcccttgcgtcaacagatagctaatatgaggcaatccctgtttgatgaggttcttaatatcgttattatttataattctgcttctttcaattgtctaatatatatagctagaaatagaaactatataatattatttttgtttgttgaacttcaagtctgcagctggttaattatctttcaatactggagtggaatttcaagaactttttgtttattttattcaattcaaaattaacatcggaagagaaataacaataataaaaaaaatgaaattgttaagtattttgaattgggtttttcaatatatataatgtgtagtaattattaatttttatttacatataaaaaagattatataatattgaataattggggaggtagggtggttgaaattgcagaaaatgcttgatgaacactacctaatagtggagcaattggaagataaaaacaatcccaactttgcagaggacatcatggccatgtattttagggactcaactcaactcatagctaaccttgaacaagctttgtaagtatatatatataattctatataatatatatatatatgattctatatataatatatatatatatgattgtcatttaattctgtggctatataaacactagggagaaagagaaaccccaccatgatttcattgtcatggaaaaacaactctatcagctcgcaggaagtagcgcaaggtactaaaataaacgattatagttcattttttttttttttgccaattatctcttataatttttttgagattaatttgataagtagaatattatattgttccaataatagataacattttaatagaaaaaataatgaatattttatttgaatttggatatctctttttgattaaaggctctaacaacactatgtcaaaattaaagtagatattagagagattccctataaatatataaatatatactaaaataaactcattattgttaattataatagtgaagtttcatattaaattatagttttgcaacactttaaaagataatattttcttttataaaaaaatgataatattttctagcaacggcatgaaaaatgtttatttatttaacattcatttctaatataaaaatgctatatgaaattgttatttacttatttgtcatttaccacataagttaaaatttatgagaagttactgtaataattattaaattaaaa

SEQ ID NO: 194437 - DNA, 1513 bp, Cannabis indica
tcaattcagggtcctatttgtactattttagaaaatacagggtccattttatcatttaacaaaacacagggtccaattgttaacttttgtaaaacagagggtccaaaatagtatttacccttaaaaaaataaacaaataaacaaataattactaacccctcacaaacgtttaacttgcaagttatagactttaggcatctaatactttttattaatattttcataattatttaattaaaaaacgtttgtggaggataaagacacacataatataatacatatatatcagtgatgatttttttacatataaaaattatttgtcaaagcatatcccattgctgataattcacgaaaagagggtggtagtggttagggcatatgggataaaaaaaaaaaaacaaagaaatagaacgaaaacgatggatggaaggtgatgaagtgacatgcattaaagttataattacattaattaattgcctcactactaaaattgcttttatttctcttattaatgtttcccttttagtatatatatatagaggatagagcccatgcatatatatatatcatacaaggaaaaagtagttgaccatttttttcattttaagacatgggatttcatcataggcttcaaaatgttgtattattggtcttggagatcatactacttctaatatcaatatcatcattgcccttcatattatgtgatgatcttattatcagcaatattaattctccattaccccctaattttctgtttggcactgcttcttctgcttaccaggtttctcctttttctggttaatatacaaattaagtatatatatatgtgtgcacttaatatatatatttatttgactcttgattgtagtatgaaggcgcttacttaaccgatggtaaagggttaaataattgggatgtttatacacacataccaggtaaaaaaatcaactgcatattatttttatgacaagaaattagattaattaatattgtttatcatgactaatataatgtatacatataaattatattgcaggtaacataatcgatggaagcaatggagatatagccgtggaccattatcatcgttatctggtatgtatactatgtagaaagcttttagatatatatatatatatatatatacacgtataacgttcacttctacaaccgttaataagatattgagtactagtggtacctatcactttctataagtgatgcttagttagcgatattttcttattttgacaccgagaggtgtgctaggtattaccttttagcaattatttttttctttctttttaaaaagctgcgtaaatatattaaacaatattagaaaagtttaaacttcactccactacataaaatattatcaggtatatatgagggattaaccataccagtaatattataagcgagaggccactaagtcacattatgggtcgcaaaattacatattttaaaaataaaagaaaaattacaactgcaaaacaaattaaagagttgt

SEQ ID NO: 194438 - DNA, 1686 bp, Cannabis indica
agatttcttaaacggcagggcaaagcaaacatcctcaaaagaagtgggacccataagaacagagcagccactaaattcatttttttaattaataataaaatattggttgcttttataatattttaatattttttacctttaatttttttttctcatatttgtatatcttataattttttaatcttaaaatataaaaaataatgtttacacaagtataaaatgaatagtcacgcactaatatattatttaaattctatttttaatatgttaaattttttaatattttataaaatatgttaaataattataaattatatgactatacaaaatttattttaaataataaactaaataagaagaatatatgaatgcatagcggtccataaaattttgtaaaatatttaattattgctttttatggattttggccttttgggaaggaggagggcaagaaagaaagaaactgaagtctctgacagctgtttggttgaaattactattttacccatgtcagttggacaatattcccatatggctcagattctccacgtgcatgttttttgtcgtcttcactgttctatatgactcagcttagctcccacgtactcatcttatccttttatgtttttcctttttcattttcctttccatatttaaaaatgaaaactttctaatttcgccaatttttattcaataatattttcattaagtaatttgacatgacaaattatttataacaataaaatcctttaattattcaatcctcaattattggctgtacataaaataatatgtaattatttaatataataatttttaaaaaatattactaactaaaccaataataaaatacaacctctaaaaaactgctaattaacaatagtacacaataatgctcttcgaaatattctatatatatataataatctcgattgtttaacaaacataattaattattattacgaataattaactatagtacacttaacatgaaactttatcgttaatattaaacccaagtggatacaataatcaatattacaagctaggtataggttaaaacgtaaaacaaaagtgaaaaatgaaattttgggtagagaattgggtagcatgaaattattaagtcatatatgcatggccccacttttgtacaacataaacaaattagcaaagtaataagtcaagaaactatatacgatctatgatgaaggagtcaaaatatcaatatacatatatatatagttgatctatattaatattgtgttatagaattattagaattagagctagctagggtcaataaagccttaatgtgggtacgtacgtactatatatattggtggcttggctttaaatattctgaattactctctcaagtttgaagtctgaagcatatgcattaaatattttatgatgaacccaactaataccagaccatatattaccggctactatgtctggttttggttgtacggactagtgtgttcctcataacgtaccgctttaattaaatgcctacaacctctagtatatatatattacctttctcagtcatgaattattaagccacgggatatatatacgcccaaccctacttgtcctttcacacattcaccgtagggaaatttaattttttatgcttatatattcttgaaatttttctcttaaactcataatatttgatat

SEQ ID NO: 194439 - DNA, 2183 bp, Cannabis indica
cggtctcgggacatatgggattttcattttatagtcgctgtgcgtcctgattatatgtattttgaaatattctgtaaaaagtttaacaatgggatcccgacttttgtaaatatatatataaaagtttatacagtttcatagttaattctaaagtttaaatttgacacgattttcaagaaattttctttaattagcaaagatagcactgcaattaaaaaatcactgtagcgtgccttagtattagggcgttacatcaaaagtgttccttaagattggggaggagagtatagaccttttgacagatttctcaaggatcaaggaattcaattctcacatctttgtcctcgtgatcttgctaaaaatggccgcattgaaagaaagcatagacatgttagagaaatcggtcttacattacttgcacaatcaggattatatttttcctactagtgattagcttttcaaaatgttgaattcaccatcagctggtattgtccttcagttcatttgtccttatgagtgtctcttccacaacgaacatgaataaacgatgttgaagtcttttagttgtgcatgcttttcttatttaaggtcatacaagtatgataagctagatttctggttagaacattgaacatttgttggatactcttctcatgacaaagggtatctatgtgagaattctcaaggtcaaatttacatagtcaggaatgttgtgtttaatgaaacacactttcctgctacaagtgctacaaatgactctgcaacacattacgtacattatcctccccctatatcccttcctactactgcatttctaattgtgcaggtcactaaaaatcactccttactctttagtgacctgcacaaaaatataattcattaaatagtgtcattaaaaggtaaaattgtagtagtgcaaaaccctgagaaataaaaatatattctcacataatagaagaattctagaaggcagtgactgatacaaggtctagttgcgcactatgcatcacataatataatagaataaaagtagcaaatagagagaagtaagcacaatcgcgtcatatagaaaatatgcaatcaaagtgtttctcccggccctgtgccttatataagactacgtccttataaatgtaggtccaaacgactataatttacacggtatctcataagaacccacgacttctctattgttagtacaagaatgcccaatttgtgaccaaagaagtttcaagcattctatacctttaatgaaaatggtcaaactattcctagctcattaatttccaacaatagttatttatttgatgagtttaatgtgtaaagcgttcttgtctaatcggttatgtatatcaaaggatgtctactttatatataaatagaaaatccaccacacaataaaaattgatcacaactttctgaatagtaggttaggcatgccgaactcttgttgaaccactatacttactggtggtattgttatttaagttgctttcttgtttgattgtttcttattattattctcgttgttctaagtgagtattagatattatttctgtgggagtttcttgttaagttagaatttcgctaatattaaattgggcttagataattaatactttgattgtcaaaattaatataaacaatatatgcaatactgataataaatgaaagatagagaatttttaacgtaattttgtaattaattctatatactctacgagtctattatatttctaagaatattgagaaaacagagaattacaatacaagattggtagtattttctttagtagggaatttggccacccctttacattgatttctccatattaataggctaaaggcaatagttactaaatcctgtctttacaatggttaataaacgtgggtaatcctcacatttcatttatactgttttataggcaggaaaatacatgcataactttccaatattcaaactataggataatggcagttatatttgatcttatctagaacgtgttatgagtgatcccttctttaagtggcggctttacaatcctcaggttgaactattttatatgtgacttccttcagaggatggattggctcggaaaatgaattatcctttatctttagaatgagattttggtacaatttttgttacaatcttactcaagttgtatctcttgtgctttatg

SEQ ID NO: 194440 - DNA, 999 bp, Cannabis indica
atcccattcgtacaaaagttttctttgatttcgaccctgtttctgtttctgatttagaccacagaaacaggatcgaaatttggaaaaacttttgtacgaatgggattgtacggagagaaaatgcattacgatcatggtgccccatttttatttgtgctccggtaataattgaccattgatttaatacaacaattttatttaaaaaaaaatgtgtaccatttgttgaagagcattattatgaagcactatatgatgcacattaccactatgaggtaatgtccaaaaaatagttagtgaatttttttataattattattaaagtaaaataagtataatttaatattaaatttcaacagcaatgatatgacatctcatatagaaacaccataaatatcctttaacattttttttttgttgaaagttacttatcacatataatatatgtggcaaaattttaaacaaaattaaatactactacaattataatcataacttaatttatttatattcaaatttaaatacataaatatttatttatttattaaattaattgttgagattaaaaaagaaataaaaaaggatacgattatttttggtgtagtgagttggagatgacatagtaatttggttgatttactaaaatgttattgaatttgttctaaattaaagttatagtcacaaatggaaatgacttttaagtcaaaagatcttgaatttataaaatttcaattaaaaataattaaagtaatattaaaaagttccgggaccccttaataagattttaaggcaaagctaaaaacgtccacacctgatcacataaaactttaattatcaaataaactaaaatatccttattgaagtacaattgcattgatccactaaaccttgatttataatttttttaataataatgacaaagagagccgtgtaatttatcatctaccactgtcaaacaaacctattctcatcaccttttctaatttaaattagaagttaata

SEQ ID NO: 194441 - DNA, 1379 bp, Cannabis indica
gaaatagaaagagcgttcttgagagaaaagtagtagaatcaggagataaataaaagcagtaaagagaatcgagacttaccagttgatctataactggaagctccatcaatcgtgtattggatcttgattttgtatagtgcaaggctctgctcattttctgaggtgagctcaagaggactaccccatcaactcagggggaacctctataacgtgctgtgtttgcttctcttctcccttaatctcctctgcataatcagacccattcatattttttaacattgcatgcatatcaattgaaactaaccatagaaactaagctaagaaaacttgatcaattttcttggtatctgtttttggtaaagttacatgttttacttaatgtaattgtattgatattgtctgggatacatggacagctttgtgtccacttgccgagattggtaaaggtcaagattgaccttctgtttgtgtgtaagtgttgactttgtgtagggatatatctgtcaattcccaacactaagccatgaataaagagagagttatcggatctacattcaataaaaccattgctgaatagagtgagtttgagcttatcactccaagcaccagaaggggggggctactttaagccatatagagccttgtgaagtttacagatattttaaggttttgtaggatcaatttagccagtaggttgttgcatattcacaatctcttgtaatgttccattgaggagggcatttgtcacatcaagccgaagaaatttccaattataagagacaacaagtgtaagaagattcaaatagtagtttgttaaacaacaggattgaaagtttgtgtgtaattaatcccaagtttttgacaatagcccttagctacaagtcttgacttttacttgtcaaaacttttatcaacctttagattcatacggtaaatccactttttacctactagaggtgtccctagtccatatggaacaacctagtctccatacattattttttactagagctttgtattcatctgacataaaagcataccacttaagatctgtcaaagccctcataactgatgtaggctctttgggaagaagagactcaaggaaaggttgagtcgcttgttgtataagcttttggtttgaggttcctagtattagttatagtttgcattgggtgtttattagaatcaacagactgaatttgggggaatagctcctgaactacaataggtaattcaggtgaagtgtccttgtttatgggaaaattaggtagacatggggtgactatttctgggtttatggggcctgaagtggttgatgaagatgggagggcttggtttatatgggttgggagatgaaatgtaaagccctatagtattta

SEQ ID NO: 194442 - DNA, 1665 bp, Cannabis indica
atacagtacacatattatagtagttggaaaatttgtatatattatatatattaataataaaaatttggtgtagcaaatgtatttagtcaccttagagttgaaattaatatggtaggtaaaaaccttttgttttcttaatctcattatttgtttaatatattataaatgtgggcggagatgcttcttattgattccattttctaatcattggctgtatgtgggatgagtactactactcaaatatcgtctatataaataaaagtatatatatacatgatatatatcccatcaaattaactcataatattatatatataacaatattgttgatcacccttttcccattctcctaagaattatcattaatggttagtattattagctagtagtatagtagtaatgtgtttctcattctaattattaatcatatatatgtatatattctttatataatactttgtgtggatgagcaggagacgatgaacagtagagattttgaagttggctctaaatcatccaataatgatgagacgaataagaacaaagcattaataagtaaaaagcaaggaggaaatagagctgcactatttgtatatggtaataattaatctatgcagagctttattaataattaatttaatttctcatgatgatcgattataattaatttgtacgtggtgatgatgatcaattattatagcaacggagggtttggagaacatggcgttcattgccatagcagtaagcttagtgacttacttctatggttacatgaattacagcttgacgaaatcatcaaccatgctcaccaattttatgggaacttcttttctgttggcactcgtaggtggattcatatgtgatacatatttaaccagattcaaaacttgtctcatcttcgcctccttcgaattgctggtacgtactatttatatatatatatatgtttaatcaccagaatatatatatatatgggaatgtaataagtataagcagtgatcatcatcatcattaattactattaacatgttaaaatatataaatatagagactaattaaaaacatttattattatcattaattaattaactttgaatgcatggaatatgtaccgttgaccataattagtggtgatgaacttggaagataatataatgggatttgctacaatataataattgaccatgataaaaccactcatatatagttccacactgattttatataatatatatatgcatcacccatgtgaaacaactataattaaaatatcttcctttcccctttatttaattatatgtacatataaaacttaattattatatattagacatcttgtgtatctatattttagattaaatttggctcaaaatatattataaaattatatttggtttatttttatatttgtgctatatacaaaatgtaaattaattataaaagtaaatcattaatcctcaattgaaaatataaaaaataattaattttatttatattattttaataacttataaatataaaaacttttttttaattaatgcataatattaatgagtgacaattatgtaattaaaaaatatagtatttattaatgtaactaaatttaacacatactattttttgtactaattttatataatttttaacttgtaatttagtactata

SEQ ID NO: 194443 - DNA, 2773 bp, Cannabis indica
ataggttatgtaatttgagtttggtggactaactgggctaggaaaacttttgatttacagcaccccttgaatgttaattatcatctcagttatgtcaacattttgaattcaaattttataaatatttcagcaccccagaattggaggacctggacttgtcggtcagttccaatttcccgacggttatattgagtaagttatcgaccttaacaatgcttgattattctgacaaaaaggaggtcccaagttcgaggtagattttagtcttataaatgaactgttttgtttcattttcaggaagtggttaagacccggggaggaagaactcgttcaaaggttcgatccatcatctcggcttgatactattggcttttttatagctaagttcactgttggttctaaagaaacctgatgttgcaaaaatgtgcaacctaaccaaatttaaaagtgttgaagatctcacagccatgaattagaatatttattcacatttgctccctagtgtgtattaggatgtatgtatttagacattgcttgatatatattaagtgatgtatttttgcattagcattgttcacatattcttcaaggagaggtgaaagtgaaagtagaggaaaataattttccaaatttttgtaagagatttttttttgttcttaatatgattataaatgtttcaaaatattataaaatcacattataagttctatttttttcttctaaaaagagatctcaattttttgtttaaatacaaagtgactttcttaatttttttctataattcattcttcaagaaggtaagtgagaaactaatgaattacacttttaataagtttgggtatttttgctactaaaaaatacatttgagtctatgccattgagtgctttgataatatttgtacattgtttgagagttattagtagttaacctccctccttttatttattatttatttcgaatgaaaatttcaaattttattataacgtagtctctaccaccaaattagattgcaaaatcaattaaaatatcatctaagtgacaatcaaaataaaatatagaagttttaataaagatatgagttattatattagttgatcgtttaacaaaaataataaaaatatttctcaaatcaagaaacaaaagcttataatcattaactacttgatcgaataattttactcttttgttattattaatatataaatttaaaagttacaagaatatgaatttagaatattataaagagaggaataaaggaaaaaaattctaataataaaattctacaacaaccacaaaaggtttaaaaccataagcacatataaaccttagaaatatatatttatactaagtactaactaactataaaaactcctcatatcacatgatcctctctctcttaacactttctagctagttttaactatgtactatctccttcccataaacagcatgaataagaagtttcatggtacaagcttggattaatataatctcctatactattataattactattattagaataagagtactcatcaaaagtaccctccatgatactaacaaccgaattatcggctgcaaaccaatcagaaacagccacgtcacttacactttgctctatcttattctccatccatttgaagtcgaacaagtactcatcatgatgaagttgttgaagatcaaacacatggttatcattagcaacaacttcatcgtcatgagtactagtactttgctctatatcgataacaatcgaatccattgagcaatcatctatagtactattagtatttttgttcatactaatctcatcatctttctccaaatcatcaagcaaatctcgaagtaaagccacatcgatttcggtgacttcatcaacctcttttaataactcatcatcattcttattattatactccatagtattattattattattagaggccattattgttgttatttgaggattgtatatataagagttgtaacttgtaagtgtttagagttatatatttatagtggtaatgttataaggcttactaggtatagcattggccacgtcattaagataaaatcctacactatatatttatattattaatttattatatgtacagtatatacgtacatgtcgacaatattgtgagaggggtgatgatcttgaaaataacaagtacctaataatgcttaaataagtgtagacattatagaggaagtataaagataaagtaaaggtattatgcaaaagggtagggttagaagattctacttatccaatgctatacggcattaatacatgcatatgcatgcctttataaagagaaaaagatacactactttgccccacacaacacaatcaatcaataacaaaatgatattcaacacattcattattattagatattggtattgtttaatacaacaacaaaagatttttttcagaataataattagtagttttttataataattattaggagttttttatttttaccacttcaaaataatattttttgcatttttacggaattctatatagaaatccctattgcaactagcgctgcaacctaaattgcaacaaaaaatcgtatagaaatccctattgcaactagtgctgcaaccactttagaaacccaaactgtaaattttttaaaaaaaattaaaaaaataataatatgaaataatcctaatattaatagtgatataatattttatagtagtgttaattaagccctattaatgttatttagtcatttttcagtaatattacta

SEQ ID NO: 194444 - DNA, 1576 bp, Cannabis indica
ggatgattgagtgtcacatgcttcctcaagtttagatttcttattattattataattcctcttctcataatagtgccatgactattcgcttttaaattctctgactaaaggcaaagattcagctgtatacagctaagctaaccgcttttatatttaattatataagcattaatttattacttgactaacaactgctgtttataacggtcaacaacttggttttaatttttggatttgtagattctactagtaaaaaacacactattaaacgacaacgaattagttcttaatatattcaacgacaactcaactaactcctttcatccttattaaatttttcagttttgagaaaccccagaaaaacaaagtgggcatccatcatagtgaacaaaacatattttaatctcaagtaactgaaaagaaaaataataaatgaaattgaatttcatgacaaatcacttaccaatttacatgttacaagcatcttcttccattgacatttgacaacatgaacaattcttgctttctttgatatattcttcatatatttcttttgtatattataacccttaaaagctctacaagtgggcatagtaaaacaaattactggtggtgcttaagtgatttaaggatgcaggggaaaaaaactgcatttttctgagggtgttgagttacttttttaagtgtcatcccatcaaccaaagctgcttctttgagaaaaaataaacattttttctaatatgttccaacttccaactgttttcaggttctgagtaattagccaaagctcaagtgccagggaagttactgcttgtgctggaaagaattatgaaggcgcatacgacagagagtgagaagacagacagccaagtgccctcagtgtacatctccattgcatcagtgaaagaaaatcgagtgcggttttcagcccagttacggattcggtctgcctctgtagcatacaatgctctccctgaaaaatatgatccaatcaattcttgcttattaaaactgtttagccaaaaaaagtatgttactctcctgaaaaaaactatctaagtcttagaatctcaaacatgtgaatcagcatctacaagcacatgattttaattaacctcgtttaaagagcccctataaaattgtactacattccaagtagcataaagttgtaggacattcactacaaatatcggaatggagaattaagttaaatttttatctatgtgcacgcaccatagtgatgttatggtacatatcttggacttgaaaatgcaaaaattacctgttcatcaaaccagcgcccttgtcgcagccatatggtaactaaagcaagtaagattctaggtggggtcaagtagtttatggctttcccacttccttttacaacccgcattcgtggaactaatgttctagcaacagtttcagggagctcacatatgatgttgaacatttgcttattttgtatggtggaaccactgaaaacagccaatagtcaatgtatcaggcctaagcatgaccagagtacaatacaaagtaaaacaaagtgatcaacaagagaaaactcatgtaactaaag

SEQ ID NO: 194445 - DNA, 1425 bp, Cannabis indica
tcatataaattatatataattaacacacttcattatactataaatgcatatacataatgtatgtattaacttaccaaatgaggtaaaaaaaaaaagaagtaccaactaaaaaaataaaaccaaacgtcacagaaaagaaaagcaattaagtgatgtgtgtttattgagcattgctattaggcaccagtagtactttatacattctcgacatgtcacgttgcgattggttagcaatactccctaaaaactattatattaaattatataggatctaatatttagttgaatcaatagcgatactaatatataagagagtactagacactactggtaccctttaatatatatatatatactgtgagagaggtggaagtaataaggggagtaggtgtccatgtacgagtaagggaaagtaggacgtgtactcggtttgttaagagcctacacactgccttgctgtctaccatgtgaacaacttgttgtgcttctctctctctctctctctctctctctctcttacttacatgcacacccacctctttctaaccttaattcccaactggcattatattataattatatttttcattatatatattatatataaatatacagtcaccccaaaaacagaagagtagtataagtcacgacaaaatcaatttacctacaatttcatcactatccaccgattcaaacttccttccctttttcttataattaatatatcatataatttacctacaatatattttaccctacttagtactatacttggaccattaaattgaactctctttacctatcttaatacaattacttataacaggtgaaaacattaaaaaatcccctccacatcaatatttacaaccttccatttcctacttgataaaaaggagagctctattggagacaagaagggaaattatatcatttaggttttggttacttttcatttattttctcttatcttgaaatattattatataaggggtagtagtgaaagagagaaagaaaaagaaaaaaaatcttatttttgaatgttatggattcagatcaatgtagtagcggctgtgagtctggttggactctatacttagaacaatcttttctttcaaatagaaatggaagtgggttcgtaaggaaaagtagtaattttgggtataataaagttaaagacaaagatggaatcgaacaagtgaatgaagaagaagaagaagaagaagaagaagacctttcaatggtttcggatgcttcttctgggccttcacactatttccaacatcatcatcaagatcaacaagtagattactcaaatattaatactaataattatgaagataaaccatgtttttttataaacaatagtagtggtactcacaatagtagtagtggtaaaaggggtagtactcacaaaatcaatggagg

SEQ ID NO: 194446 - DNA, 1362 bp, Cannabis indica
tttaaacctttttttaaaaaaaaatatatcatttattggtttaactacaaagtctaaaattataggttatgcggaaacaaagtggcacaaatctcctaatgagatatgaccaaacaactaccaaactaagttgattacaaagataaaggcaaacaccactaggcaagggtaataaacaccaaaattacaattaataaaaaagaaaacaaaacttgcacaaaaataagtgaaatgctaaaagacactagtagtgtttattatttttttgtgttaatatcattattaattcaactaattattgaattgaagaatctcctatagttaataacttatacagaatattactagtcaagataaaatatctagaagtactaatacctaataacagtaatccaaaaataaaccagaaacatctaaacaaaactaattaaacaaggcaaagcaagtgatggttttgttgtaatttaagattaatgaattaaacatataaatatttatatttttttctatatataaatataattaataatctcttctgtttattaaaattgtgtgtcctttggaagggtttgggctacaacaatgataggtccctctcgtaataatagcagtgtctgactgcttttaggcaagagaactgattcaaaggacacctatgatagtgactattcattaccacccaacccaaaacccaaccccaacccactcattattcatgatatttccaacacatttctcctctaaaaataccccttttcaatttttttggtctacctatcttctcaatcttttaatagcaaaaagaaaattcaatcctatatttatacatggattttttttctttacctcttcaacatagttatcattgtatacttttcttttactaaaataaagcattattcatcatcaccacagtaaaaaccaagcattaccataagtgtgcaacaaaggatactaacaaaaatacatgtatatatataaatataaaactaattaaggtatatgtagaaatatataaacccctgtagaatcatctgtaacttttagtcagaactcatcatatatataatatatatatatattgtccaataatatttcatacaatacttattgttagtttgaccaagaccaacaattttccttttgggtggctgggaaaaagatagttagcagtgaaagaaagaaaaaataaagattgttgttgtagatctccaagctaggattggatctttacaagcttaaccaaaacagataaaaatgaagattgagtgtttccaagaatgtgatcatcattatgatcaatattaatatatatatatataggtaattataattaattataaagctagttgggacagtgag

SEQ ID NO: 194447 - DNA, 968 bp, Cannabis indica
cccattgagagcattgattgttagtctcgagtcaaattttttttgagtgttagacatagttttgtaatgttttcttcaaattttaggtttatttagtaaaaatttcatgatttgaagtattactcatgcatgcactataatcaaacaatagactctgaggtgagatgtataaacactaaaatttattgccaaattttgtaactttattggcacaaaattttcaaaaaataacactctgtgaagtcttatgaattcaaaattttctccaaagtgggaaatttgttgcagagtatgtagtgataggtttcccttttaacctttttagtggattaggactgatgatgaaggaagaagaggaagaagagagaaaggaccattaaattgtcagaccactattaacctagtttcagtgtgttttatgtgtccagctgtaaagtcatgaataaatatatataaataaaagaagcaagtttttgagtaatgggatatatgggaatgggactcaaaaatatttgtactaaaaaacaaataataagagggttcagctttctattactgtgcaaaaacctgcacagaaagatgaaaatttgatgttattatatgtaactgtgacaatgagtacttgccaaaataattataataattgaacattaaaaatactcataattaaaccatatattattttttatttgtttgagccatttccaacaatttgttccattttaagtatactggcaagcaatgcggagctaatgttatgggggggtaaaaaataattctgcaaaaatggcctattaataaaaatattatatatttttattagaaaaaaaataaaaaatacttttgggtacataaataaatacttgagaataaaaatattttttattagaataaatataaaataatctaaaatgaaaataggaaattataattttactaaagacaaaaatagaaaataatatgatgtt

SEQ ID NO: 194448 - DNA, 961 bp, Cannabis indica
ctgcagtacatttagatgaaaaagtgtacaatggagctcttgattttaatccatggagatggatggaacctgaaaaccaggttggtttttattttcaattttttttttaaaaatataaactatagtaattaatttcaattttttatgcatattataatccaatattagccatgtctattgtaataattttatttatttttaggaaaagagaaattggagaagtagtccattttatgctccatttggagggggtgctagattttgcccgggagccgagttagctcgccttcaaatcgctttcttccttcgttactttgttactacatatcggtaattttacattcaattctcacattgaaataattaataaaattatttatcgtcctaacaaataagggtaatttgacaaaagactcattttagtcatttttacacgataagttcatattaataattttttacttattaaatattatcgatattttattcgatttgaaaaattattttatagttaatattatcgaagagtttatttaagcaaattttttttttaggtggacacaaacgaaagaagatagaatgtctttttttccttctgccagacttgtaaatggtttccaaattcgcttaatgagacgacatgtggaagatgaagaatgaagatgaaatatactttattttttcctttttttttttttttttttctttttacattttcatttttgtttttcttttgatgtacacaattgctttaatttttgtcaaacaacaaagatttcaaaagatgatgtaaaaagttcaactcttcccccttatgatcttatatcttgggaggttatttttgttttgtttttcttggttttgtctcatgtggctttttccaagataaagtatgataagtttattttattgtgtcaaataataaataatagtagtctcatcatagcatcacaaatttatc

SEQ ID NO: 194449 - DNA, 501 bp, Cannabis indica
caacttatttaatggcagaaagtgggtgacccttttaaaaacatttttcctttttcactcgatctagccaccttgtggaatgcatttaaccctttctttctttcatctccaaatatctctacataaattaattcaattaatgcatctttttgtacggccacagttgatttcaactttttttttaagaccttatatatatatattagtgtattaatggaaaaaagttggaattgcagctcaatgaaacaaaaacatatatatggtaaaagagtgagatgtagtcgaaattggagttcaaattctatgattgtcattaattgtgtcatgccacttacaaacacatggagcgcattttgggcacactttactatttttgccttaatgacactgtaatcccacgaattggtgttttcaaaaaaaggcaagaaaaaaaaatattaactccagaattttgattattatctagctacctagtacatataattatgtattttttttttt

SEQ ID NO: 194450 - DNA, 1211 bp, Cannabis indica
aactttacaaaagagaagacaagtctgccatatatagcatcagttcttgcaaatataagaagagacaatctcattccccaagtagcaacttaactgtatttggatgcaaattatagtttgattgacccatcaacaattttgaatcaaaccaaatcaaattaactatatttgtatgtaaattaaagtttgattcatcgatgaacaatttttcagtgatacaaaatcaaattaccttggttaattttttttcgaaaaggaaccaccttcaagtggttgagtcatacatataaaagtacagacttcttttgattttttttgctaggtaacttagaatgataatttaatttgtagtcagaaatatcttttaacatatcactttaggccaaagtaaaatttggtcatttttttctttgagataagattagtggtcattagtgtaagccgatactgtaataaacatgctcaccacaattttaacggcaaaggaatttggttcagggtaattttgacattataacagcccacacaggtataattgaaagaaactgtaaaaaaaaatttaactgctagtaatttgctaagaactcaaagcactcacttcactataccaggaaagcatagaattattagatggaattttatgattccgtctataaccggaatcggactcttcccaccggaatccatggcagatatcggaaattaaactttcttggatacggaatcactctccggccaaagctaaaaagccaaactagatctttttcagacaaaaaaacaaaatacgatttttattcttttgttatgttatcgtttatattaccagaaaaagcaaaagaaaattaagatgaatgaaaaggaatagagaaacgaaaatggctgaattttgctctaaccctattagagcttgccagcctctgagctctctcttcctccatcctcgcattctcttccccagaacttctcaccatcacaccaatgttgctggaaaatcggctgtaattcgaacccggaaacagcggacaaggtttcgaattctctccaagtcggaaccggacttcggcatcgtttcaacggcaggtacggtggattttttttttctttttccgttgtagtttttctgttgtttctcagggaaagttatcatttcgactttgtatgactgtatttagtagttttattttttctaaattggagttttctggaaatgg

SEQ ID NO: 194451 - DNA, 1304 bp, Cannabis indica
aattggtatatctaatttttacacatggtatattttgttaagagcccctatatcatgctagtcaatttaagcatcagtgaacattaataataggatttcttaaatttaatatctgctgtacaatacttttaactaagtgacattgttgtgataagctcaactggtcaatttacaattattaacgattgaaatttaaaataaaaactgctttaaaatagtaaaaggacaatgacataatttagcttaagaaatgctattgagcttcttaataattttagaaaattaaactcagtagcatttcctgggctacgttttgctgtgaagttccaaatgtattcttatacacgttggacttttatgcaaattttgcctaaactgcccgaagtttatgaaaacaagtaaagcaacactgcaatgtactatgattagctctgccttaccttggagaagagagttagttgcggcgtcagcagtcataactaaatgagatttatgaatgtctcaaatactgtaggatttgattccaccgtcgtatttggatgaactttcactgttgcaagatcaaatatctcccttctctactgaagatgctatcaccataatagagcaagagcttggcttacagatagatgatattttttcggagatttcaccagagcctgtggctgcagcatccctggggcaggtttatgtttacataaaaccatttttcaattcttgattatgcaaatgcagcatcattaacatcaagaattgtgcttatcaacctaagcttgacgtgtcacattcatgaatatctctctcccatattaggtttatcaagctaggcttcgccaaaagggacagcttgttgcagtcaaagtacaacggcctggagtacaagctgctatttccctagatatattaatattgcgttaccttgcaggactgataaaaagagcaggaaaattcaatacagatcttcaggtactatagtttcatgtgaccttgtcatttgggaaaacaagttctaacaaacttcttttgttaggaaataattaagattatctaataatgtcttctgtggtttcactataccattaatttttatctgttctccatatacttttgtctttttaatgtcaagttcgactgttctgaaattcaaatttaattattttatgcaggctgttgttgatgagtgggcatcaagtctttttcgggtatatacatcaatctctgttcttttttcctactgtttctattctttcctcttgctaaagatactgaaaaacaagaaaacatgaaggaaaagtgaagtgtta

SEQ ID NO: 194452 - DNA, 1921 bp, Cannabis indica
tacatgaaaaaagaaaaaaaaaagcacttaagcaagacagaactctgcccttcttaattaacccaattttattaggttaatttatgaggatattaattaattccttcatgatggaaaatgacctaatctataataaattcctttgttcaaaattattttaatattgaacatgtaaacttagttatgcgaaagctgagctcggtgcaggtggtggtggtggtggtggagaatgtacgagtagtttactgctcgtacttccagcaaagtttctctcatcgaaagatgcaggtttagttggattaggcgaaggtggtttattacctcctctctctaaagacgaaatcaataaattatttaaatctcgcttttgattcaaaactcgaccaccttcaattgtaacaatacataataagttgataatggccaaaaccaccatcacttttctcatgatcaccatcatcaatatagctaaaacaaaattgtatattaggttgccagagatgtgtacgtagttgaaaatattatatatgtttatatatatatatagagagagagaataataattaatatttgttgatgagtttatattaaggatggaggtaatgagaggtttttatagtgtttgtttgtgtgcgcgtaataacatattttgtaagactaattggttttgggggtttgtatagtataatatatatacttgttcaatattaactttggttgaccgttgactctatttaattatacactcagttcttctgaactggtcatacacgtaccaatggtaccataaacccaacactttacaactttatatactcggtttgtatttaatactaacgtatgtatacttaaatcaactacgaaaatttatttttataaatttatgtgtgattaaattaattgagtattagggactacctaaaattttagtcttcaagaaagatttttttattattttatttttgctcaacatcaaaatagtatttttacttattacttaggaccagggacggagggacttaggcctatatgtaggcttaagccctcacttaaatatatacatcaaatttttcatatatacatatattaattcactcactcaatttattaaagcccaatccacaaaagccctcactcaatatcttaattataattcataaacctactctcattctaatcaagtacattttaaaagtagcccaatacaaataataaaaaaaataacacttaattaaaaaataaaataatattattgacaatgttttattttattttgttgaagatgaaaatttaaaaggatacatttatcagttacttttatgagctttgacttaatatttatttgagccctcactcaaccaaatttctggcttcgtcactgcttaggacacagtatataagaacacactataaaaaataacaatttttagtcataacataaattttttaacataacatttagttataagttgtcactaatttaattttaatcgattaaaaatatatatttaatcacacacaaattgtaatttttgtgactaatacatttaatcacggaccttttagtcacaacataaaaataataatttataattagtcacaatttttttacttttagtcacaaattttagtaaaaacttttatagtgacgtgaaattcctaatttacttgagctattttataatacttttatatgaaataaaaaatgatatttttcaaaatttgagagcttattttgtatagaaaaatgatttttttgtaaacaaaaaataggttatttttcattgaggtatagggtttcattggaaaaccaagtgtgtaaaacgctcgcttaatctcattctttgaaataaaatatctattaatataatgaataaaattaaaattacaagtacttgatgaataaatatatatatatata

SEQ ID NO: 194453 - DNA, 1671 bp, Cannabis indica
ttaaagaaaaagaaaagatagattagagtaaaaatagagagccaattcatctgaattagtttttttttttttttaaaaaaaaatatagtaattattaagtaataataatgtaaccaaggaatcaaatatgaacgagaatctaattagcagattaattaacaaaatcaactgacaaaatagtttaaaatgaaaaaaaaatattaacaattaataaaattaaaacttcattaagagaaaaagaaaaaaatagattagagaaaaagtagagaatcttcccttgacaatataaataattaatttttaaataactacaaaacaaataaataatagaaagactaccttttaaaaaaaagactgacagaaaaagataaataataaattgattagcaaataataaagtgaagtttattatcattgttattacttttttttttttttttagtagataaatcattgttattacttatttttattttttcttcgtctattttaattcactttatctttcttctctcttaatttcattgataaaaaatatttaaagaaattatattttattgatgtgaaaataaatatgggaaacttaggtttggttgtaatgtaaaagataatgattaaattaaatttcaaaaacaaaaaagataacgattattttaaaaaatcaaagcaaaagcgatattttttttttaacaacaaaatcgatattaattggaataagtaaaataagtttctttttttaaaaaaaaattaaattctcattcggtattcccttttctattcctaatcaaaatatacaataatactatataaacatatctaagtcccaacaaagaaaatattctatcaaatcaaaactttcatttattatcatcacccataaaactagaatttccccaaagaaaaaaacaacaaacattcttttttcgtttttctattgttcttggtagagtttcacagcgttgtttatggttgattttgaattcatctgaagttcaaagattattaataatggaaggcaattcccaaagtcccaaaaatctgcacttttacaagataattacagaagacaacctacaacagaataaaattgtaagtttgttcaatctatgaagtttcttaattaatagttatacctcaaatattcaaatattagtatattagttatagggtttatttgttaataagaaccaactaatttgtgtagagtagaaaattttgttgaaacattatttgttttatttgaaaattttagttttgccaatcttgtatagaggagactttattgtagtttgggatggatttttttttcgaatggaataattaactttattaattacaaacttcggctaccaaccaaggtagcaattcagttagaataatgtagcagccttaacgatattatgaactactatattaatagatcatttaataaaagaaaaagaaaatactttttaaacttagctagcaaactttttacaatctttaatgacaagaccaaacaaagactagtttgggatgatttagtcattaaacttctatatttagagtgtcttttgtaaagactcaaaattactggtttagtatgactgcctaatagtaatgagttaaggctaatagctatgaatctaatttaaatattaggaatcattaagttaggcttagtagattaat

SEQ ID NO: 194454 - DNA, 4569 bp, Cannabis indica
gtattagttgtattgtcttctgcattattactaagactctcatattttttttccaaaaaaaaatcaattttaaatttaatactttgtataaaaaaatgaacatgaaatagttaaaataaatattattattagagtagaaccaataaaaatttaatttttttttatattaaattagatattattcttgaatagagtatttttaaataaaagttctacaattctactatatttctagctatgtacatctagataattttatagtacacatttagaataattcattattctcttatatgtgtgataattaattatttaattttatttttatcactataaattatttattattttctaaaaatttaaaagttatctcaaataattatagtatacataattataaaaaataattacattaaatattctcctaattaataccaaaaataaataaaggtatatcataacaaccctattaagggtttactaaaaaattttcatatacattattacacacaccaaaaatgagaaatttaaagttagagtagatccgaccaataaaaacttatacaaaaaaaattatattatatacataacatatagctatatccactatatggattggctggcaccatatataaaatatatataactgtagttatatatgtatattatatatagcataaatgttttctaatagaatagaagagagaagaggatagttccttcttgtttcgtatatgtatgtgccattggtgccatgcaactcgtaaaaaagcaaagaaaaaagtctttaatttgggaataaattttccacaacttaacccaagtttctcgtgaatcctttccatttcaccgcacctactctcttttccccactatttttctctacttaaatattatacgtacttataattcaactcctatctcaaattcaatcacagccctccatttccatttcctactacactaatcaaaatcaacggctacaaatgcatgctatcattgctacctattagctactagcttcttgttgtgatcatgattattaataatctacaatgagacaattttgtggacacctttaaccgatcctttaaataaaattatattattcataataatgtacgtacgtttaattgtcaaaatacattactttttttttttcaatagaattattggcatcatattcaatacaatcaatattttattacatacatttcaaaagaaaaaagtatacaatatgatacgattttggtcattacattccaagtgcaagattattatgatagatcataacgtataatcttgcttaatagacttatgtagaattagtggagttttaatttgtgatttcatcgaagacgttttttctttcgagcaagaaaggaagtgattcgcaatagaaaataaaattttgtaagtgagtcctttctaaacctctattttctttagaggatgtagatttattcacgctcttaaatattatgtgtgtgattgaaatttatctaaaaaagaaaaatacactttctttttcttttattttttgagttatttggtcttgattttttaacattgtttagtgcatattgtaatagagaaaattattttattaatttgtagaattacctaaattatagtttaatttcataatattattactttattgattaggttttgtacaactttagacgatttttgttttttttaagatttagaatttctattcaaacatacaaataatatatcaacttatgttttatgtttcatgtaacatcattattgttaggtattttaaaggatataacactacaaaaaatgattcttacgagtagttagcaaatttttttatattacttttaaagttgaacattcaattatattaatataatgatatatagttaattattgtagtatttttagtgtttattgaaaattttgaaaattcaatatgataaaataagaacttaaaaaatatatcaagcgaatgaaatagagataattttttttacgtgatttgagtattaatgaactttagtccacgagtcacctgtattaggataaatatccttgaaatattacactaatattcttcacgagctcagaaaccctagctctttgctatagtattttcacaatcaatttttaaccccttgcatgagggtaaaaggtaatatttataggttaggatttgcgtatggacatacatgttacttgctagggtttgcatgtaaatttggcctactaatgtggtaaatacataaaatacactaactttgggcccacggactgaagctcaactccaaggattgttatttcccgtagggcaggggaccacatatataaggttgacaggtgtcgtgcgtgcgctgcctttgcgtattgtagtatcagagtagtggttgtaagacaataaagatgttccctttggtgatacgtgcatctgacacaggggacaatcccttgatacagtgggatttggtgttagagaattgtcgtgtcagcttcaacttggcttttacggtatctcttagaaagccctcccagatgtatcctagatgctgatcatttggaggatccttattgcttcttcttacttgggtgaggcgcccttatggattcagagatatctagtttcggatgtaactatttggtgtctcgaatggtcttaacgcccatccttccaagttgtctcggtccattatcttattagggctactaaacaagccccagttgattaactttgaattcgacatgccacatgtctccctcccgaaaacataaataacatttatctccaagcttctagaacttgagggttgcgaaagcttacaatcctctatctagtttattatggacacgtaggaaattcggaaagggaatgatccttccaacttctgccttctttcattacaaacaactatggatctttgaatctcagctagtggattacatgtggcatcaacttcttggtctgtgaacttcatatgcgttgtgaaagcgcgtgacgcttaaggtagcatgttgatggctaaattatgttagcactcataccgagcctaatgttacaattgaaaatgcctcgattccaatgccacacattaaatgttgacccttctgctcttactgttggattaactttgttttctcaaatttaatttgagcctcttatcttggggcacaaggatcgtcacctctttccatataaatagggagaaacacttcggttcaccacttttgctcatactttaggttcaaattttctaagagagaaaaaattgaaaattacccttggtgaacgtccaatctgttcaacgattatcttcacattcttctaaccatgagcaccaaccccagacctgacgactcctcctctagatccatcaagatcgttggatttctaggcagagatcgataaattgattgcttgggcttgtgagcttcaggccagactttgtcgctgcgacttttgccttaccctcatccttcgccttcatcaattaagtgttaggttttataacctaaaagcctataaatatatttttaattattaataagagttgaacattttgttatatgcatgaatattaaattattaatatttaatattgaataatttatatataaatatctaaaaatttcgtattcatacatgaaactgtgacttgtagttgtacagagaattaagatcacttagccagttagccgtgaataaaacagtcagcaatatattaaagttaaagaatttttaatatgattacccatgaagactactctagttgagacattgtaatacttttttgcactcttttgattgccccaccactccaacacttccgttgtcacataaaaatttaaagcataggtgtttaatggaggtaattgctctgaaatcgactaggaccgaccaccctaagataacgttgtaggtagtgggtactacaaatgtataatgtttgaatgcgaatggagtggtacttccggctactcctccattcaatgtatctaggagctggatcttcctcattggcagtagagaatctccattaaagccctgaagtaggatagggcatggcatcaaatcagcttcagttaacacaattgcttgaaaaggcaaacttgaacagtatgttgaatgagatttcattgttcactagcactttggacacaatattgttggcaatttgggcttccatcaccaatggattattgtgtgggaagtatacgtacgttgggcatcctcttctgtgaaggtgatgggttcatcatccgtggactccaagctggagatggcactagagcacacacttctccctcataatcttgctcattcatatatcttttttgggcattacgtgtactttcaacaatatgcggtctctagagatagttgccacatagccatccatgggtggcgaaggcaaccctggtgggtatgggttattgggtcctgaagaaaggactgtcgcagtagcatgcacatttgatactccctaaagggcctgaatggctgaggcatgtatcaccagagccggtagagccggaggtcatattttaagagcttgagggaggccc

SEQ ID NO: 194455 - DNA, 1199 bp, Cannabis indica
tctaaattcgctgagaaagcaactgccctactcgaaattctatcaaactctgaagaagggcgagttgcaatctcaaactcagatggggggatattagcattagtagagactgtagaagatggatcccttgtgagcacagaacatgcagttggagcattgctctctttatgccagagctgtagagataagtatcgggaactcattctcaatgaaggtgcaattccaggccttctgcgtttgacagtagagggcacaccagaagcccaggagagagctcgcacgcttttggacttgcttagagatacccccgatgagaagagactaacatcctccgtcctagagaaaatagtttacgacattgctgcaagggtagatggagcggataaagctgcagaaactgcaaagaggctactgcaagacatggttcagagaagcatggagcacagcatgagtaatatccaacttagagctgcatcttgtactccctccaacatttcctcttcatgatatattttttttggctccggaagctgggaaaaaaatcgggtagagtttttatactgaatccttgttttgtttgggcagttgaaactctactcagctaaattaccatactaaatgtgcagaaacgactggagtttgactttcccagggatgatcttgttaactcatgagtgatcttgccctttgggcttttgtatatataaaagaaccgtatgctaattaatttacatgtacattacttgttatcacaagagcttgagaatttcctaagtaataatctggcttttactgcactgtggaaattgttttatatttttaagtgtcaaaatcgatgtttttcaaaaccgaagagctcatactggaagatcagtggagatctccatccttcaaataaaatggtatgatatggtttggtatcacagttttatcagtaataaagatacactgctaatggagataactgcaacaaagcaagagacaaaacttgttcctctttgagtttgagtttcaacaaagccaagagacaaaacttctttctctttgagtttgagtttgagtttctatgcttcatgtggcaccccatataaaaaaaatatctcacataatgttactgaaaaaaaaatgctattctttcctacttttctaaaattgtacatgcatttcattcattcttattttttttagggaaattatag

SEQ ID NO: 194456 - DNA, 1688 bp, Cannabis indica
aatgtaaaaattatttttaatttagagtttagattttaaaaattaatttaaataaatttaaattttcaactttaatactaatattttttaaaaaaaaaaaacgaaataatctacatgaaatatagaaaaattaaataaaaaaaaaataattattaaaataaacatatatatattttaaaaaattattctaatttaagttgatctgaaatttttagaaaataaaaatcaacttaaatataattttggcgaccatgaggttttgcaggtgtcgagtgggtataagagagtggtgctgacaagtgatcctatggcactcgaggttgcctctaatatcgattccaaatcaatactactcatcttaaattccattcgatacacttttcttttctagaattgagatgttatatttttctacatgcacactatgcgtatacaaatatataagtacatatgagagagagggtggaagtgattttaatacaggccaatcgcagaatagggtttgagtttgaaagagaaattcaagaggaagataaagaatttcaatacaggacaatgcaaaatataaggtttgggtttgaaagagaaattcaagaagaagatgaatagtgtatttaataaaataaaataacgccgttaaactaagaattttgttacataaccacattttatatagaataaatatatttatagatgtgaaattccaaaaaaaacatgataaaaatataaccatttgaactaccactcttgataggaatattagaccatatattagtaacaacacttaggtttgacagccaccaatagtaataagttggataaataaagttctcaataaaagttgtttgggaacgtccatgcaaaaccttgccttcccaaccttctccatttctggtgaccaacaaaaccgtaacattttctgcctgtaattaatatagtaagaatggtaaagtttttcatctcacaataaataaagtaaaacaaataaaactcagacaactgatttcttggcaaatgtttctgcaaccagcagcggaaaggcgattgttgcatcacaatggacctaatgattgagaacaaaggcccaccaaatgagtataaatacatgaaaatgacaaataatcaagcttgtaatttgcaagttcaaatattttaatggagtgttcttttgtttgagttgatagaacagaaattaaaaatcaagactataacaggagagaataaattgatagtaccttgactgttttagcagcacttcggattttaccccatgacactgcctcatccggacgagcaccagaatcactcccatcaaactcttgtgcagtattgatgaagacagcataatctgcaccattacgcatcatattggcattgcatatgtgatgtttcggcagaccccctccgagtacaatgattcccgtttttctaggacttgcatggacagcttcaccattcattgccctaatgtctgttcaaacaaaaaagaagcacttgtattcgcacatgagactgttataacagtgctaactataaaaatacataaatatataaaaaagaatcaaccttgcactacgtcgactatgagaccagggttgcggaaagaatgaaagtacaacatgtcccccaaagagccatctgttatgccgggacagaagacaggaatgttgttctgcaaaacatccaaa

SEQ ID NO: 194457 - DNA, 2758 bp, Cannabis indica
caaatattttatagtaaattatatacagactggaatcacgtatacgcacatgcaaatggggtggtgtccaaatattatatatgtgtgtataaattaatatatattaaaaattaaaaattatatatgtatacgtaaacccctgcggccgggttataataatcatactttattgaaagaaatatatgaatatataaacgaatatagttactgtataaatttttttaagattttgtagttttacatatgcatgtgtaaatatgtataatagattttttcattgttcggaattaattaggaaagttcttatcgaagctagaataaatatattaatatatatacatatatttttagcccacagatagacaaataattaaaagacatttctttcaccaaattaataattataagagaaactactattaatttgctaaattctatgtaaaatctaaataaattatattaattattatacatattcagataataatatacagtcgtagaatttaaatctaatagtgatggattctagacattttactttataggagcttatttattattaaaaaaattatacatatattataattacttttaattaaatttatttaattttgttagtagattttttttactattttagtctataattattaaattaaaaaaataaattttattttttaaaagactaatattttttattagttgagtaatatagcccagcaataactcaactgggtcctgtatatgaagagaatctaatcagaaataattttttttaaaaaaaacagtcatacatactacatagcccataaaaggaataatactcgaaagtacgtattttgttttatttattttttttccaaaaaagaaaaggaataaaaagattacactcaaaggattttttcttttcaaaaatcatgctgttattctctgtagaaaagtgtaatgatattccatctttatttagctagtaaaggctccgtcagaatttattccttctctttaaaataaaaaagctcagaattaatcaaattaataactatacaaattaaatattatattgtataagtttatgtagcttgtaagtaaaatgtgtacaactttcaggttttttttttttcttttatgtttgataggtcagtagttgtataagttcatgtatagcttctctttaaaccaatgaaatgtgtaaaccccaaaaaaaaaaacagatttatatagagcttaaaacagatatatacggctaaattagaagaatttggtaattatttatgattgataggtcagtagtaagacccaattttgaattcaatccaaacaaagtgtcatatcaagtcaaaagtaattaattaattatctgatcatacacaactaattaatctctatttgaattattattaaccaaaccaataaaatatttctttcaaatgtttctatatatatatttgggtacttatctaataatgtaataatatgtacagctttttttcccaaattaatataaacacacaatttgtttataaatataataaaaaaaataattaaacacacgaagaggccggggtcacatgtgtaacattactccattggcggctagctagcaacgtatgtatatacatatatatatatatatattggaaattatacaataaactttgttatattataaagtcatgctcatatgagccatgaccatattataaaattatttatacacttccattccatttataaatataaaaaaaattaacgtaactacttaactacgcaaaaacaaacaattaccacaacccccaattgttcttcttttagataccctttgaatttttctctccacaaatctcaattttttttaaattcttctttttcttcttctctcatcaatgaagaacattcaagatcatcagtttcccaatggaatcatcaaatattacaagtttaacaccaaaaaactcgtcctcttatcatttatcttcctaattatccttaccatcgtccctgtataccacccttctataaattactcatcttttttcttcagtactagtaataataataacgttgataataataattattcgtcctcgtcgtcgccgtcgttgtctccttcgtccggcgagtcttcgtcggagaaaaatgttgatattagaatacagtcgtcgtcgacgcacaagtgtgacatattttccggggaatgggttccgaacccggaggctccgtactacacgaacgacacgtgttgggccatacacgagcaccaaaactgcatgaaatacgggcgacccgactccgaattcatgaagtggaagtggaaacccgacgggtgtgacttgcccgttttcaacccggctcagttcttggaattagttagagataaatccttggcttttgtgggtgactctgtggccagaaaccaaatgcaatctctcatttgcctactttcaagggtaataaaaactatatatatctctttaatatatttactttactattattaattaatatataagaagaaaaaaaaatgctcttatttttgaagtagttataatcatgaatcatgatggaagatttcatcttaagtaattatcatgaggtccttatcatgatccttgttttgatttggttatttttctaggtatacaacatttgtagatataaatatggtagtaaatatgattgtaaatatataactatcatcttctactattttttctttctactatcaactaatatctttttttattattactattttttt

SEQ ID NO: 194458 - DNA, 1709 bp, Cannabis indica
gacaaggactactaaagaaatcaaatgagttggacttaatcgtgttcatgataccccttgataataacattaatttatcaagtagatcatgaaatgaggatgaaatagaagtgtagatgtaaaacccatgaaggtatagcccaatgacataactacaacaacaaaaatcatatagagaaatggatccttaaataataacagatgatggtgtaaataattgtttaaaagggataagaggcaaacctttgaagttgtgcttgtaacttatttacatatgcaagaaggtcttccttttcctttaatgcagcactctccttatttgctgcctcttttaatctagcttcagcatttgcctctgcaacccttactttctcctcagctctcacagcagctccttccaaaattactgcgcgatctctagctttggcaagctcagaacgccacatatgtgcctcttgatttgcagagtctctttgcttaatcaagtcatctctttctttactcaaggacgaaactttgtcttcagactcccttagctacagaaacgcagtaaaaccggaacaaatatatcagcagaattaatcaacaccatagccaccaattttcttatcttttatcttattccactggaagtgtggaaaatagagggagaaatttttagcggagataggagcaacataactacactaaccacacgtccttcaactcttctatcttgttcacattatttgtacatgtaataataagacaacagaaataagcacaccactaagaatattgggattcattgctacctttaatctggctaactctagttgcttctctaattcttttattatgcgatcaaattctacacaagcaattcgcctttgctcatccattgtatgagctgcggatgctgcagcctctgcagcttcagcagtctccgataatctatctgcaatttcctttattgttgaatcccttgagcgaagctcccgagctaaattttgaagttcttcatccttaacccgcagtgtttcctgtaaaaaaaaaaagtaatgagttcacattaatcatagttgcaggttcagcataaagataggtagacaaacatcaagcacggccaagtgaccagcatcaggcaagacattttgtgactaaattcttactggtcatgaattggcatcagcccatttaagtgtcatgatctaaagcaaatgcaaaataagcatagtttaatttatgttaacaagaaaaaaatataactaaactataaaagatgattttaatgataaccagcaaataaaaaattgccttatacttgagtcaatatttattaaaataaaagatgaagaatacctaaactatttcgccactgaattaatctactagccattattgaaacaaaaagaagaggaaaaataaaaaatactagagcttaccttcatgattgaaaaatcatccattggcccatccccaatcttatttgtcatcataccaagagcatttctaagagaaatctgcattgctgcttcaatttcttttgaacattctgcggcagtcgaattggcagcagctactactgttgcaacagttcctaattttgcagaaccattgccacttaatgaatttacagcttctttgtgggcctttagaaccaactgtgttgccctaatagtcaaaaggaagaaaatcttgttaaattaaaaactaatagcaatatctac

SEQ ID NO: 194459 - DNA, 1542 bp, Cannabis indica
ttctatttatttagttgcataattaaataataataattggaatttcatttcaatagaataatctttccaccatttgatagaatggttgttctattttgaaataaaagaaaaactatttcaagatgagaaaaattaatttgataattttttttatcatgtattttaaattttattctattcttattcttattttcattcttatttctctattttgattcctcccaatcaaatgtcacctaaatattctttccaatttaacaattttcccggtcaggtcatttaaacttttgtaattgcatatggtatataaatataaataaatatatatttgtgaatgctattactcttttattggattaattttttttttagaaaagtttaaaattagtgtaaattaatattaagtcctatatattttaatttaataaataatataaaaattaaatcttcatgatagattataaaatagttctttaaatgtgtccgctgctagcattgtacttattttctgatatttcattgttttgtaataactttgcttctgcttaattaatgatgttaatgaacttgtttgattgatggccaagttgtcccaattcagtagattgtttgcttatagctgatttatagtattctcaatgaaattttttgctttaaaaaagaaaaagaaaaattataaaatagttttaatagataggaaaattattattaactattacatgatattttccatttttacgttcataaataattgcatatagaagaaaagaaagcagccttacaaaatggggaaagtcctttgctattgtgtcttattttagatgtattgacatagtatcccattagtaaagcttatatgctatacaagaaattaagaggataggggtaatttgctattgtctttgttatatattaataattaaatataacaggatcaagtgatatacaatttatttttctctatataaataaatagaagtaagagaaaatttgcaaaacaaaattctttttcaaatgtcgatcaagattctttattaaagagtagtgtcctgtgttaaacgaatttaagtttgatacgttaattaattttttatttattaaaaaattaaatctctaattgaatcaataaaaaataattaatgtgtttaatttaaattgatttaactgtgacactaatttttaacaaagaatcttaattctctacttgctatcccacattctcattttttaaaacttttttctccatcatatttaggcatttttaagtatcatgtacacattgtttgttaatgatatctttgtgtttagttgtacttgattttagctcattctaattttaaagtttgcaatcctttagcctatatttctctctatttgtgtttaatttttttttgttttttttttttttctatttctacgtttgttcaatgttcaattctttttttaagttaccatttttatttttcttgtggtttattctatttttttcctttaactagtatttggtaattcttttgaaaataaaaaaacaagggttcccgt

SEQ ID NO: 194460 - DNA, 2088 bp, Cannabis indica
aaaaaagattacttccatatatagccataattctgtagctacataaacaggaatttataaaaatgaagatttattagaagtttccttgtgagttgtggagggtttagtccgtgtatttactgtctaatataagtatattgtctataaataatcatattgactattggggtttaattagctctttcgcatttcttttacatattgtaaaaaaagagtttcgtatagagtatagtttggtatgctatatttatgtttgtttttatatcttcgtaattgtattgagtcttcaaacaattcaataaaggaggagaaaaaagtgcataagccttcacgagaaggttcttcaagccttagagagaaagtggttaaagtctttcctggggaggaagtaagtactcttaaagcaaattgaagagggtttgaatacttgtaattttagcaaggttcatttgttaaggtggaatgcatcaagcttgcgacatataataagatgaagtttatttattcataagttaaaagctttgtacttttgagattactaatgagtcttatctttggatgtgacactgtagactagtaacaatctgcaaggattttagataccacatattaaaaccttgtgtggttttatttttctgtactattgttcttcactggttttctggtctgtagttatagaaccttggtttgtagctataaaactgtttcaatactaattttattattctacatttaattaataattagttaattgaataataaattagcaattataaactacagtatttcaattggtatcagagcaagttactaaactcttagtgagatcttgaagttatattatttcatttaatttgttttgtatgagatgtcgttctttgtagaaggaaattctatcactcgcccacttctattgaatgatactaattatccttactaaaaggtcagaatgagggcattcattaagttagaagatgataaggcttggagggctatactttcgggttgctctctacctagtgaaaaggaagataaaggttattctaaggtaagacatgaacttaattagtctattgaagatgaaaaattatctggttgtaataataaagttttgcatgcaatctttaatagtgttggtgaaggcttataaaatttatatcatctggtaaatccgtaaaggaggcatggaaaatccgtcaagtagaataagcatgggttatggggacacaatttgatgaattaaggatgtcagaaactgaaaatttatttgacttaagcatgggttccggggacatgattcactccccatgtgaccttcgacccttgcatgagattcctcgtgtagagtcgctcctttcgtggtgacacttctagggtgagctttcctttggccttgttctttttggttgagtacttctcacctatttttgatttgactctaaaacttccttgaaccccacttgacctattgtgtgtaggcttctgggactgctaccatgtttccttcccatgtcttttagggctagtaccacgatctttgagggagtagtccctattgacatttcttcatctgactcaaagggtcgagtggagaggatcgttttgttgcataccacaaatcgagagaggctataatagctcacctagagcaatatatgtgagtagacggaacaacttgagagaacttaagtcgtgatagactccattgaatttggtgatcacccagggtctattaatacattgatgcatttacaccaactttaggcttcatattggatccttaaggtgagagtgttaggagttataaagtattcaagaaatatatatatacatatatatatatctatatatatatataacagatttaaacatattcttaaaagtgatttaataaagaaaaccttaaatcataaatctataaaatctttgctaaattaaagaagaaaataatgataaaagatgagtagaagcactataacttgaagtcgttgttggagattccacaaaaggttatgatcttccaagaatacactatttcctaaagtattttctctgatatggaaatagaaaatacagaaaccctagtgt

SEQ ID NO: 194461 - DNA, 2362 bp, Cannabis indica
cctaagctctcattattatattagatattttgttgccgaaaagctcagtaaacaattggtatagtaaaccgtacttaacagttccatattaaagattcccaatactttaatacactaccaacttattttattcatataattttaattctcttgtacgtccttacaagattataccttttctatatgaataaagaattttttcaaatatttaataaattatactattataattattgcatcatttatcttatatattctctaatttattatctattaattacttatttttagggcacaaatcctaacaacttggacatttgttccctatgaacgtcatatacatttgataggaaacaaatgggttcataaagtcaaggttaatgttaatggtaatcttgatagattgaaattaagacttgtagctaaaaggcatcttcaaaaacttgaaattgatttcgaagacacttttagtcctagccctgtggtttaaaccagttgacagttagattggagttaacattagattattttatttcaatgtggaatgagacaacttgatgttgcaaatgtatttctcgatgggactcttcaagagacaatttatatgattaacctcaaggctttgaggtatccacataaacctactcatgtttgtaaacatcacaaggctttatatggccttaaatagatccctagagtatggaatggcaagctcaaatctactcattttaactggggttttattgcatcaaagacagatactttcttgtttgtttatggaactggctctagtttggttattctcttggtctatgtggatgacattcttgtcacatgcgttaaggctcaattgattcagaggttaatcactgatctaaatactacattttcgctcaaaagatttgggccaagtgcattattttttaggtgtttagattcataaaagctctgaaggtctttacttttctcagaaaaagtatattacatatctgttaactaaagttcttcttgagggtgccagtctaacttccatatctcacaagctttcacttactgaaggatctccatttgaagatgtcactctttatcaaagcacctgaggatcacttcaatatttgactcttactagacctgatgtagcttacataatcaacaagttatctcagttcattcatgctccaacacatgtccagtaggaagcttgtaaaaggctccttaaatatttgaaagctactatttttgatggtattcttctcaaacatgttctcagaatgtctcttgaagcatactcagatgcagattaggcaagctgcattgttgatcgaaggtctattggaggctatgttgtttttcttggatccaatcttatttcttggtctgcaaagacacaacaggtcgttgctaggtcctctattgagtctgagtttcgagcattagctaatatagttgctgaaatcaagtggctttgatctttgctactgaattacaagtcaagttagcagatgtccctatcatttggatttataatcaaggtgaagtttctttacactacaagaaaatagggtcattacctacaaaccataaatgtgggtaaaactcccaaaatgtaggccattacctacaaacaatcatagcagctaatcccatcttccatgcttgatgcaaacatatagaaattgaccaacattttgttcgtgatcaactgctagataaggaaattgactaatattttagttagttcggttagtcatgatcattcattaactaattctgtttataacagaattcttgttttgcatttgtacactttctaaagctataaataaagagttggcctctagttaaggtaagttttgccaagcgtttcttgtgttctctttctatctcccctatttcatcttcttcactgtcttatataaagttgtaaaaatctaaaaaatttattgcaagggaaaaaggcacaaaatttgtatttttttttccctatttttacaacgtaacgtcaaaaaagaaaaccgacgctataaaatgcaaaagtttttgatttgtagccttcactattgtaatgttaagttcaatgcaatgatataactcaaacaccaataacatccccttaataggttttagctataataatagcccaaaatttaatggcagtcaacacatgtaaaaatataaaaaaatcatttattttagtaatttttatacatataattagaagaccacagtaacctttggcccctagttccctcaataataataataaggttatcagaatgttgattatgtgtggtgtttcacacactatttacaacaaagtgtgttcaaaaaatataataatttcaaattgtaagcaaagttt

SEQ ID NO: 194462 - DNA, 1287 bp, Cannabis indica
attaatttgttgatgctgtctgtgcctatatatagatgggcttgcctaatacttgataacccggataaatttggattgctaactttatatatctatacatgtctgctataatagtactggcatttttcatgcgtatgtgcaaacaattcatttttttttctttagaagcattcatataattaagtacatttgtttgattaattcaacacacttttggtaaattggtctcaagaagtacaaactttcttggatatattttgattgttagtttcttacataatataaaatcactatgtatcgagtgagaccaattctaccttgctacttaggaagaatcaaaaaggcttccttagaagtaaacattatgagtaaggattgtgataattttgagtagatatttgtacaaaacttggtgaatgtttgctaatccaattaaaaaaacaaaacaaaaaaaaaggctttttaagcatcattaaggaaaaaaaaagtgaaaaaatagctataataatgtcttctttctcttaggtgattattcaacttactttacactacatttcttttttctgaatcccaaagccctgtacttggttcttcccttctgccctgcacctaatttttgagttaaaattgttggcaagtgcaaatatattacttttgcccccttacttcatttataactttcacattccatggattttggcctcttaatttatttgggtgtcagcttttgaggggtttggtttagagtttagattcaaaagttggtcttgctttttatttaaaggtataggtacaacgtgtgaaggttgtcattttggctgtttgaaaatttgggatgcttgacttgttattctttcatgtgcagaaatgtaaatgtttgtcactaatttgtatcactggagttctctcaaaatcctaacttcaacaaaactcaacacatcacattcacataacatttttcggtcatacaatttcgtttctcgctgttcttcctgtgcctctcaccttttctcaacattctcttgcaaaaccagtctaaacgaacaatcatgcgtgcaatatattcagaggtgtgggaccttgaaccagctcaaacaaatacagacccagattttcatggccggattacaccaaagtaggggtcctatcaacaagctcatggccttctgcacagacccatctcttggtaacatggggtacgctgaaaagatatttgatttcattcaagaaccatctctgttcatttacaatgttatgcttaaagctttagctaaacagggcagcttc

SEQ ID NO: 194463 - DNA, 1719 bp, Cannabis indica
gataaataaaaaataattaaaatttaacagtttaactttttgtttaaataaaagggatacaattttatattggcggaagttaaaaatattaagtttttaaaccgttacgaaaacaaaacttaaccgaagtcagaaaatttttagtatattataaaaaacagaattagatagtgtctaaaattaaaggacaaaaatactaattacttttaatacttaataaattattattatttaggatattttaaattttgatattttgcatgcttttcgaattatggttgagagtagtacacattttgtttatggagaaatatattcagacacaaattgttgtccctgtttaatcttggtccatattcaaaagcaacaactttgttcaaaacatatccagtttagacacaaaacgactactttaatgtttaattctttttggatgaaggttgtatgttactttataccaatcagttactttatatccagtttcctttaatatttactttttacatctaaaaaaccgaatcacctatccacaaactcagagtccattgaccccttttttatttggctcaagccattgacccgtttttcaattcttaagtttgaattgaagaatcttcctgttgaaaggtaaaaaatgaaaaagcagcaacttgctcagttgtactaatccactgaaatataaaataaagctataataaagctaaatttgctgagccaaaattcctacatataaagattattcatttctttacaaagagcctagtttgacaaatcttacataaacgggttacactgcaaagtacaagagacaggaacctgtcatcaactataataagcctactacttcccaacttttttttttttggtcagagcatctagggtatcctatcctgcaaagctatgctaaactaaaatatgggaagaatctatattaccttcttttatcaatcctcttgttttgtctttctttttcttccctttgttttgtgctcctttttcatttctgggatactaaagatatgaaggaatagcaagttgcaacaatcatgcagtcacatacaatgatacatttacagacaggaattttaactatgaaagattgccatgatttttgttgcccccttgttctagctacaaccaaccaacccaccatcagtcttcccattctaacaataaaacattaccctcttcacattctccttcaaggcaggcaatggccggacccccaagtctcctgccgtcctcgttcccttagaagggtggccattgcttccattttcctgcatctctggttccaggtagaatcgagctcgaaaggcagccaaatgcgcataatatgctggtggaactgcagatacaagcatatggccattagaatgcttgttaaactaaatcttatatatgataacagctatgcctataaatcacaagctaattctgttcttaaattattagcttttggaaagaaagagacatgctaaacgggaagctttcgagtgacttcatcagttacataccaacagatacagatcgagtgcaccttgcgtacgtataacagagattgtttgttaatgactggattgcatcagcagtaaaattgttctcatcccacaaaacatgataatgagctggccgacttgtaccctggccattgaaagagagatatcaattgctgtaggttctaaaatttctaatttagtacttccactgttgaaatat

SEQ ID NO: 194464 - DNA, 2393 bp, Cannabis indica
ttgtaaatttttgcctaaaatttaatacttttgtaaaaactccattgaaacacgtcaccattgtgtattttaagatagatgggagggaacgacgtcgtgttgggggtgtgtttcaaagaagaaagaaaagacggatgaacaaaacaacagacatgagcaaataatcgaaccaaaattcaaaaatcccatcttctcttctcttcccttctagccgtagccctagctagggtttctccgattctacagagaagcaaatgaaccagccatcatcggcgaagcccaatcccattcctaaccaaaaccctactcccttgatcaagaacaacaacaaccatgccaggttagctacggcggaatgcggcaactgtgggtcgccgaatcggtgggttctccaccatgttcgtatcagaggcatccatcgccgcctctgcacgacctgcgtcctccgtctccacccttcattattctgccctggttgctttcagttctacgattcgaacaacgttcctcctccttctaaacgcctcacctgctccaaatgttcctctttcacccacactcattgcgctcaaacgccgccaccgtcgcgtccgccgccgacttcttcttcggcttcggttatggcgtcttcttccggctcagcctcttcttatctctgtccggcttgcgcttcccccaatttcaacttctttgacgttgattccgaacccaatcgagcgatagacaagaaacttgctcttgtcttgctctgtgctgctaagatctccgctgcttccatgaccaaggccgtgatcgttgctagggctgaggctgagcgacgagtccgcgaggctgccctagcccggaagagggcgaaggaagccctagataacttggcgactctcttcagcagcaggggagagaaagctatgcgcaaggatgttgttggcgatggctccgctgtggtttctgggtcccgtaaaaacccacttgctcagaattcgcaagtgggaaaggcgttcaatgggtttactcctcctcctcctaggcagaatccagcgaatcttggttcctctcaactcattgaaaaaaaagataatcgggagcgcaaatctgttgttgatcatcatcttcaccgcccaacaaccctccaatctaacggtaatgtacatgacaaggacaaatctgtagccatggatgctgacaaggaaaaggttaagcttgaaccaaagatacaataaatgaaataatgatgatgatggtgttcgtccatattgaaatttatattaaattttttttagctgttttatttttttaagggtttggttgggactggtaggagaattaagtaaaaggatgagcttagcaccccccatgaattgattatgttgtgccatgtcgaattttcttcttacattttgttcttcttctttcagtttattgctttgttttcttggttctgtgattactttggttctctttgttgatctgagtattatggctcctccagtgctattaatgtagtctagtcattgttgtagtgttgtttagtgaagataggcttaagcttagtttttttctcttttctgggttaagtttgttgataatgtccaccttgtatgtatgtatatataataatgacattgatcattatgtttggtaattcacattccacaaattactgtggtgttttgttataagaaagaacataaccaacaatttagatatcttttgatgacaataattatatctaatattgtttagtcatgaattgtagtgttaatggattttgatgaagctgatgttatttattttgaaaatttgcatcatgtattgatatattaatgtcaattttgaacttattataatcctcttcctttctctacttttactgttgtcaataaagactaccacactttctttcgtatgaagatttaatatttgttgtatgaagattttagtgaatgcaataatcacatcacccatacttagaattttctatattgttaggtgatttgttgcccattcatgaagactaatttgttatagtttgtaatcttatagtggtcccggtctaattgtagaatatgttgtacctttatagtggtatttttcttccatgatatcggatatccaccatagaggattttgattacatttttgatggattttacttaaaaaagaaaagctggaattaatgccattatataacacaacttcactccgtagctatattctttcttttagttattttatttattatttgatacttttctgtaacatattgttgtgtcgtgtggtatggtaatggaatggaagttttgatatcaatagtgactaggggatgtacatctattggtttgggaggtatatcttatatattttcttactcaacctaaagttcgggttgctaa

SEQ ID NO: 194465 - DNA, 1696 bp, Cannabis indica
atatatatatattaacacaaattttcttaaaaatttcacaataaaatgtacacataatattgtttttattctggtctatgtcaacgatagagttggaatctttgttattgaaatgtataaaatccttgtacgtaaattataatgagcgaaaattccactctactaatatgcacaatttgagccacacaatggaaaagtctcatttaatatctgtgcccaacttggatcctccaataccatatcaaaatccaatccttatcgttaacatgtagggttaaataaaaatacaatttctgtgcttttactggttttttgcttttgtttagggaatctaagtgtagttgaccattatttagccaaatatattttagatttttcttttgttgctggtattcactaattgcagacttgtcaatacctctgtaatccactctcttttatgaaaattcgtttttcaaaataaataaataaataaataaaagagaattgatttctcattctttgatagtcatattggaattgtattgtttttgttcaaagtgaaatctttgaaatttgtaattctcattatatgttagtaacaaatttaattccatagatagtttacacatttgagtaatgaaactttatttggctgacattctaacgttgtcactcttcctaattcagtttcaagatcttagagcatctttaatggtacttttttctagttaaaatagttaaaaacgtaaaatagagctatttttattgttgttgtttcaaccatgttctctacagttagtatttgattatatagttatattaatgtgagaatttggattacatcatcttgactcttgagggtagtataaagattagttcggtagttaggctgttaatcatgattacttaggttagttagtgttctgttttgctctaattacacatagcaggagtatttggtctcttaaaattattcatataaaagcttcttccacattttctttaaatcattgaaatggttctctattcatagaaaaaattcaatgagcacgaaacatatagtaatatctttttatttaagagattattttagaaacacttcaaaaatcaaaataaaaaaaaatttacgttttttttacattttttctactttttggcagattattacttttttttaacagaaatatggactgatatttattggttattctaaaaaaatgttatttaaatatcgttttcacgttacataaaaatagtataacgttacagtaacgtaaaaatgacgttattattattatttttttttttttttgaaaaaacagctcgtgaaaatgttaaaataaaaagatccctaaaaaaaatgtgatgttaagtgctttgtgaataattctctttatttaatcacacatacatagggataatttcatacatatataaaaacaacaaaaacattacaaaaatatagttgtatggagttttaaatatttttacggtttttaaaattttatttacagaaaatactcttttaatgaattttatgttgtatttttgttgattttttgttatttgtacgttattctttttgttgttattttgacgtaattttcttattattttttttgtaattttcttgttatttttgtgtttttataaaacactgtaacaatataaaaaaagaaattttttgaaggtaaaagtaaaaattaaaaaaaaa

SEQ ID NO: 194466 - DNA, 1093 bp, Cannabis indica
tatatatatatatatacacaattgactgatcgatcgatcatagtgtgcatgctaattaattggtgtggagcatgtgagttggtgggttagaaggtatctaacacatgtttgctatcttagcagctatatatattaattatatttacaatatcaatgtcgttaattaagtatattattcaatcgaggatttgaaatcaagtaatcaaaatgattaattaattaaacactaattacatcagtagtactactttacatatatagatataattttatatataattacatgtttcgaagttgcttcggacgagaataatgggcttcatgttatatggtctaataatatatatatatacacaccagtattatgctaaagctatatatttataaatatagctcgctaatttagttaggtgaactatatatattgcagtctatgtactgagtccaattccatagccctatatctaataaagggatataatggagatttcattatcatctacactacttttgttttatttaataaatatatatagtttgttaattaatggttgactaatatatatagttgtaataaaacttttgtcgtctttatcattaagaaggaagattgattccgaatatcgatggtcatgtatacatatattatatatataatgattaataaggtttattagttcaagctagggatcgataagaaacgcaccaataataataatggacgagtggaaaactctatagtggttttgtgtgcatgcaatccatggcctaacaaagttctatgtatataacagtgatcgctgtatttcgagtctttcaacttattcttgaaaaacaaattattataataagctaattaattaagatcatgaaagattatatgtatatatactcattgattaatttgtaaatgaatgagtttgaagactctttacatcaaagtataatatacacaagcccaaataagcagctcttcatgttttttggtcccccacttcatcatacatacaaaatgccataaaagataagggacgtccaacatatttgttattaattaaaaataatttcagtatatatataactatatatatat

SEQ ID NO: 194467 - DNA, 2835 bp, Cannabis indica
ttttctgtagctaaaattttcaagaacatttatgtacctgaagaagtgtttggagtatctgaaactggtgttcctgctggagagtctgatggagaagcagctgtcacacatgatttgaacaggttagtatcagattactagtattattatgtaccataagttttcatagagtatgaccatacagattattgttttatattaacactcacctccattgcagcggctaagtggaggagtctggacattgcaggcaccagggagtgccaaagcctgagtttgattaatattaatgcctagtgaagagccaccgccattgaggacctgacacaagcactgtggctcagagcggactactgtggcgagctgagagcagcatcctgaagatgggctggaggaatttccggtgatgtagttcaggcatggtgacatgcccaccagtgcattagtacaactctgctgtgcagccaccattgcccaacacgatgtggctagtacaacagcaaggatgaagaaacttctttgtgccattcttttaagattggttttttcttgaatatagaaaaagctcaaagcgccaataagagttgtatgttctgatggtgtttaattggtttgtccaggttgagaattagaagagacgtgagtggcttttgtagggaaatgggaagaggaaagagacaaaagaaaggatggggtatattggtgaccaactcttcctacttctggtaaacgagtacttgtttgaaacctcaaaatatgttgtgcttgcaagatgaatttgacttgatatggaattgattttgtgttattttgatggtcggttatactggtgaacgactcattctaaactatatatgaaattcaatgtttggagatttacttggaatgaaaatgtttttaagaaaaatttggtaatttgagccacaaaggtttgtttagttaaaagtcagaaagaatcttaagaagatggatagagcagatagaagggtggtgcacttaccccgtccggaatattgcatggctccttgtgactgtgacatctgtccctgcttgattgcttcagattctcagctttcatagacacctgtaaaagatcgttccacctatgcttggctccatccattccatcgggctagactgagaccttaacgggcgcttcgccccgttttagccgggctgtagtggaaataggattgggcagttttgtcaatatcaaataggataaaatgggtttttggtgttgtgttcttctgtaacagttatcgttaactgttattgaatttatcttttatataaataaaaataaaaacatttaatttgagggtacctacctgtttcattaaagcaaataccaaagttgaagcaagaaccataaatataaataaggtaatttgtctacgaatgagatttcaaatacttttcactgaagattgaataaactcttttgcagtggatcaacaatacatcagtggttattgtgttatccaaaactttcactgaagccaaattgtgacggagtggtggaaacttttttttttatgtcatgactttgtacctttaagctatgtaattctgatttttgaaaatgtaatatttggctcattttcctatttttattttacttgtggagttggaatactttatttttttagtaaggtagcataatttggcacataatttccataaaataacataaacataatttgggaaattatttctttattgatcactacctttaatttgcaattaatccatcattttaatgaaagaagaaaattattaaaataaagttgtgatggcgtatgagatttaccagtatagctcataataacatattataagcattattgttactaaaagagtaagtgggacatggagaattgagttccttcttaataaatctcattaaagagtaacatatatccatatatgttataatcattgttacttaaagagtaagtgggacatgcagaattgagttctcattcggcatatcatattttaacaaaatgtaatgacctatatatcctttaaaaaacactcaaattacatacaatttttatacaatggtatgtgattaatctcaaccatataattttaagtgatgtgaacttccttaatgatataaataactaatatttgtacacattattgtgtgtaataagtgtacaatttaagtgaacaatacacatcattatgtgtaataagtgtatattcattcaaatttgtatatttgattattgaatataaataagcttagggaaagagtcaaaaaaaaaaaatgggagtgaactaatttctaattttgtataagttataattataatatttttatatgtctatgtataattgtatattgtaattattgtacttttaataaatttttaagaaactttaaataatttattgtccaataaggttttttgtttatgcgtttatgaaatgtgttgattgaaattagatttcaacacaataaggtttttataactttttgaaaacatgcgagaaatttacaactttatcatcgtgtcaaaaacttccaacaaatttccctcccattcaaaattgaaaaaaaaaataacccttgaaatcactccctaccttcacaaatttccctttgttttaaaagtactaatcacgtttaattttgttttagcttcaaacaagaaaatctctaatttaaacggtaaagcgaatacgttgaattatactgcaaatttacatatatatactacaaatataatttttaggcggcaacatttgtaatttaaagctaaaatctttaatttttatttgatttacattgaatcgtaatatctccagtgagaatatttg

SEQ ID NO: 194468 - DNA, 654 bp, Cannabis indica
ccagcaactactgctatgttgtcctcttctttagttaattatacaccagcaactactgtgaaattcacaccagcacttctaaatggacttgtcaacaagcaatctgatgtaaatttcaacaaagttggctcttctccaactgtccttcctacaacaaatcatgccattgattcggttgatgtggatgatctcagtgatattttcataccagatattggtactattgctacatatcctcccaatccaactttgacttatgctccacatcattgcaatagcaaccagccgctgaaaatctcaacaaatgtagcaactgatgcagttgtttgttcatcagtcaggcagtctatggacaaagaaaatgcatccccaaaccgattctttaagaggcaatccgacaatatttcactaaggaaaacattgaagcgatgcagaggaccaacacaagctatgtactctccaaacttgtctactagggaggatacaaacctgaatgtttctgaacaattggaggatcagacgggtttcatggacaatacagcggaggctgattctcagccccgctctcagccatgaaaattgttagttggaatgcgcgggggctggggaacccgagcgcattcgtcatctacgtttgcttgtcaaagagcaatc

SEQ ID NO: 194469 - DNA, 1601 bp, Cannabis indica
tttatccatatatctaatcatttaataaaaatctatagtacaagtaattcctacttttttaacaataacttgatagataaatgattattttgttaaattttttttctttaataaattagcaatagttttgatctttacataaatggtagtgaagaatgtgaaaaaaaaaagagccataattcaaaaagacaataaaattgtaaatgaacaagttttgtaagtggaaactatagaaaaagtttaagctaaattctttgtctaaccctttaatatttgaggatcagaaaactaaaacgcttatataagtgacccgaaagggactcgaaacctcgagttttgtgagagcaaatcacatgtctgaccatttaagataaaacacttatctaagtgccccaaaagggactcgaaacctccgagttttgtgaaagcaaatcacatgtctgaccatttaagataaacgaagactatgcaacgcctacaatgtatgcattccaagcatcttgttgttcgaagtgcttcatctcctcgtattttatgtctcggcctgcgccaaatccaaccgtgcttttgttctctcccgtgtttggcatttgcctgagccaaaaatggaccgatcgaaatccagcctcgtctaagcagtctttgatctcgggcaacgaccacctaataacataacacacaaatgggaagtttttcgttatgtttttagaactttcaaacccgaaatgattcagcttaatacatatgcaaacactagagtctaacttacagcctccaactgtaggagaacgcgtggcgtagtttcttctgctgattcttgaagtgaaaatggagactaatccttgtttttcgctcgaggatatcgaattctgcttgctcccatacatactgcacatgacagcaaatgatttgaacagattgatcagatcaactgaagtgaaacataaaaagatggaatttaaactataattatagagaaatgctaaaggcctaacatcagaagtaatttctacatcgttattagtgcaattcaatatcgaattccactcataagacaccacctttggtgttagcaccataattacatcaacaatttttactcatacagtttcatgtttaatatttactcttttgatctttctgttatgttatttcaaatttaataaagaaagtcattttaggatgtgttttcaatcctttcacagacaaaaattatccccgaataacagtattacacgtcaagtttcaacataccgtaaaattggcaaatttcctctgaagtcttaacttttgttccgatgaagtaccaccgtacaagtccatcacgaatatcccgcctttcttagacaacacagcaagagcgtgcttgaaataccgcaccaaatcagctcgtgaatgaagacaacaacagctatagttaaatgcacagacgatgtccctatcgggaagtgtcacattccccatgtacttatcaccaccagccaaggaagtagagccctctggaacagtagattcgattcatcattttctctccaacgaaacgttcctcatttgctcctgagctcaaaactcgactaatttggcctcattcggattcaata

SEQ ID NO: 194470 - DNA, 2467 bp, Cannabis indica
tattctctttggcaatattcttccaacaacttcccactacgaagggcgtggatccatccaatactcgggcttcatgagcataggaaacaggaatgttatagagttcatgatcctgaaagtctttggataaatccgtggtcgattttttcagtttcccgtagcctaagtctccgtaatcttccacaattctgcgtttccctctatttccatcatcattccttctctgaatctcctctttacccatgtcccctgccttcgaatcatgattctttggtgtggactgtaaccccccttctattagctgctgttcctggtcgtgattggtgtctctgttctccgtccccttcatactcccacttcttgcatctcccatggtagttagagaaggagaagaggaagcagtagtagttcttccggtgttgattggtgattgttgcatagtttcgtcgatagagttattcttccccattccttgtctatccccttgcattccttctcgggtcccatttccaacctttaaccattttccataggcagcagtaccctcctttccttcctcctgaatcaaagttggattttgatggcaatctttgtagctatgcccaattttcccgcacttaaagcacatgaacggtagttcttcatactggaatgttatccatttctttgcgcctttgtagggaaggggaaagcctgggcaaacaggtttgtttatggacatccatactctgaatcggaaaaacccatctactaccatcttggaaacatctgaattttgcaccgtaatcacctcccctgccttggttgccattcgaacagtgttgttgacagtcaatagatcgatcgcaacatcccatgcccgaccccatattggaaagctggttaagtcatgtttccaagattcattggaattctccattttccccaagattagcaattagaaaataccatggcattttagataatattctgctttgaattgactcagatgcaaacgtaaaggttaagaaaagacctgtatcgaacttctctttgatcttgagattccattcgacatccttcagccgccatatccctccaaaactttcttgaggaatcccctactgtgatcggtattagaacagagtcggcctctcaaattggattttgcaactgtgattgacaaacttttatccacttcccattcttcatcttcatccgtgacctaaagattgtgggtcttctgcagtatttcatccatggaggaggcgatcacctcaatcccagaaattgggaacccttcgaaagtgagggaagaagacaggtatcggccaagttaaaccctagcagagcgggaaaaaatttcatgtcaaaccctagtgaaggaaaaaaaaaattgattactgtgattttgatttgttgacactttacaaggctaattacgtgtttcaaatattttgatttggatatatattattattagttagagaataagatttattttattttttaaaagaaaaagatatggtttgttttccctttatttatttagttatttaatttgggaacgtaatatatatgatggaatcttacaataatattatagatacacaaacctataattattataactacttttaattattaattgataaacttttcttaaaaaccagaattgtatcacatgatttggtagacaagaaatgagggcattcgagtccctattcataggagattccaaatattgtagatatatagactactatatataaaataaagtattttactttaattttctacctaattaatctcaaatgtttttataatccaagatctagttttggactagatttatgttaatatttataaagctgaacagattgatatggtatgatctacctagccggtcactctaaacctaatccgaaattaatgtttctagaatccaaaattcatgtaatataaacatttaaaattatatgaattattaaaaatttgtcacgtatattaggaatgttgtacatatttactgttcaattaatagatgtgagatttaaaaatttttactgttaacaaattaatttatgtgattaaatataacaaattgtttaattaaagtagttctttcccaatattcaaaaagaaaataataattcgatggaagtaagagagatttttttattttttttatataaagaaagaagaagacaaaagttttattttattattattattaataatgaagaagagaaaagttggaagtagagaagtagttaatatgagtatgtaaatgcgtatggatcgtgtttattcaagtctacttctgtttgatttgggttaaaattaactgcgatgtcaaaattgaaagtggaactatgtgtgctgtggtgattgcgagggatcatactaagtctatcttgtggggtggtggacaaaacaaactttacttctctgacccgttcattaggaaagcgagggctctttgtta

SEQ ID NO: 194471 - DNA, 1650 bp, Cannabis indica
gaaaaaaattgaccattcattcacgaaccttttcaagaatcaagagtactaattaattaagtatggtgatgaatgatgatagcaactaccatgcccttatttcaacttgtgatgtcccatctttactcattcgtaccatgttttcctgtagtctcactaatttaataattaaaaaaaaacattcctaaatatatttaatctcaaatatgaattaatatttttatatatttaaataacctttcatttactgaccaataaatccgttgtcgtccagcggttaggatatctggctttcacccaggagacccgggttcgattacccggcaacggaactttttgcttttaatttcttttattatatgtaaaacatctataagattatttctcgattgaacgtttcaacaagttccgttgtcgtccagcggttaggatatctggctttcacccaggagacccgggttcgattcccggcaacggaatattttgcaaactttttaattactaaaatcagtaaatttaattagttattattattttttttttactttaatttgaggaaagaaggtgtagggccaccttgcagctttgattgtttgtatgtataattgttaatttattatttgagtgaggttttggggctattcttttctagggccactttgctatgtataattcttacttattagaggataaaatattaaagggtagggcttgctttgctggttacacacatgactagtatagtacttctagtgctacacatagcccaatgaaaaatattaaattaattatatatagtttaataaatatacataagaagaggtaattaataatttaaagataaatatataggtgggtacaccataattcatgattgagaattactagtgtatatataaatgagtaaaaaggaagagggggtcatcatagttgtttagcatcaaattttgtttattcatcacatcatgctttttcttttttcttcattgaggagtttttggtccaactacctcttattatggtttttccaaggataaatttgtactcaatttcatgcactaacattttaatcttggaagctacatttaaggatattttaatgtacattttacattaattatttattaaaaatttaagtgcaattggtgaagaaataaatatttatttaaccttatttttctttttataattgtcgttgagtaagtttgacaagatatcctagtatattcaaaagatattgagtgtgtcaaaaaaaattgctaaaagagaataactattttataaaaagtgacatgtaacataatttatttttccaaatgtcccataaattaaaggaatagatctttaattatttattatatttgaaatatcaaatataaactcacataacttattaaaaattagattttttagtgcacataatagaaatatgacctataaaattaagtataaattaaagagtaataaaataaaagtaaaaattaaaatagaaaatgaaaaagtgggtgtagagtataatttttctaaattaaatatggctaaaaggaaaaaagaaaataagaatttttttttatttttacattttaaaagttttttttttttttttttgtatttttacgtaaaatttactatagtcaattaatagaacaa

SEQ ID NO: 194472 - DNA, 1030 bp, Cannabis indica
acagaacaactaacttctaacaatttgcctaactctaactaagagttcacttatgtatagcttgatagtgttctaagtaatctaaaatgttgcactacttgactcacattttactccaatttgatgtaacataagttagtaaataacccgctaagatttttctaagggtgatctttcccaactacttattgatttaatttgagagttataaaatcaactttgtaacttatagttttataagatatatgagttacaattcatagtgtaatataggagagttacacaatttgttgtttaaaaggagttacactaatcattaaactttgaatccagttcaaaagattaattgttacctactttcgtgagcagttttgaacaacataataaagagtactgttgtaacttccaaattgtcacaaatgtgtcataatgctccaaaaccgtcatggtaatctgattaagcattattgtggagtaattcaataaatctctggaaaaaaaaagaatattttaaaaaattcctaaagtgttctggatgtatggtgtggaagaaaaatagcttttatggaagccatttaagcttttgttagtattcttttcctactctttgttcttgtattaaattacttgcaatattatctttgattatgtaaatagctcatattgttttattctcttgtgtaatattgattattaatatttttgtgttgattggggttgtaactattacatgttctagtgtagtactcaactataaataatccttattactttaggcctatttataatatttgttttcttatttgattttttacatagcttctttactttatctttttctttatgtaaatattttgggagaattaaccatattattttttaacttttttttaaaaaaaaattacagttttgattgttcctgtaatttttatatgaattgctatataaattctggctgcaattgagattgttctgttagtaaaaatatttaaataaaaattgatttaaaatgtaaaaaaaaaaaaaaaaa

SEQ ID NO: 194473 - DNA, 1913 bp, Cannabis indica
gaaacaaaaagctactccattatcaatcccacaacactactcttttacttttatagttagaagaagctatttctattttgaaataagaaagccattctatgaatatttttctagtgaaatatgatttctccattacaaaataagaccaccaattactactattagttatcattatctcaacttttaaccttgtctagaattttatctgctatgatttgttgttcttaatgtgtacggataactatagtatattaatcttatctaatccgtttacaaaggagtggatcgttggtataggaatgattcgagatgctagattaataatagatcatgatcagatcaagaagatcaggtacagaattatggtggtagctgctaatcattatagtattgctcgtattgcaaattatcaagccgtaacattttgttcagagattggaaaatggacaactgattggtataggttttcaattcttaagattgtattcaaccatctgttccttacaacaatgataataccttatattggctactcaatcattacagtacaaaatatatttctaaaataatgtcttacaatgatttgttgttaactttcctttcaactttggtgagtatcggtgttttaaagctgacttaattagttaaaggtcgagaagaagcattatgagaacacaaggaaaataatggtgatgacttcaagattaaaatgtataatgccgtatttttcctattcaaaatgcatcatttgtaggaatatgatattgtagaagataagtttcaaaaggtgggtgaatttagctaaattatatgaataatttgtttgtttgttttaagtgtaaggttatttattttgcacaacttagatgtgaaagttagattcacttttttaccaactcaattaaagtaccaacacagtgattatttcacattcgttagatttgacaattctttttgctattagaataatagaaaagttattgataattcttctatatatatgtatatgtatactagaaactctttatttttaaagaatgtggtacataataagtaaaattaagttagaaatttagtttattaattttattattattctactataaatacataattgtactatttgacaatataaaattatatttacaatttgaactagttatacaatactttccaactccttgctttctgagttaataatattgtaaaaataataattatgatcactaatatcattgatttatcccaacaagcttgagaatctaattaatgaaatttactcaaactattatatttgtagtaaaacaaggttaagctaataaaattgaataacagttaagagtgagaaatggctaagattccaattagctataaaaaaaaatataaattttttaaaaaaccattgatccaaatatggaaaacgaagaacaagagggtagatatataacttggatcatattcgtagagatgatgcgttttgaaaaggaaaaatatgacattgtctttgttaggatcaaaagtatattacaatggtcgaccttccaaaatatcatctgtaactcttatcttgaagtcatgtaagaaatctcatccataatcaccatcacaaataaaagtttgaaagaagcgatgctttcttcggttgattttttttttttatataaagagaataaggtaattagttccctgttttgattggtaattctcattagtgtaataagaatggtgactgagatgggaaagcacttcaatcaaggactagaattcctttggattgtgatttgtgatatgacaaggtaaaatgtatgacaagttagttctctgcttcactaacatgaaatgccttttaacactttccagacttccagtcgatgtgatgtgacattcgaaaatggcagctgctcggtctcgat

SEQ ID NO: 194474 - DNA, 862 bp, Cannabis indica
aaaaccactagttgaaattttcatcaccagttgaatttcatgataacatggaattttcggtgtaagaacaaggacctacctttatatgaccaaaacaaaaggacaaaaccaaaaacgtataaatataaaaatggacaccttttgcaatcactcgttttctcatatcagctgtcactttataaatatgtataatatataaatatttatatgatcatcttgctcatattattcccgagaaaattctcttcttctcttgggggtatcttttgtgttatggaatgaacctatatttatatgtacgtatatagctactagttagctagctagctagtgatgactaatgtttacgcaaatcttttagcattagtgtaatgatagggtgttgaagttacaaattaagcttaaaaatatattattattattattgtgctagtcaaaagtgagtatttggaatcattgtttgtgtgtgcttattgattataaattaaaatattaatttctttctctatactgctcgccccattaagtttaagttgtctccctttctctcttataggacatatatataatgtttattataccaaactaaaattggtaaaacaatagctaaaaattgatgagattcggtcttatatatataaatcatgtgtctccttttttgtgactcaaagttagatgcttattgtttctttatgggtttctattggcattttcgatagtctcttatctgtatctgtaggttgtcaatctgaacagagaaagaaagaagtaaaaataaaatgctagagaaaagagccttttttttttctgaggttcttgttccacactgtctttgatgcatatatatatagttatatatata

SEQ ID NO: 194475 - DNA, 1517 bp, Cannabis indica
agtgggataacattctctatacaataaatcatctgaatatttaagtttttatctttttttgtcatgtcctctgacatggtgtgattttgtcatttgatcttggttttggttctgttattgtcgtgcgtttggtttctttgtggtgggttgtttgtctctctacagtatatggcatcatccagttctcatatggatccaaacgatccagatacagaagtcactcttgatgaggaagagtttggtgggctgtccttggatgcggaggaggatgaagaagaatatgacgttcgttggtgtctcgtcgggcgctttttaaacgctggtatcattgatcttcaagctatgcaacacatgatggttttcttatggaagcctggtaaaggattgtatgtgaaagaattggcacagaatcgatttttgttccaattttaccatgaaatagatatcaaaaaagtcattaacggaagcccatggacgttcgatcggaagcagcttatttttgagagattaaaagccggtgataacccaaggtcgatcgttctgaatcggcttgatatgtggatacaaatccatgatcttcaacatggctttcggactgaacgaactttacagcgaataggtaattatattggcaaatatattgagtccgatgaacataattttaatggcgtttggcgtgagtatttcaaaatacgggttactataactcttgatcaacctctgaagcgtcgcatgaagattcggaggcttgacagttcggattggttttgggtgaacttcaagtacgaacacgccccaacattctgcttcatttgcggtattataggccacgccgatagaaactgtccgacaatctttgacacgcctgaagaagaaatcgttaagccttatggagcttttatgagggcgacagttcaacggaacaacaagctcattggatctcaatggctccgatcgggaaggctggatcgactggatcggcaggagggtaatcgatcgaatcccactggaagagaaggtggcgctgctacaggtgtgaatgcagaggcaataaatgtgagattatctgggaataatggcaataatcgtgggaagggagttgatggggggattcaggagccgattatggtgcaaaagttgggtccggattttgaggagagtaatggggggaatatagatattaatatggttaatgagggtatgaatgagaatgttattgaggaattatctatatctgaattaaaaaggaagagacaaaattcagttgggcttggaaacttgggctttcaaaaaagtgatatttctgaaaaagggagactatggtaacaaaaaacttgtttgggcgggcctggattccaaggctcgccaggaattatgagtactttgagttggaattgccgggggcttgggaacccacgggcctttcagttcttaaaggatctgttatccaaagaagcctaagtttattttctttgtgaaactttgtgtggaaaagcaattcttgagaaggttcggat

SEQ ID NO: 194476 - DNA, 2104 bp, Cannabis indica
agttagatgtcgtttttctaaagtggtgtcgttttcaagaatattgtcgtttttaagaaagtttactttttgatgtcgtttttctaaagtggtgtcgttttcaagaatattgtcgtttttaagaaagtttactttttttttacaagtagatgtcgtttttttcaataacgttttgtttaaagtggtgttgtttgcaagaatattgtggtttttatgaaagtttatggtcaatttgtcataattttggtaaataatttatcactccaacattaagatttttgtatatgaactttcacatgcataattacataaaatactatagtttataaaaattttatatttttatatatttttatttttatgataatctaataaaaataaacacaaaaaataacaaaaaaaaaattgacataaaactaatagaaaaaataatatacaaacaatatacaaaataacaacaaataataacatacaaatattaaaaaatacaacaataaattaacaaaagtataatataaaatacagtaaaataccatattttctgtaaataataaaggaaatgcatacaagaatctacactttgcaaaaatgcataaaagcactcccaacaacttttacctctatcctttaaaatacatcacaaaaactaatatatttttacatgacactatgtataaattttttaaaatacatcactaaaattctactttttaaaaattttaatatattttaattattttaaatatataatactaatatatatatatcctacataaaaaaataattattataactcaaaacaattaataaaatagttcaaagcaataaaatagtattttataaatgtagaacataaatagtaaattttaaattttctaaagtggtgtcgttttcaagaaagagtttacaacatgtttttaatacaattctttaaatttataaaaatttatctattttagagaagctgttgtgactgctctaagcaagcacaaattcatcggtgtatcaagtatatggtcgtttatcttaaattttgtcgttttattacaattcctatcgtgtttcaagtattattgtcgtttttattacaaatctgtcgttttaaatcaaagatgtcgtttgtcgttctatagttactctctctgtactccattttccttgttctgccaaaaaccaagtctttgggttgtcgttgattttccaagacgacggcaatggaggagaacaactccgccaaacacccagaccaaccatggcgggtccttgagttttacagcggcatcggaggaatggtagttgttgattctcaaattatttgaaaattttagggatgaattggtttggtttggtttggtttctttactgttcttttgtgttttgttattagaggtactcactgactagggcaggagtgaatgcgaatatagtggaagctttcgacattaatgacaaagcaaacgatgtgtatgaattcaactttggtcaccgtcctcatcaggttttttgttttctttgttctttgaagtaaacttaatctgtttatagcattaatacttgtaattttggttagttgctttctgaaactatgaaatttctggtttgaggcaaatctatagtcttctgctgtttgtgttcaaaattgtagtgtattgattttaactcattttgtaattgttagaaaatcataaaatatcatgatacaaggtttgatataatttagaacacaatgataaattgataataattagaaatacatgcatgagtgtgatgaaataatatgaatttatagagtttggcaaaggatttgatttgctatataatcttagttgtattgggctttctcataataggtttcagtttaactaaaaaactcatacttttacttcgatttaacttcacataaatgctaaatcccattaactgtagatcaccaactatctgagctaacctatatttttataaaaacaattaaaacgttaatgtaagcttaaataaaagttttacaataacaataaaatttacaccttttcttttttagagggttttctttgttaatttgttaggcatgaagggtgtgcttcagttcttatgttttgttgtttgg

SEQ ID NO: 194477 - DNA, 1937 bp, Cannabis indica
tgtggcagtatgtctgatgctaggaaactgtttaactcaatgccgaaaccataatttgcaaatcttataatgccattattataggatatgctcgaagtggggcaaggcaatgaagctttgtacttattcttgctgttgttgaagtctggtcttggttatgatgaaatatctttatccggtgcacttggtgcttgtgcggtgatgaaagggcatgtagaaggacttcaactacatgggttggcagttaagagtcgtttaaggtccgatatatgtgtttaacaaaatgaccattttagacatggatggaaaatgtggatatctgattgatgcttcttgcatgttttctgagatggttataagagatgctgtctcttggaatgcaataatttctgctcatgaacagaatgataacagagatgaaacccttcaaatttttgtttgcatgctccgttcgagaatggaacctgatcagtttacatatggtagtgttctcaaagcttgtgcagctcaacaagttttaaatcatgggacagagatccatggaagaattatcaaatctggattgggatgggactcatttgtaggaggtgcccttgttgatatgtactgtaagtgtggaacaatagaagaagcagaaaagctacatcatagaactgatgaacaaactatggtttcgtggaacgcaattctttccggattctctcagcaaaatcaaaatgaagatgctcaaagattttttgttctgatgctggagacaggcatcaagcctgataatttcacatttgcaacgattctagatgcttgtgctaatttggctactgttggactagggatgcagttacatgctcaaattatcaagcaagaattgcactcagattcatatatttccagcacacttgttgatatgtactcaaaatgtggaaacatgcaagattctcggctgatgtttgagaaagcacgaaagcgagatcctgtgacatggaatgcaatgatatgtggctacgcacaccatggtctaggagaagaagcccttaaagtttttgaggatatgcaacttgagaatgtgaacccaaaccgttcaacttttgtttctgttcttcgcgcttgtgcacatattggaaacgtcgaaaaagggctacattatttccattcaatgcaaaccgactataacttggctcctcagttggagcattactcgtgcatggtggacataataggcagatcaggtcaacttagagaagcgttgaggcttattgaggagatgccttttgaagctgatgctattatatggagaactttgcttagtatttgtaagcttcatggagacatagaagtagctgaaaaggcagctacctctttattacaattggattctcaagactctgctgcttatgttttgttatcaaatatttatgctgattctgggatgtgggaagagatgtcaaagatgagaagagctatgaggtctcacagagtgaagaaggagcctggttgtagctggattgaggtcaaagatgaggtaaatgccttttttgttggggacatggcccatccaagatgcaatgagatctatgagaagcttcatttgctagttagtgaaatgaaggtggctggttatatgccatttattcatttcgatgaggaggtagctgaagaagaaatacatgaacaagatgagcttggaaatttcatgtacaatgcttagttttgcaactatttttaaagatatgttaagtttctctgaaacattgagatttttgagtaaacaaaattgaaccttttgtccaactaatcacagaaggatttaaattatatctattatctactcacaatgaaaagatacatcatcttataactagagaaaatatactaaatgatccaaatttagtatcagaatattttttgtgattttgaacatatgattgttattttttttt

SEQ ID NO: 194478 - DNA, 2426 bp, Cannabis indica
tgactgtgaagtttgtcttgctgtaggtaataaagcttgctgtatttttcagctatcccaatgctcaatgtccgagaagggtcttggatttgacaatggttagaagtgaaataaaaatggaaatactgtcattgattaagctactaacagatagtaaattgagtttaaacttagggacatataaaacattgtataaggttataggagaatttatttttactgttcctataagttcaatggtgacagttgtagcattaggtagagtaacagatctattagtaatatggtatcagtagaatcttcaagaacccattaaaagcttcttcaagatcattcaaaaagcttcatcaaggttcaaatcatggtgagcactcgagcgcactcttcagctacttccacagatcctcaacaactagtggtcgatgcttccaccgctcctccaccatcaaacgcttctgcagacaatctgcctcaatctgcaccacccataccagaacagatcagatcagatccaattcaatgtcctgcgtatgaagatattcgatctccttattacttcagtaatgccgatcaccctggtcttgcattggctactcctctactcactgatcattttttattattaacacacaatttgaatatgagcattgctattaggcaccagtggtgcctagtaccttctcgacatgttacgttgcgattggctaacgatactccctaaaagatattatattaaattatatggaacccgatacttagttggacgtccaatagcgatattgacaaataggagaatgctaggcaccacgggaccttttagcatttctctactttgaatatacatattatatcaatgaaaaatataaacaacaattaataatgatatatatatatatattaatataatgatatcacatttcttccaccaagcaccaaccatcatcacaaaagaatgagcttttgtgatgtgggatttgtgttgaaataattaattaatactcggtaagtaaaaatatcgagaagttggttattttccacaataattgataagccttaaataatattattcaaactaaagaagacctttttggtgctgatctttcttgcatcagtatatacatcataaaagcaatggaaaatatccgtatcaaaaatattgttctttggtccaaaatgctaaagataataaagctcttgcagattaggatcttttaagtttgatagaatcgaatagcatgacacataagacactagtacatatatatattgccactcaacacgccatatatattttcctgctataatatatatatacatatatataattttcatggtagaaaagatatcctccatcagcaactcttatagatgatgcatgaacccttttcctttttgtttgaggttgacccaaattcgtttattccttttaaaatatatgttcattttctctttttcaggatcacttatattatatgaacacgtcgatcgaataaaaatagatttcttactaaaatataaataaattaaaaaaatagaaagaaaaatgaagttttgttactcatttatatatgtagtgaatattttctttaccaaatcatagctggtgacagccaaaagtgtacaaatttttggtaataaaattcttattcttttctcccccaataataaaagggtgatgatcatgtgataacaacatggaatatgaaatttatttggatacctttattatataattatctcttgaaaaaatctactttcacctgctcttgtactgatatgtaatctgggttaatttcctggaatgcgctatttacagttacctccaagattattacctattcttgttgtagagtatgaactacttgttaactttttatttatttacatttaaaatattaaatggaagaaaagaatacttttattttccccttctacgctttcatcatactagaaatttccaacttccaagagttatatgtctcacgttaatgatccttatctcttccttttcttgtgaattatgattcttagaaattttcctagaaaggaaatccaactcagcaagtgtttgggatatatgcttagtaaatatagaaatcaaatgtacaatttaagactcaaccaaaataaaaaatattgaattaaactgaaaaagaaaccttatctgaatcaatggttgaatacatgaactattatttattttacttcaaaagctactaatactactgcatcatctagagctacctaacatgatttatattttacttgaaaagcttctaatactaatgcatcatctagagctacctaacatgcctaatttatctttgtaatattattgaccatcttaataaaattttcaaagattattattatgtaaatgtgagaaatcagtgacatggaggttcctatcattttttatttttttt

SEQ ID NO: 194479 - DNA, 1523 bp, Cannabis indica
gctgccaatcctattctccacgctcgcacgaagcacatcgaaatcgacttatactatgttcgggataaagttctcaagtctgaattacaagttcaacatgtccctgctctagaccaacttgctgattctcttaccaaagctgtgtccagttccagatttgcaattctcagagacaaactcagtgttgtttcctcaacctcactgagtttgaggggggctgttagagaataggttttgtctatgcttgttttagttacaactcttgtactgttctgttatgttagttttaactacggttataactaactttctactgttgtaactgattctttaatttcatttagctgtgtatataaagctaagtcttttccagtgtattcaatgaaatcaattcaataatacaaacactggttctttactctggtgttctcttacacagactactccaactttagcaaaatactgtttgagctttttgataattagaaaacaaagaactcttaatttgatctaataagattattagtcttgggtattattattaataggagctaaacgtctgatatattaatagcagctaataataacaactctatagtactatttcttttattgaaagcaagtaacattatagtactattaatttactcgacttcattataaacacaaaagggcacaaggagatggatattatgagtgttcatacaaagttttcacaaaatgttaatttgagaacatcttaaagaagaacattgatattcacataatattgttagttatgataataactttttattcacttatatattataaacatattaaaagtaataaaattattgaaaaaaatgaataattattgttaaaaaaaaatagtttggtttagttttgaatgttcaaaaaaccttaatactaatttaatttgaaaaaaataaaaattcaaccaaaccaagaaggaccctaataaatattggatacaatgtactgaagcattgcaaacaaactaaaataagtaagtcatgttgctcgatccctttctataattggtacctaccgtacctattaaatcaaaaaataattttttaatgagatattcatattccaaaattaatgaaaaagatatatttatttggctcatgaagaaaataaatcttttcattaaaggattttaaaagaatgatttatttttatggaaacaattaatcaatataaattgatctaatatgattctaaaggaagaataaatagttccaacaaaattttaatgaaattccattttcattttttgatttaatttatctactacatcaccggaataaagggtacaaatttaccacaactttaaattagaagacaatttaaaaaaaaaaaaaaaactaataatattatgtatattagtaccttaaactttaacccaactttagtatgtatagttttaaaattagtataataatcagttctaaagacaaccaaacctaaatctaatctaatagtattctctcaacgttctaagtcaattctagttg

SEQ ID NO: 194480 - DNA, 976 bp, Cannabis indica
ttcctagtataaagtaatctccctaataatgtatccttaataatgtccaaccaaataatcatgattttcaaagtaataaaatttttttccgtttagcatagataaacatgaaagtataaaaagggaatctcgaataagacatctacaagtatatacccacatttctatagactatatatagtaggaaataattaatatatttttcaaccaaccaatagtgattatcaccaattattcatttactttcttaacagatctttaccctcagtcacgttagtaaatataatgtttttgcttataataaaatttacaagaaagtacagatactgacgttttaccatatatatatacatataataattgtttattggttttcttgactgctgttacaagatttgtgatgtaatggaattggactttaataaaaagaacattagctaattaagggataacaccttattattttattaacctacacatagatgactacgtagaaacaattagcatcgcaactcaagtcacaacaaataattagaaaggttatatagagatcatatataaataattaaggatttgatgagtgtcttgagaaaatgtaagccagctaaaaaagctttgagtaattatctagggtttatataatgacaagttgttataacaaaccaactgtactgtatgccaataactaatattaattaaaggagtggaacttaacggaataagatttctaaaaatcgattgtggattttctttttacaatatactttgctgacataaaaatatggactacttatccaaggctaaaaattaaagacatgtccaaatctcaacgaacaacgataacgaaaacgaaagcgtaatgttcaaggatacatggttgtcgtgtatttattccaaattgacttttatctttaaattgcatatttttttatttaaaaaattaattgcaatttatatatatatatttagaaaaaaa

SEQ ID NO: 194481 - DNA, 1236 bp, Cannabis indica
ccattgttgataggaatttttttattttaataattcaaaccagttattttttctatatttttacaaacttaaacaataaaatttttaaaaaaattaaaaaacaataaataaggtaattcttcatattaataatagggttacacataaataacctaaccttccgtttgtaataactaatttcatgccatgatacagaaaagtaacctaattttccgtttttaaaaaaactacatgtattgccgccggccggtgaatttatgtcgttttcttatttccagcagtaggggtattttggtaatttcattaaaaagtgtgtgaaatctcgaccattattttgttgaaatttcagttcagcacggaatggaatgaattatgtttgtttgtttgtttattatatattatttcaaataatttctcaatcagaggctgaggcacaaaatatttaaggcaataataaataaataaataaataaagcttaaaaaatagtgagacacacaccttggatcaggtttgatagagtcttgaatattggagtttggggaaacaagttggggaaaaaaattgggggatttcaccattggtgaggtttctgtagcagaagcacttcgtgtactattccctggagcttgattttccatatgcatattggtcaagaaattcattgaagaagaagctggagccaatttttctgattaaaaaaatccccaaaaaaaatgttaaatttttcaactttttgcccccaaaatttagatctaatcccttacccaaacattaaaaacaataaataaaaaaattatgtaatataactacctttgttttcagatttattatttgcagccaatccagcctcagtagctctcttctccttcaaaaactgactcaatagagtacatgtctgagcaaaattagacttctccaaggcctttccaactttccagttgggatttttattgccttctgccatttttctttttgggtcccaaaaacaataaattggaatgggtttttgggaagaagaagaagggttttttcccctaaaattaagcttatgggtttggtttagccacttctaattttgagatttgcgaatgattttttagtttaaagaacaaggcatgagggattaggaaatatatgggtatagggctaagaagaagagagacagagtgatgtgttcgtctttctcttgttcttgtgtgagagtctactttggctttgttctttctttttatttt

SEQ ID NO: 194482 - DNA, 1705 bp, Cannabis indica
  modified_base (1681)..(1681): a, c, t, g, unknown or other
cataaattggcattgcagaggtgattgatttgattaaagtgagacgcccagcatgagaaattagtttcattttccatccttcgagcttgttgaacatactctccttcaatcttttgtaatcctctttctttcttctcttgaacacaaatgggttgcctaaatgtctttcggtaccacgaaccagttcaatgttgagaatgcccagaatattatcctttaaaccattgctcatgttttttgaaaagaggacactagatttaggcttgctacaagattgtcccgaccatttctcataggttgagatacactccatcagcttgcttgcctcctttgtgttggctctagagaataggatagtgtcatctgcgaacataaggtgggacactggtattgtagaatgagcgatcttaataccatgtattaaacttcgggcttcggctttcgaaatgagtttagataagacttcttgacaaagaagaaacaagaatggagagagaggatctccttgtcgaagacctcgttgagggatcagttttttgagagggcacccattcagaagaatcgcatacgaaacacttgtcacacaagccatgaggagactacggcttttatcattaaaaccatttgcactaagaactttattcaagaaactccattccattttgtcatatgccttgtgcatatcaagttttaaagccataagccccccaaggcctttcttacaccgaatcttatggataatttcttgggtaagaatcgaagactcagcaatccatcgacccgggatgaaagcggattgaaagggcgagaccaaatcattcatgagaggtcttagtctgttggataagatctttgcaatcactttataagagaaattacaaagacttatagggcgaaagtgatccatactcaaaggaaactccaccttggggatgagacaaataaacgtattgttgagccgaggatcgagcctccccttgacaaagaactccttcaccgtagcacacaagtcttttctcactaagtcccaatacttcctataaaaacatcctgagaacccatcaggccccggggccttcaaagggtggagacaaaaaaccacatccttaatttcttcctctgtaggaattttaaccaattcatcattggcttgatcatcaattttattagtgaacagcccatccaactcctcattcagacaaggttgagaagaggtgaacaagttcgaaaaataatcattgataacacttgcaattttcttcttttccttccagattctgccctcattatccttgatagcccaaatactatttcttctttttcgtatgactgtggacgcatgaaaaaatttagtgtttctatcccccaaagcaagccaagtctctctagacttttgtctccacatactctcaagtttagaccaactgaaaaggattcgagattgtagaatggattcctcttccttgagaacatctgagatgggttgacattgaatccattctaaccgttgctcgagttttttaatttctccttcgttcacctcatgggttcttcttttccaagcttgcagagctttcctcgacttgtcaatatttcgaatgaacatagcagtagcatctactccatccatggaccataccttggcgatctcttccttgcacgagacttcccaagaccaggncttcgaaaaagcggaatgggatat

SEQ ID NO: 194483 - DNA, 2752 bp, Cannabis indica
attattatgtcagtattagtcacctcactctcttgctcttcttgataatcaattataaatgatcaagtatatattggcactacaaaaaactgttacttttagtgataaatttttagtcacaatataatttttttgtggctaaatgtgatttttagtcacaacaaatgttacttgtgactaaaacataatatttagttacaagttgtcattaatttaattttagtcacaacaagtattgtgattaaaatgcatttagtcacaacaaattgtaatttttgtgactaatacctttagccacgtacctcttaatcacaacatatgaataataatttataattagtcacaacttttttacttttagtaaaaaattttatccctctctaaaaataagattttttgtagtgtggaatcattataatatgtataatattatagtatgtatagcatatatacttaatttagggtaatttaatagtatactcacttaaaggaatatttttatttttataataatgtaaattgtagttatttaaagctacttgtaaattttttaaattttttgaataatttataatactaaaaataaggtttaaatatttaatttattgcatgactattttttttttctatatgcttgataaaaaattgcatgaactttattttgatacgatgaattattaagtttttaaaaatttacaagtattaaaaatttcttaaatactttaaaagaaataaggatgtactgaaatattatttacttttaaagaatgtactgttagggtgtaaaaatattaaaagaactaatattctactactttaccttgttaatttgtgtactagaataccatgtctactttaccttgtttgcagaggtagatgtgctatcgtccgtactactaaaaacagcatcttatttctattttatataatttattagaacatctcataaagagcatgtcttttctctcaaaaaaaaaataaaagagcatgtctttaattgtaatttaatttccttatataatatatgtatatatatatatatgaatttagaaaactactagagaagaaatatatgtctccttaatgaccagggcttaattactaactggtttttcatagacagtcgagcgaaaaagacatatatatataaatattaaatatgaaatatatgcacttagtagagttcatcatataaactatatttcctaatttgttgggatttagcttcgatcatcctatttgtacggaggactaatagggttattggatgttgaagtaagagaggttgaaaattaatatgacattattggtcggtcttaacttttttagacatatatatagttaggttgattattgcatgtaatgtaaacagtgtgcctcatcatcatcggtaggacctcctttccttaattcgttgcccaggatccaatgtttatttaatttttcttatcagatttagaaactaaaatagctttaatttaagagcagagtaggtatagatacatttataatatacactcaagtgttaatgaacaccagctactttatttctcactggggaagggatgctatcatgctagtttataattgagcgttattgttattaggcactaatgtctctagtagtatttagaggtgatgccttttgattgattaacggtattttttaaaaaaattattatatttaattatatgaaatcgatatttaattacactcataaatattttgaaaggtactaattaaacatatgactaaaacgtattaatatttctctttataattaggtgtgtattatatgtcaatgctagtttaatacaatgtgtcatatatacacaacatcttaaatattattgtttcgatcggttttagcattattttataaaacaaataatattatgtttgatatatagggaatgaggagagagacaatcacgtacgatcgagagagagagtaatgtgagaatcaagaatgtggagagacaaaattataagtatataatacaagggaatgtgcactcctacttttggagcatgtactatcctttattcagttttcaattatgaattctccgattaattaattaagagaaattaatttgtatattttattatatatatatctaggaaaaatgacaataatgatatttatatttaggaaaaatatgtattaatatactaattaattagatatccacaattcacttgtaccatatgagtaaccattttatagtaaattttaataataattggtaaaaatatataataaattatttgaccctacaaattgtgttgtatatgtgtaaattatcttattgtattgttacaagagaaatcatccttacttcctccacttattagttgattattcttataatatttggttaattacataagatattgaaaagaattgctaggaaactattatgtataagaagcaagccataaaccttttgttagcatattaaggtcctcatgacttaagattcaagggtatatgagatgagttaaatctccttttcgacatttttaataatgatcatgaatatataactaaatatttattttatttttaaaaaaataaaaataaattattgctacttaacacaatttatttttaatataggattttttattttttatttatttctgtaacccttttgatttggaggattatgattgttattaattttagcaagaggtttgctttaataaatgttgatgctatatgttttcattttatacatttttttt

SEQ ID NO: 194484 - DNA, 934 bp, Cannabis indica
tgtgtgtgtgtgttatatttacataaatatataaaacctcaaaacttcaatttacctcaatggtcacatcaccagtaatcgattgcccgtcattcttagctacatacaaagtatagctctcgtcaacgccaagttgaagctgcaaaaaataagcaagtcagagcatatcacaatcccaagtacctaaagccacttccaccaacataaataataaaatagaaaagtgagagagagagatcgcaactttccgatcaaagagcccaactcacctcttcgatttccgaattgacaacaatcctcaatgttgtaatatcatacacgggttttattcccctcagtaaactaaatgaagaaaacctattagtgtgcttgaaaatgatccgtttgtagcgatcaaaagccgctctgacaatggtggaatttcctccatttccagctccggcgagcgagaggcgtgggtcgacggaaagagtctcgttaccggaagtaaattccgtcggcagaggccacaggtaagtgagggagtcgttgacaaccggtactgaattaacagaatcactcagaacaccggaaaatatgagaattagaaagaaggagaagacatggatcgttgatctgaaagctgtaaaggaaatggtgaacattgttcttagaatccacacacatatggagagcgagagagagagagagagagagagcttagtgttgttgacttgatagtgatcttgcaagttcaatcaatataaaaatatgtgcttacgataaaatatgggtttagggacgaaacagcaacacaaaggaatagtaatattcaaattaaaataattcttatataattatgtgcaagatatacttaattatgctgtttaaatttttctaatagttaaaaaaaaaattattgatatgattgaattttagaatttttgtcaaattt

SEQ ID NO: 194485 - DNA, 1466 bp, Cannabis indica
  modified_base (711)..(711): a, c, t, g, unknown or other
agggacacgaatgatattataactcatttagtgtaagcataggtgattcttactggtttacccttatgtagcagagcaatgagtgtaccgaagacaggttttcctgaacagatgaaagtgcagattcattggaatttaatagagcttaagaccagtacgaacaatttagcaagccaaaataataaaaataaataaaaacactatgtatttaccagttataaaacttttgtcccatctattggatctaaaacccagacatactctgaatctttctctttgcacctccaccctttctcttctccaaaactgcaattacaactcgatcgtcaacagtttcagcaacaactattaataaaataaaactcgataacattatgtgagacattcagcattcaaacaactatatattcgacttgtttcataactagtatgataaaagacacaagaactaaaacaatatctacataaaaaactataacaccgctgatcttaatctaatataaccatattatatcacatttaggatttatcaaatacagcctgaaattggaagggtctgcaatgatgtcctaagttctaatcattgaattacaccaatttgattcgaactaaataacttacatagcatgagatggaaaagtttttcaatataatagaatccaatgaatttccctcggctgtttgatctgcaaatgttacaggacctgtagngaaccacatagaacatctggttagtcactaaaatccattttaataaatagatatattatttagattacgtgaatgcagttgattttgaagcatttttagagcagaaattctaggctttagacctgatttgctctctatattcctggtttatctggaaatcaaatcgaaataaggaactacttgaaacaagacaacccagttaactcttttctttatgaaactctttcaacctcaacaatatggaaactttgaaatcactcgaattaagctctctatattcaaatctcgaatttcctactaactcataataagctctctttattgaaagctcaaaagaatttcccattcctatattagaccattcatatgaaagccacattctactttctcagtaaccaaatagagccaacaaaagaaaaaaaacaggatctttcttcccaccgaaatgttaaatcttttccaactaactcaataaagctctctccaaattgtacaacaaaagagaaaagttctgatgaattaaaatgatgagaaattataagtaatgtattattcccacattatgagaaatgttttctcagcaaacaaacaaaaagacttactcaaatcttccttatctagaatctcgaacttgctacgaaagtattttcgaagcacaactccagaggcatcagcagcctcattagcaacctcagcaaagcgatcaacatcgagaccccaggaaagagcttcgactccattcgagagcttcgaat

SEQ ID NO: 194486 - DNA, 632 bp, Cannabis indica
aaatcattaattatattatatattagattaccacttgagactagctcaaatggtcaggaaagtattggaggtgagtgtattgcaaaaaagaaaatatgttatactaattaactagttaagcttcaaacactatttattaaatcataaatgatattatttgttgttatatatacacatatatgtatagtatgtgtgtacctttctaagaaaaccaggttgaaattggtctttataaaacacccaaagtgagaatgaagtgtcatgatgatgatgatgatcatcatcattttgtgattcaggttctgctggttctattgatctccccatactatgttgggaactgaaatctatatagtgaaatatacatatttccaaatgagatataaacgagagatagtaggacatgtttacgtatattaaatataaaattaagtttacataaatatctaatctagtgcattaagaaagaaatatcacaacacaaaatatttgagttttgtttctttaattaattcatgtttctagtgcaatagtgtgaatgatcgatgcactcgttataaatataaatatatttatataaagcatactatttattgttgatttttaatttatgaaaagcaattgctctgaac

SEQ ID NO: 194487 - DNA, 1813 bp, Cannabis indica
aaataaattataaataataaataattttgtaaaagaaatgtaaattctctctcttctttttcgtcgatgatttttcataaatattaagagaattttactgtaaatatcacattttattattaattatttttgtatcaaatagtctttcctatactttaatatgtgtataaaattatgcttataaattatcattcacgtcatatttctattaaataaaattaaaaagaaatccttcaatctaataattttaatagttcaaaaaaattttaacgatttataaatccaaaaaacataatttaaaaaatgtcaaattttgaaagcgaaaatactaagtagtaataataataataataataataataataataataataataatatgttacttttaatatttttttttatgttttttaaatatttttactatttgcaattttaaaatcgtatagtgcagtcgcggtttggtttaaaaaaataaactaaacctgtcgcaaataccaaataaagatttgattcagacaaataaattaaatatcaaaaagtgattcaaccaaataaaaaacaaatactcttaatgaatacaaatatatcatatttatttctttttctcttattaagtacaaacaaatgcatctatacctagtaggaacaagaaaaagaaatcttttaaatttatataacctcccttgagtggattcttttgtgacatgttatttttctcttcataaaagcaaagcatgttttcatatctttctgactaattaggatttctgtctcttaaacttccacatgtatcaaattatgtccctgaactattttagtcattaaaaattcgcctgaactattgagattgttagatttaaggacttttgtctaatttcattcaattttactaatttcataattgtccatgtactaaatcatgctccccaaatttaaatatctactaaatcatatccatcgaatttgacatgtaccaaatcatatccctaaactttcatccatattaaactttcttcactaaatttaaacaaaaacccttaaattacgcaatctcaataattcaagaaaaattttaaacgaccttaaaaatttagagggacaaaaattctaattagccaatcttcccttttaaaccttttctaaatgatctcatttgtgtattttaactcatgtgttcttctctcaaagtggcaataaaatgttatgtcatcatatattattcatttgttgtattactaattcacacaacaaagaaataaaacataacaaagatttgaaaaaaaaaattaatgtacttactactattcagcatgaggaataacaaaaaattagtttatgaacaaacttactttcctctactaaataatgtgaaacaactacatcttgtgatactaaagacaactattttactagtaatcaaacacaagaaaagaacattatttggaagataaaaaagtgggtgaagctggaatattcagctatgttgttattagatcagattcagtaataaactaagacactaaagctaagttgttggttgattttttcattctcaatctgttgaatcttccccattttctgaatccaaatccaatgggacttgaccactgtattgttgcacaaccaaaactgatgctgctgtagagaaatctggtgaagtcaatagactaccaacaggccccagttcaggacactcactcctcttgttcaaagccaaggctacttcaccaactggatttcggccaaccaaatacagattacagttgccaatttcgcgaatggcagcaatgacttgttctgtgttttgaac

SEQ ID NO: 194488 - DNA, 1158 bp, Cannabis indica
tgtcattagaagaacacgattaggcaacgggtttttttttttatttaagcgtttatatattacaaccatgcataatttgggactcgaacttaagacatccaacacacacgcaccctcctatcacgcacattcctatggccacttgagtgtgcctcaagtgattgattaggcaacaaccaactgaaagtgaatttgcaaccatattaccctaaaggaaagatagtcacccaaaattggcaaatagccataatcctgaagagaagggtatcaaagcaccattatcaaataaacaacggaaaaaattaaaaaacaaaaggaaaaaaaaaaaaaaccaaacaaaacactattccttcctaacagatacgtgtcaaaatgaacgattcaattgctctacaagaagctaggatttttgcgagaaactttattattataattttcttttgtctgctttaaataaattatagttactccttgtaaatttatttaattttatgataatatttgttattaaaatatttgtagggggttaatttgtaattttagtgtatgattatatatagattatgaaataattaaaaaatatattaacttttttcagtgggggctacagtcccataaaggcaagttcaatgagaatagtttaggagattgtttgacagtgggtgaggtggaggagagagtgaaaattttgtgaaattaaatattcatcatattttatgttaaactacgatatcactgacaaattttcattttttctttaagaaaaatacttttattgattagaaatgtgaagtgagtcccttgtagcaatgatattggtagcttccattaaacttgcttttaagcatgcatataccttagtctaagaccacaagagagaaagtctctatgttcaaaccccgttaatcataaaatttaattactaaatatggattgaatttattcacgttattcttcatttctcattcccatcaaatctaactcaagtaccaaaatacccaaaatgcgcatatagtcaataccccattattctcttgatagatgtcaccacttattaattgtacgcaccttatgaaaaaaatttggttttttcttgtcttatagtttttttgtttttttgttttttttttttttttgttttagtaaaaaagtcatttt

SEQ ID NO: 194489 - DNA, 809 bp, Cannabis indica
cattttattcgaacaaatatagagctagaatagataattttatattactcgttctgctccagagttaagaccaatcattcaaatagatgatagtaaactaataaatttaatattaatgaactctatagaagagttatttatcaaaacaatcctcctatcaatttattaataacaagatctacaggggaattaaaaatgtatcaagagaaattagcacaagaagttataaatacccttcttgatattagaatttacggacaaccaataagagatggtcataataagatttactagtcgtttttaaatgtaattgtaggcaaagaaggaagatttcgtgagactctccttagtaaacgtgttaattatttggggcattttgtattttcaaatacaaaaattgatgaaaaaattataataaaaaattaacaatattacgccttttttattttttaatataatgcttaaataataataatggaagaaaatgtatatttcatacattttcactgatggttgatgtaatagatgatcgaattcaaattaattaggaaaattggatctcaaggtgctttcttattatctaataactaaccttaataattttttataaatgaaatatttttatgttttctgtattttaaattattgattctctaaagattttattacgctaattaaaatttttatcctttgaattttgatatgtaataaattatatcctccaaattttccaagttattaaaaatatagaatttttgaaattcctaaattcaagaatttctgtctaatttcgttcaatttcactaatg

SEQ ID NO: 194490 - DNA, 2621 bp, Cannabis indica
ctaaaaagattgaaatacattaccaacaaacaaaatacaacatgtagtaaacaaataattaaagaagataagttttttttatttgatttataatgaaatgatatagacatagaatcatggtgaaaatcacacaacttcaccaaaaaaccaacaataacaacaaacaacattaaattacaaatataataaatgggcctaaatattacaaatcatatcgcactgcctctcccctagctcaaaatcactcaatgagcaagcaacaaagctgccaaaacaagtgaacccccaatgaccttcatgttaccgactaagccgatagctgcgctaggtggcgatttctcggtggtggggggagtgtcaggggtggcaggcgagccaccgggggtggagggagtggaaggagtggatggagtggaaggagtggatggagtggatggagtggatggagtgccagaagcctttacatcaacttgaagcttcatgccattaccacagtggccagcagtagggcaaatgaagtaccttgaaccagctttgtcaagagtaatggtaacagttgttccaccatgggattttagtacatttgaggtaccacatgaagcataatcacttgcgtcaacttcatcaactttgtggcttgtgtcgtagttgaacacttttcaataaaataacaaagtaatttattagaaaaaaaaaaatcaacaaatacaatataagaaatatcacaaatgttactttcattgttaaacaattttcatgcttatgattcaatgcaaataataattattattatatataaaatgtttgtttaatttaaatatgttctcattatttgttgagtgtttacatatatattcgatactctgtatttcatttaaatataagtttcatattttgtatttttaataatacttatttggtattatgtattttaaaatatatttggtactataaacttaaatttatttgatcaaattttattaatgcaatcaaactattttcaattttaattttatgaattctaaagtaaaatttaattattaaattcaatataactgaaaactatttagtcaaataataaaattgtattaattaaattttattttagaatattagatatgtataatttcaagatacaaaatactaagtattattaaagatataaaatactaaagatatttttcaagatacagaatatgaatatattcctgattaatttgacataaggttcattatattagaatactttcatgtctactttcatgtctatctgtatactcattcatagacttgggggtatgagtggaattgtcttacttttgacacatttgacattattcaatatatgatgaatttattgtccaaagtaattataatggcaaaattactaaaacttaagcatatattgtttttaagcaaattttgttttaatataacaaaagttttaagctatagctatatggctgtaatttttcttgaaaaaaaaatttaattgtaaaaattaatatttattttattggggtggtatatagtcccctttcgtagtataagtaataatttaggtaattacgtatcaaatttaagagttgttacgaaagaatctttccaacaactacatgggtggtccaaaaaataactaacacaataatttaataaaaaatttacatatatataacaaattatgacatagtgtgagttgtcacgtttaattatttagtgaaaaatgttagaaaataatttaatcacataattaattattgagataataaaggtatgacaatatattaatacacatataaaaaaatttaaaatgaataaataacccaacttttttaattaagtcaaaattggcatatgtaatatataatttgaaagataatatatataaatatatacattttttgtcagagaactcattggtttatataagaaaaaaaaaaagaattagaatttatggaatctttcaatattattactatatcaagtccaaaattaaaatgtataaaatattatagagactgttaatctcacttcaattatttttatggggtgataattaatttatcaaattacgacataaagtaaaaatatgtaatattttttttttataccggagaaacaaatttgagaccttctatttttgaagaaaaatgtgaaatcattaacatcactatatttttctcttttatttcccataataattataaggttatataaaattaaattgagatttttacttttctctgtacaatatattacatttgggtacactaaggtgtaatattagaaaagaattagaacaaaattcaaatgttcattaattattacttaatttacctttttttttcattatatgatgaccatagtttaattattgctcaataaataaaataaaattggcaataatttaatacctaaaaccaaaatttgttggattaataaaaaaactacttaaaaaaaactactaaaaaaaaaatgcatcttgtgtaatgctaattaaagagtttcacaatctaaaaaaaattattttattataaatttcgaaagaaaaataaatcgttccaaagaaagttttatttgtggtggctagcatccttaatttattttttttctttaaaaaa

SEQ ID NO: 194491 - DNA, 2163 bp, Cannabis indica
ttattggttcattcatattgtatattttttggattattgaatggttacactctcaaatatatcagtacaaattatagtgatggagacatatatattgattattattgaatagtatactttcttctttatcacagcccacatagacaaaacaaaaataagaaaaaaaattaatattatttatatatgtatatatatagtttcaagtgtttgaaatttttacgtaaacttctaaaaaaataaataatgacaacagtattaatctgtacaaaaaattgcactgttatgattattaacatacctttgctatggtatatagttccaaacttaatactgtttttttgattataacatcaagattttcttatgaaaaatgaaaaacattccatacataataatttctattttaaaaaatagtaattttgggcagaagactttgaaaataaaaaaataaaataaaaataaattgcaaaattgggaacgtgaaatgaaccttaaaagtttaaaagataagaacataaaatatatataattagcaagaaaatgcttatttataataataataataataattatataatagatcaaaaattttaaaaaaaatatatacatcaatatggaaaaatttctctctctttaaacttttttatttaattatttttgattattttatagttatattgcgagattgatttttctgttattttcttactttttgacaaacaaaatgtatttttataattttaaaactttacaagaatatttttattaaaaaaaaattaatagctgtaaaattataaataaaatataaaaaatatttttaaattttttacataattctatatatatttttttaaataaaaaatagaactaaatataaagatatttatttatatattttgataataaataaatttgttttttttttctcttgatttatatatctttctagtatagaataccgtctaatattggatagaaaagaatacatatttagtatctataactatatatcttgtatgatacgatgtggtgcaatctaatttgcctatgtaattattacactttaatttctaaatatcaaaggaatattattcttaaccaaaattataaagttcataattatcaatttaatttccttacaataataataataataataaaaaagagagataaggataaattcttgtactagagatggtattatacgtcttttaaaatactagtatgtaaattgtaacattatattataaaagtaggaaactcaaataaacgtgtatatgtgtatgtatatatatgtatatagaagcattttttatattagggtgaagcttaaacttgcttttattttagtgtaattatagaatataaattttggggaaattaaaaattatcttctacttttgttatttatgttttaaacactgtgaactctataggttggtggcctaactcatgagactcataatttttctttttatttatttatatatatttttttgaaaataatctactactttttttttgggtgaatgaattaacaaaaataaaataattttactatatataaatattccaaagaaattaattcaccatttattgatgactttcttatatataaatatataaaacacaatttaaaatgaatatagacaaagcaaatatttacttagtatttttaattaatataaatagtaatcaaattccaagttatgaatgcttttgtatacaacccaattttacaaacgcaccacctaaaacatatatgaattaattaattaattccctattatacatataataatctttttttttcttaattttttttcttatatatataaaaataaacttaccaagaaatattatgtggacccaataataaaatctatacatagtaataattttaaatgaacaatatttttgttcacatatatcttcaataattccagagacagtccaagtcaacaggaccaacagaagacgacgggtcgttttgctcatcaaacgacctgtcgtttattcgaaactctgtttcaaactctgttttggacgaacgacatagtttcatttccggagcttgattattattattctcgatcaacatactcaaaatcgagtcttcttgcatcaaaagagaatctgggtattgtaaattcccaaatcttt

SEQ ID NO: 194492 - DNA, 1198 bp, Cannabis indica
aaaaaaacagtttaaacatttaagtatatgcagaaccccaaatgcaaaagctatgaagatatctttgatctatttaggcagccgtatagcgatgaatcatactgtttaacctaataataaagctatgtattacggaaatttggtagagaaacaaagacctacttgttgatcagctacactgttgttaaagctgcttgcatcaggtcctgacatataaggaaataaaaaaaaaaaaaaaaggaaatagtcaaaaaaaaaagaacagaagcctcttttggacataatacggttagcagctgaaaatgtaattacataatgtataaatgcatgctttgtgcagaatcagtaaagttacccaacaatacaagaaaacgaataataaactttccatgaaccctaaaaggcatacattgttcgcttcactataaatgcataccattttgtttggcatgcgcctagttgaataaaaaactttggccagcaaaataaactattactctctcaattttttttctttttttcctgtttgatgtgtgatccaggtacgaatttttcaattcgagaaaatgtcagaaacgaatttaacttcgcgtacacactaatcgaaatttgagaatttcattcaaaattcagctttctctttaccatactatctagccaaacaaacaagattcaaatgtaaatagagacaacatgttaaatagcatatattcgaaccttcaggctgatcattttcggaaaactctttctcgagaactcgatcgaacattttggctatggtgtcgttcgattctggtgcggtggagtttaacaaatttccatagaacctctctctgatctctttatcggacctcacagagctggaaatcctggcgtagatcaaaatcgtgaaaagacagaaccagaatcgaaaggctccgccaatctgactcttcgccatgatttttatgtataaaaagaaaagaaagagataaatgaaaacacaaaacagttgtgcttgtaaaaattcggagatcgaatctaaaatgtaaaggccaaggagaaacaatggcagaaaaagaggttgctaaagaaaagaaaagaaaagaaaagaaaaggggtatttatcttaaaaccaaagctttcaactgcaagatctcttctcttctcttctcttctcacagtttgacgttcgttagtttggaagtttaattacaca

SEQ ID NO: 194493 - DNA, 3070 bp, Cannabis indica
gaaatagaattaatcaaactaatacatatatatttttaatataggttaagtaaaaaaaatataatatgaatagattagggttttaagtaaattttggtgttcgaagttatttataaaaaaaatttttttgcgattaattaaacctaattatcacttaatttccacttaactccttatataagctcaaattttaactttcaatttaaagctctttattataatataatatattataggtacgtaattttaatgcacattataaacaaagtaatgtggacacctaaaagtacacaatctaaatgttattgatttgtttctttttcttttataaaattattttttgttaatttgagtggacatgttttagctatagctaatgtgttaacgttcttgcctcacattttttcccctatatttttattattcgttgagttgttttggcttttcattattattgctttgtagtttggtttcatagactagccagcttgttaataagttctccaatatctatatatcttattataatatgccgatttttataatatttattaaaatgtaaatactatatctcggattttttatagcatataatattatatatatatatatatatatttctttttgatccattaaaaaaaattattctccttgtgtggtctatacactatagtactcatgagttatgaattaaatgtcacttccttatagtcatgcatgcacgaatcttgcgatcatgcttacatatattcgaaaatgcaatcaaaattattataatttgaaccatttcggaactgcttagaatgcgttcagaggcggagtcaggatcaaatgaatagagggtcgccaaactatatattaaaaaagtaataaaaattttaaattaaattattaaattcataataactaaaactaaaatacaaatcatctctcttatatatcaccaaggacatctataagtgaacgccaatactaaattttttagcaatttctctttcaatatagaccagcaaacactcactttaaacatttatcttctattttgttgtgaagtatatatagtttttaccatgttcatagttgaaaaaaattactttgtggtggcggtagaaactagaaatgtaagaataagagttaccactttatacacaagtgaaaaaacctttacttttgcaaacccggatcatgtttctcaggtggatactcccatatatttgtagtcacaatctcaaatcacgctccaataaattaatatcgaactcttctttgatgtcaactcttaaagattttgcagcacaattttcttaatttacatgatcaataatatttacacataaatgtgatgagacattagatattgaagcttcaacattttttctcttaaagaatgtgtcaattgttactggttttttcatctaaaaaattaaacatcaatacatcttattttctataatatccctcaatttttattttacatcaagatttttacctttgattactgctcttggatgtgaattgcttcaatttattccagcaaaattatcactactaattaatatattatataccctattttcactaaaaaatatataaatatatcgataattatatatattgtcaaaacaaaggtcacaaaaattacctctttaggttacaagaacaagggtggagattccaaactacagatcagtaaggtaatctcgatctctttctctatctctttatgttttctttacaaatgtttccctgatcaatactttctctctctaactctgtttacttatcttttttggtcctcgagatgcttctctctctaattgaagaagatgaactgatcaggtagtttctgaacttgggcctctagcttttatagtgttctatttatgtgagagtagtaaatcgataagctgaattgtatagtttgttatgactgttttaagttttttgttgtagccttttcgattctatttgtaactgttgcctaaaatttctctcaaaatacgtggtagttcaagaataagccatgtggcaatggaacccacgctataggacataccatattaaaaaatcccgaaagcttggtaatttgcaagggttttgagagattagtcacatccgaaagtatccaccaagagggtaaacggttttgtctctttttctccacaaatgaactcgactcggagaagacatggaaggataggcagagcatggcgtgctgctcgaggttaaattactgtgcatgcatttaatgcggcatggagaagaacttcttacacattttcgagagtttaagcctataatttcttgatttcacaatgcctcataaatcatttgacgattacattaggagctatcaaataattaacaagagacaagtctatgctcactgaacatatattgcaaagcctaagcacatcacagagaatgggcaatcatgccctatgttcaaatctgagaaattacacaagacgtggctcatacaaacacgctaataatgaccttttcaccaccattatgagcctataaatacctcaatgatggatggaataaagaaaggactttggggaatttccttgtaagagaaacactcattaataagagtaactcgcggactaaggctcactacgtaaaaattttattctttaacttctattactataaacaactttaattaattgttgctaaaaattatcaacatttctgtaataactaattgatagagttataagaatttcttatatgagaatttcacaactcccaatatataaatatatatgtatatataaatgtagggtaagtctatatatagtacagttttaaaggactgttttagtagattttttatctgttttatttagaagagggtttaagtctaatttttcttttcatggtggcgtacactgcaactacgtaggatcaattgtaaatttttaattaaaattttgaataatttacagtgtcgaaaataaggttcaaatattttgttgcatgcataattgttttttttttttatatatgtatggtaaacaactgtttaaactttattctcattaatataaattattcaatt

SEQ ID NO: 194494 - DNA, 943 bp, Cannabis indica
gtatcatgaacccatctttcaaaatttaccacctaagcaattagaacctgataagaaaatattaactaatatatataaggggaaactaaaatacaaggaagaagatattaacaaagatgatacctcatcaaacaatagttcacaaaaacgcggttgaagcatctcaaatatatacactccctgagacggttcaataatcatactcctaaaactctcctctgtattttcactaattgctctaagaaacgaaggtacaaagaagttttcggcatgcattgcatatagctccctgtgtagaggctacaaaaagaaggaaatattataattgtgagatagaaagggaaagataatacggaatcaattagggtacgtttggttggaagaaatggaatagaatagaataaaatttaaaatgtttttttttttttaacttgcattggaacaacttttcctttcatttcaaaatggtatttgaataacattttaatactttaaaatacaaccaaacaaacaaaggaacggaatgaaaattgattcattttcatttcattacctccaaccagatgcaacactaatgattactagcctttaaaaaaataatatcttcctaaagtctaatataattactcaaagaaaaattgaaaatttgaggtttttcatagtggtaaacatgaaattcatgaatgcaaattacaaaaactacaaataatatcatcaagttctcaagaattcaaaatctatagccttaaacaacatacctggtaattcgccattatcttctgcttatattctttatgcctgtgaacctgttaattgaacaaaaagttttataattcacaatcgctcaatcactcactttggagaaaaatctcgaatcaagcaacaaacaatgtagattaaacattaaactcatttaatcctttcattttctcactaccaaaca

SEQ ID NO: 194495 - DNA, 1446 bp, Cannabis indica
gtcttctttcttttattttttatttttatttatttttttcttctgcagatcttgagcttctgatattatcaagtcttcgacggttatttctgtagttttgggtttgtccttgtttttgtttttttcgtttttttttttaatttccggaatttgagacgaaaagcttcaatcttttgaaggggctaaaattggatcgagaaagtttattgattgtctcaaggtgtaaaaagagaaaataaaagaagataaaacccagataaggggtttttgcagactggagacgaagcttttaaggttttgacttgtggttgactcagtttgtaagctttttctaactggtttttgggttttggaatctgggtctgtatcttttggttctgaattcagcttgaccagattggattggttcagaagctttaaaagagagagagagagagagaaacactaagaaaattaaatttaaataggtataaatatatgtatgcagttaagttattgctatcttattcactatgcctttcagcatttattgttttgtgttcattagtttcagttttgacttatgatttagttagttactaattaatagcgcataggaaattgcgtatacccagtaaagactatccaaaatgttgcttcaagaagaaggaaagctgatcactttggttatatttgcagcattgagctgggttttcaatttatctatatcttaatatgtcaatccataagaaactatatgctgtatgcagaataatttttttttcataatttgtttgaatctcatgtaaaacagattagtttcttgtcattttgatcctaaaaataggagttcagctgtctgatcatagaatgaaatacagagtttgaactttgaagctgcaagaatttctgtgctgaaaatcggataactaatcaaaaaagcatttatcttttcagataattgaaatggggtgtaaatgctccaaactgagtccttgctgctggaattcacaattcaaggcagctgtgcttgaagctccagatgttggtaggttcaagttgaagataaactttactaagattttttcccaatacataaactaaatttgaaaagaaagtaatgaatgatattttatggttttcttgtttcctttttttgcagagaatgaggggaacactgaggttaatgacatacctgcatttcgtgaattcacatttgagcaactaaaaaatgccacatctggtttcgcagtggaaaacattgtgtctgagcatggtgagaaagctcctaatgttgtttataaagggaaactggagaatcaacgcagaattgcagttaagcggtttaatagaatggcatggcctgattcccggcaatttctggtaattactacactttttctcactcattgtttctgatggtttttgtcaaatctttttccatcctgtgataatttcaagtgggga

SEQ ID NO: 194496 - DNA, 860 bp, Cannabis indica
taaaataaatctcaacaatacatgctaaatatattctagcagtttattcaatatattaatattatacaatataatatgatataataattgtactaaacaaactacatttcttctctaacattgcctattcttttgtaccgagaaaaacgaatgtatttgttcatgaattagcaagaaaggctttaggttaggtatagaattggcttggaacctttggcaaagttctgtaacaatattgctcatctttgtactatcaaaaaaaattaaataaatatcagtgactagaagttgagtttagtagttgcgacaaataatttttacatttcaaattaatgcatggttaaaaaaaaaaccatatttcttgccgtttacaaaatatagaatacacaaaaattatctcagaaatcattcgtgatgtgatgtggtgcatatatttacaaataaattagggtgctttttttaagctcatcatgatattagttggggcctacgtgttcgttcacacaaagtaaataaatagacctattttgaatttttcaaaccaagccaccaaacacatcaatatccagcattgtggtcactgatgtataagttgttctttttttaaccaatactttctattaaaaaaaaccctattaggtaaggctaaaatttacgacggtttagcagcgtgaggattattttgtctgctcgattttcacaaaattatgagttatatatagtacttatggaaaattttcagcaaaaataatacatatgatcccattactttattcatatagctccttaaataaataaacaaagtagtctaatagtacattcattttcgactactccaaattcctgattgaaggaaatag

SEQ ID NO: 194497 - DNA, 1261 bp, Cannabis indica
ttttgaagtattaactcacaataaatctctctccatttgtaggcctcaaattaaaccctaagtatttcattggaaatgagcccttccctaacaatgtccttatattttgcttctcaccatccgtgactcctgcaaaatataaatgggattcgtccttgtttgctactaaactcataaaatgcatatacgttaattgtgttgagttagtagtactcttacttaatagtataagatcattagcgaaacaaagacttaccaatcttaggttcttgctcatagggtgcaatctgaataactttcatcttgagtactattgtttgaggagatgagtaagatactccaacaccaatacgaaaaagcaatggtgagatgggatcaccttggtgcagtcctagtttgcaaagttatcaaacttcaataagagagtcccttttaattatttatacatcataaatgaacaaactatatatagaacagacagaaaagatataagaatattacatgagctatacctagtgttgtctttggctaactgatgaaataacagaattagttatgacagttggtatcgagcttttatcctatacctataagtaagtgatgatcaactcaataagatagttgagagagtagaaaagaaaaggcttatatagttgagattgatagagaacatatttgagaatttggagggttgttaatagagagtaatattggtgtgatcaaactactgtcttggacaaattattgtgtgtaatctctctcaaagtgttcaataaagattaactcattagaggctgtaatttcactgtgaattgcactgataaaagtgatatttcttacagtgggagtagggaaacacattgttatcttgattgaaccacgtaatagctgttcttattactctaattttattatatatatattgcttgttcatagtttaattagtttgtgtttttattgttatggttttgtatttaacttgtcaattgtgttttgcttcattttctgttcttgttgaggtaactttcacaacatgacttagttatctataatcatgtatctattataaattatatatgtactgtattaaatccctatatattttatgttttatctatagctagctatatatatatatatatacataaacgtagacaaaccctaattaatccttgttaattaacccattgaaatatttattcaggatccctgttctagcatcagtttcgttccatcctggagtgatatatatatatatata

SEQ ID NO: 194498 - DNA, 1798 bp, Cannabis indica
atatatatatatatatacgagataaatgaactttttcaggaataataatgcaatgaaaatctccacagattaatgggctttcagaaatgctgctgcttgatcccaaaaaacacttggcattcgttcattgtatctattatcaaaccttatctcatctagagtttaaaatacataaatacaagacacccaatcaaaacattagagtagacctgatgattccaagctgcttcaaccaagtgagtaccatactcttcaagcatttcatatagtaggacaaacgcctcccacttctgctgactgtttaaatccggttcaactgaattatgaattctccctagacccaatgactgtgcttccatttcagcccacagctctctctttgtcatgccctgtggtgctgattgtttgttatgtgatgtaatctctgaaacactggaggactggctgctattgttcattcccactgctttcttgagcatatgtaatgactgcttcctcacaaagctctctttatcaacctaaccagtcacaccagaaaagaaagtttttttttattatgattgtgaaccattatataaggtcaaatgtttaccgcaaaattttaagagatactgctcaagtaccaagcctcttttgatttcattccaaaagtcttcttcagctcttatatccaatacttcgcctttatcactcctgatgtcaccatcttccaatttgtctgtacaaggcaagaaagacaaatacagagacagtacactataggcatctcttctctctataggtccaagagaaaatagtgttctacagcatttccaaattttcacaaagaaatcattcctggacaccgatcaaatatatttagtacaacaaaatactatattatagagcatatatattcctgataaataagagatgtatatgtaaaacaaacatgttcaaaagaagtagatcttaccgggaaaacaaaagcttcttgccttgaatcacaacttcaaaggagtggtaagaggcaaatgctttggaaacaatagggagaagaaagctaatggtgcaagcgcgatgctccaaactttgtgaaagcatatgttcagccatactacaaagactccaaatcaaattaccagcaaaatgtaaagcatcaacacactcatttgccacccctagttctgacgttacagctgtttgctggtttgaaagtgcagcatcaagcattacagaaagaatgtaacatgaaataggcggtggaattgaccgattcggatgccaaattcgctctttatccagccctaaacaactcaaaacatagctagggaacaaatcccactccatgttttctaattcttcattttgaagtatatgcaaagaatgatatagtgatcttaataaaaatggaaccaagtctgcctgtacaaccatccagctgtttgtctcaaccacaatataaacaaatgtttctacaacctaatgacaaagtttcatgcaaaagaaacaacagcgcagggaataagcaggtattagatattagataccaaaaaaaaaaagaggaccaaaacaagaaatacaacaggcgagctttaggcatttacctggttaagcaattcacggttgaaactatgtagggcattaaccaatggaaggaaactcctccagatgaatacctttaaggcattgtgatcagagcctgcagagaaatttaatcagtttacacgttaagactaaaaaccaacatattgcctgcaccctggaaagctattaagtgaacaaacctcctcctacaaatgaaagctaaagaattctt

SEQ ID NO: 194499 - DNA, 3675 bp, Cannabis indica
catataatccttatatatagagagatcaatataaaatacatatacaaatgaaatttattcttttattgtacatataaaatacgtatatatatataatcacatctaaaagagcacactaatatagccgcagtaaggtaaaaaaaaattaaagaatcaaaaaatttcaaaatttaaaaaataaaaatacattaacctaactaaaaaaaacttgaacgcacttaatatcatttaattaaacctaaattaaaaagaaaaataattatatgtgcattgcacgtaatatcaacctagtaataataataatgatgaaaaatatcatttaatgcaaatgagcatgctaactaaactttaataataaaatattaaaaatagcataatagtaaatgtaatattataacatttattttaatgtaaattttttatcatgctatattttgtgatccaaatttaaataattttttattatgtgggatatttacataacaatttgacacgccattaaagtagacttttgataaaataagcaatattttacattacgtacatcacttatttacatctttattaaagatgctctaacatttgttcatcactatttatttgctattttttaagggcttatatctagattaaataaataaaattttgtttgtataaaggaaagaatttgaagtttgaatatgtgaggtgagagtgtctctgtttatttgggttcgtagatggcaaaagaacaaacaagtagtgttgtattcaacaaaaatgcaagtatatattgtctatggatcgagttatagttactcatacgaaagtggcacgaaggttcctttacaaactcgcacaaaacatgaaactttcgaacacatatataaatccatgtattgatttgataaatgattatattaaggtataaagttgattaatatggagatgagggagaggaagataataattatggaatcagtagcctcagaaagcaggaagaagagggggaggagctcactggtcccaccaccaccgagatcaagaggtgggatcaagcgcaagattttatttcttctcttcaaacaactcaagcttgtaactctacaacttctcaatcatctacattccgagtgatattattagtcttatcttactatttccacctttttctttcagttgttgaaggcatcctcccgctatacacttatacgtatatatctgtaattttttaagtgtgtgtttcttaatatagttattccccatttgttaaaatataattatatgcataatgtatgtactagttattcttcaagatcaatttcatatatatcgggacgcgatgttgtattcaccgttgattgtcgtcatgtgatcatttttttttattattgaaatgatcatattgatttccttatgttatttttaaataatataatatataaattaaatatgtataataaattaataatatgtagttgtcattattttgtaaaatatgagggtgatttgtgactacgagtaatctctacaattattatcaatattaagtgtataaattatattacacatcttaatttaaaattcttaatgctatataattatggtgtgtgcatgagttatatctgtttattgagtccataacattcctgagaggtatgagttagaattttaaatgatgatatcctacactatataaagaaatctaaggtgttcataacaaatctcttctcttgaaactctagaaggcttgataatttctaaaattatttgcatgagagttcctttagtgcttggacatagagagaaataaactttctgacaagtaaatataataatagtatgttcaaatcatggtgattccccctaatttacacttaaggttgtgagtgactatatatatatataattagttttatttaaagtttagttctatatttttatttagatctcaataaatagaggtatgattatgtgaatgatttgttttattaaagtaatatatttgtgctattatatttggttagtaaaataaaattgggtatatataagtcataacaaaataatatttattatttacttatttagaggaacaagatataggttttacaaaatttaaagcaaacaatattatgtaacaaaaattaaagaaaatgtgtgagaggaaagaataacaatgtatgtgcacacttagtggtgataataaatttttatcatcatagtaaaatatcttagaatgaaaattaactgcatatatgagaacttgacaggtaaattattaatattattattattattattattattattattattattattataaattactttatattaaaattataataaatattcccataatatcgaaaatttgttaaatgatggtgtattatttaaatatctgcacaatgaacgaataatagcatgtaaatgtctccacaacagtggcttttagtttttgactggaataataaacataggatatttgttcgttgctcactcttttaaggttttatcaataataatagagccttaattatgacggtaaagacatttctacaattgataagcataacatacaaaatcttcttattgtgaggcaaaaattaaaattttacatcatatataacacaataagtacattttaatatttagatcaatatgagtggataaaaaatacctgatttcgaatcaagtagaacaatagcagttgacgttgaaaatggagagacaatgaccacaaatcgtattgaaaattggataaaaaatgaaatgaaagactgataaaataatatgtgagagataagtgaaaaaaatggagaactgaaattaagtataaatatcataatctaaaaataaatttacattatcatagtaaaatatcttagattaaaatcattttttttcacaatataatttataaaaatatttcttcaatatcaaaagtttgttaataacaagtacaaggttcaaattttaaattttaaatatattttataaataatgacaccaaagtatatatgatattaattttattttaagaaaccgctcctcaaactcaggaattgccagtgctaaacgaaatgacaatacaataaaaaaatacagcaagcatattccaataaatttcagatatcaatccttttgcattgttaaatttcggttgatattcagatatcaatccttttgcctactccacacataaaaatcaaatttgtcatatataatataataagatagaattcagtaaacatgaatacattcttaagtattaattatttttgcgggtaataaaaaaaacacatgaatacatatatgcaatagaaaccaacttctgcctgcataataaagctattttataagctgtgatacattgaatttaattgactaaaaaaatcaagtttaattacctgtaataagaaaatatcaccatgaacatcccttggttttacacctatgccttccaagacatttgttatggcatgaaaggcatatcaaaaactaaatggtttagtatctaacaaaaaccaaatggtttagtatctaacaaaaaccaaatggtttagcatcagcggggtatgatgccaatgtcattgcctacaaaaaccaaatggtttggtatctaacaaaaaaaaaccgtgtaaaagtgaagtatggataggtacttcatggtgaaattctctcttacttgaa

SEQ ID NO: 194500 - DNA, 3145 bp, Cannabis indica
gaaattatcgaaaattgtcataataataatggaataatttttttgttttggccatacagtatttcttaaaggctcgttttcagtacagcacaaatcagtatgctgatataatcctattaaatggggttgcaggagccatttctcaggtatgccttgtaaacaatattatgtacttaattttgagcattgttattaggtattagtggtgcttagtacattctagacgtgtcactttacaattgactagcgatactcgctaaaaattattacattaaactatatgagacccgatatttaattgcactaatagtgataccgacacgtaggagagtgttaggcaccaataatgataccgacacgtagcattttagccaaatcattactctgattaatatcattctgtattcttgtgcagctacttttttgtgcagtctactttttatgcccatgatacacaattattggagaggaaagttgctttctataggactcttaatggggtgtataaatgtatgtattttcccattggtaaaacatttttcttggcttttgttcacattctgaattagtgtgtttaaccttcttttttattttgattcagacaattatttacagcttagcatggtcagcatgggtaatctctcttaaacccaattaaaacaaaaaaaaatcttattgtttttcttatatgagagtgtttgtgagccttgttcatatgtgtgcaggtcccttatgtcatctcagtgttatcagttttttctgttgttgcaaacccaacagtaaagtcatctatcactttttatatcattcagtaataaaaactatatatttgtgtcattgtgtatattgagttgatcaatagtactaaccaacaactttcatgaaaatcacttggttaaaccaggtacgcagcattgcatccaaacaagttggccctggagaacaggtataataataacattatttcatagtaataagtaaagggttaatgttttccaatcatgttttatacacattttttggttgaatttggtatcagggaaaggctcaaggatgcatttcagggataagctcttttgccaatatcatttctccattgatttttagtcctttgacaggtaacgaaaggaaaggaaatctcattcttttatgttagacataattagggttaggatattttaatgagctaacctaataattacggtttggataagctataaacttttcaaatttggataagttataattgggtgagttgggttggattcattaagttgagataaatattttaggctttaatatttatattacaaacatgataaaattatttagcttagtgtatacaccgaaaaacaatacgtatatctatgtgtataaaaatatagggtttaaaaaaaaattaataatagtgattgattctcatattaaatttgttggtataagtagtcaggtaattataaacttcgtgttagtaatgtgtttaagttaattcactttttaaggttaccacaatataatttatttataaaaatataaaatctatatttgtatatattttgcgaatgtaaaatatattttatgtatgaaaattgtttcaaattttaaacgtctcttaaaaaataggttggattgagttatatagagttaaaatgtgtccaattcataaccaaccccataattatgtgccctattacttttcagcccaataaatcatgacgtactcttaacataaccctacaacaaaaaatgagttggattaatcgagttaaatagtttgaccgatattttatgcacctctacttataataagatagagatgaagtaaaaattaactttttgtctctctctatccagctttattcttatccgaaagagcaccatttcatttccctggtttcagcattatgtgcattgcccttagcttggtaagatatgagttctttactttaatcagaagtaatttgcagtgttgttctttttctctcattaatttgtacataccttttctgtacagatgattgccttcattcaaagtactatgatcaaacctgttcctcaaatatcaaatcagataatagtggcatagaagattagtaattagatcatggattctttgttggtcataattctctggctaatgaaattgattaagaagaagagagagttggccacttcaatgacctccaactgcattatatatattatttatgtatacatatgttttgaacaatgttagagcaatggcatttaagtctggagatataaatgtatatattctatcactagttagtgactagacattgctctgtaatatgttcttcgtattaatacacaatattgaatatctattactggatttcaaaaggaaaacccttatactggaccctatacatgagaaactgagctaaaagttgcaatgtaccaatacagaataataaccaagtagaaaaccccaatagcaataacccatctactgaatgggaaagtgtcatcctcctcatcgtcttcaatctccatgtatttgaaattcatatcttcccaaaccattaccctgtaactaaaactcgggttcacatagcaattcatctcatgaaacaggttcaaattatccacaagcttgtgaaaagcactgcatccacaacactataaaaccaaaagaaataaaccccatgtaaattaccagcatcattatcaattttgtgttctcttttttaatgttttgagaagcaagaaactacaaaagattgcctactcaacatgcccctaataagtaactacatcatcaaacaaataatacataatattcacttttccaagaccataatcatatcttcaaaacaatgctacaaacaaatcatgattactcacctgaacaaaaacagttccatcagtgtatgcatggggattgattgcccttgtggtcctttggccgcaaatgttacaagtgaaagccacaagcattctacgccgtggagatttggtgaagagagaccatggaaaagtagagatgttttctgtgcttgattctctctgagtctcatcaggaacagggggaccttccataccagaaccagttctccaccctcttcctgttgcagcacttagcaccaatcccattgctgcatcctgaaaaatccataatttt

SEQ ID NO: 194501 - DNA, 2926 bp, Cannabis indica
ggctctatttaattgtaaaaaataactaaagcatacatatagagaaattgagaccatataattaagtttaattcaagggatagacatagagaacaacaaactatatagacatcatatctttgagcaaaaatcaactaaaattaacaatcaaaagtcaggatcaattagaagtgtttccctaaataaataaaataaaaaaagggtattttgtcccctaagatcaacactatcatacatcattacaaaccccatagaagagtaaatacaaaacaatataaaaagagaaaaaaagaaaaaaaaactggaaaaacagaaaaaggcttactgtaccggtaactgtacacgatcgaatcccctgccttgtaagagattctccacaaacatcggtgagtatgtcagcgcttctgaaaccaacaatttcaagcagttttgacaaccgaagaagctgtgggcgggcactgatgaagataaattgttagtagctcccatggaaaattaacagataagagtaaatttatggaataggctttgtcgtcgggaaaaaccttatagcagagagtatttaaggactgttgtctagttcgtcatccaactcgatgatctgtgcccgtctctctgctgctttctttctgataaagaaaccccatctcattgctgctttaattttaagccatccaacaacagctttaccaggacggttgcggtcttcatcaaagtttggcatcggtgattgcatgaatgatgggaaagaaaatgtatcgtcgggtacattcatggttgaatgacctcccatactaaagagtcgaagcaaatgttgcatatcctcgtgctcgagcatttcattacttctgatacgaatctcttcctctgagaagaattcgtcaactcctttgttccggttgtgtgaccagtcgtcaaaaggattaatcgtagatggatgaatcgaatggttggccatctgatatacggaagtagatgattgaggaggagcaagagccagtccaacagaactgttttcatttcttaggccttcggctccatgagaattgctaatcaactggtcatgttgcacaaatgaattgctatcgaactgagggtgagaacttgaatttgcaagtggagcctgctggatcgaatatctagttgacggatcatcattataccctggaataaacaaaaatagaagaataaaagatcagtgtcgaaatcagcaacaaagatagactacaacacatacataatcaggaatctggatgctaaaactttggaaagaacacagaagattccaacaaatttctctagagtataatctcaacatcataactacaattgtcatgtatcaacccttgaaagcatccttccattccattaaaacttcaacaaggtctattttgctagtctggactctgacaaaacattactagtatataattcttgaggccctctgccttattttcacagatgaattgctaggtaaaaatgtataagactcgtttactgagctaaactagtaactaaaatgataataagatagaagaagcaaaatatatgcacatgcttaccaagagcaggtaggccagagttaaggggagtctgctcggggaggagcgattggaacatgagaaagtggaagttgattatcggaagcaacagcataattactggtaccaacttggagttcatttctaggagcattaagccttttatttgtcttgaagcccaaaagtgattttccatcatagtcgataacttgatcccagttctcatatgccttcttcactaaagtatctacataaacctgcaagaacatgagaatcttcaagattaatatagttcaagatagaatgaccaatcaagaataatttgaaaattcattccacttattttatccaccagttgagagaggaggggtttcttaccttttggttatcatcgagagaatcggcagaataatactggtcccctgcaataagaccactcagctcatagatgttgttgaagataacaccaacgttccttgtatcttcgggataataaacataatgcttcccactcaaggcacaagtcttagcatgttccaatagagcttcccacatcttatttgacatgccacttccaagtatctgtgagcagcagagaacaaagtaaccaaaatcaaattttgatcaacgagtttctccaacttacaaccaaacatttaaacttacattccgcaacttctgagaatctcggaccacaagccgaagaaagtcttcaactgtgagtattcctgctttagtaagcctcttgtggaatgacccatctttgccaatcttctccaatctccacacctcatcacccaatgctggtgggtaatgtttcttgtatactgttcaagggataaaacaagtaaaaaaaccaataaacataaatggaggctaaaaaaaaagaataaaagataggacacaggatgacaaaaacatacattcccctctgtggtctttaacagtaaaagcttcagtctttgcttcacgtatgcgtataccctcacaaaaacccgagacaacctttaatccaagtctgaatttcctgcttcttatccaacttgagttatctgtaaatataaagtcacctaatgttcctaccccatccttaagggtcagctgaagctctccgtgcagcaaaggtcttttcccttcacgttctttcactacgtgactttcaaacttcttcttggctccaaccttcttcatcttcattgttaaagtcaccttcaagcacaacaacctcaagtttcacagaggcttcaggtccagttgttacaagttgaccagtgctgccatcaatcaaaacaacatgaattgcagcaccctgctctccttcaacttttccaccccgtgaagagaggaagagacacctagacctgaaatgcagctgcaacgtttcg

SEQ ID NO: 194502 - DNA, 1211 bp, Cannabis indica
ggaactgagacagttcattatcattgtaatccacctattatgaaatcccataatcctcataacttcctgaatgtaagtccactctactctgtcaaaagctttactcatatccaatttaagggctgagtagcttttatttcccctggttttatgcttcaaatggtgcaccaattcaaaagccacaagaatattgtccgtgatgagtcgattggaaaggaaagcactttgtgtctcagagattacagctggtagaacaactttaaaacggagagccagagccttggagattattttgtaaataacattgcataggctaattggtcgaaaatctcccataccttgaggaactttgttcttcggaatcagagtaatgagtgaatgattaatagattccaaattgtctccatcattcaaaactcctaacacaacttttgtgaccacatccccaacaatagaccagtatttatggtaaaacatagccgacattccatcgcttcctgggcttttgtctgggtttatggttttgagagcactgtaaatttcatcttcagtgaaaggccgaattaaaatgtcattcattgctgttgtaactgtatttgggatggtgtccaaagtgtgattaagtgcgtcctggtttatggcagtagcagcaaataactcttcaaaataagagacaataatgttagtcataccatgctttgaatgaaccatattgccattactgtctgccaatgacttaatcaaattatgttgcttgcgggaagatgcataggcatgaaaaatttagtgttttgatcaccgttttgcaaccaatcgacacgcgacctttgctgccaatatgtttcctcttgagctagcaaatcatcaagaacattttcatggtgtttgagatcgtgcatagcaataggagttcggtctgctacattatttagatcagcaactttcttctgagcgtgtgaaattttcttttaaagtttccaaacttttgtcgatgccattgctgaagtgaagcagtacactgagtgagattcgttttaaacactgctgctgcatttcctgaggaacattgctgccagttttttttaattaaatctgtagcttcctcctcttgcaaccatatcttttcaaaccggaatctggtgtggcgtacctgctgctggtgcgaagaattgagaggcagaatgttgacacaaatagctctatggtcacgg

SEQ ID NO: 194503 - DNA, 3193 bp, Cannabis indica
aaaaaattcatggttgcatcacacttagtaactggctggaaacaatattttactgctttggcatacatttctgggttagttttgcatatctgcaataaaggctgatgagcaacttaattacacctttctcatgcacttagatgagtaagctgttgacttgcttcttcatctgtgattattacattacgagcctggaccatgctaattctatttctaacactcattgagtgttggtttgtgaactgtgcttaatcattgatttatctaatgcgtaaaacagaacttgtaaaaccttttcttcattaaactttactttcatgtggttgattactaccgcactggaaggttaatttgcaagtccttatttgtgactggttggatgcattgataggtttttaaattttgagggaagggttgctattcttgacttagttgagtgtattatgacactatctattgtattgctacagaaagaagtttaaactttttgcagaaatgagttttgttttccgagggactagggcagatattgaaagtggatttccaggatttgtacctgaacaaccttctgtggtaggtcttctgtatgtatagcactatattcacatttatataagcccactagattgtgcaacatttaatttaatgtcacataatgctcacttcatttgttttttctgttagcggattcatacggcccgaccagtaaatactaactcactggcctttttagtcactggtattgtttttggttctagtattttcgttgcaacatgtgcaattttagtgcataatattgttgatccttattgtaaccttttcgttcaacagttctcttgctattcatgatattgaattctcatcagatgtcaccaaactttctggtatgtcttctttcacatttattgttagtcttaagtctgaaacacagtcatgaaggtaattccggcattatacatgcagctctggctagtcgtaggtgtatttttgatggcaacaagcctgaggatgtatgcaacttgtcagcgactacaagcacaggctcgtgcacatgctgcaactgccagtggcttgcttggtcatacagaattgcggctgcacatgccgccatcaatttcttttgcaacacgagggaggttacaaggactaaggctccaacttgcgcttcttgatcgtgaacttgatgatctaggtaaagctctggataagtattatagacttatagttgaatgatcaactaatagaaagagattgtgcattcacaattcagctgacgtccatgcagcttgaatatatatatatgttgggaagataacaggttctttgttctcattctattcaaacagattatgatactttgagagcactggacactgaaattacgtctacaactcaatcaatgactgaggaagagataaatgctttgcctgttcacaagtacaaagttgttggccaagagaagtaagctttagtatttctgtgaatataccttgaatgtcaggtggtctaatattaagaatttaatttgaaagctacacaaaatttgtttgaaaacaatttgagaatagcatctaaatatgaatttttatttgtcagactatatatgaagagagtggggagggggaggggaccgggcataggggtactaacagtagactgttaagggtcttatttggctgcatatatatattagttttaatataggggaaaacaaaatatataaaggtactgaacatgagtttcatttagaaacttgtgtaatccctcatattcatgaagaaagtcaccgagggttcggatgaaaaaaactccctttcactctgcactcaatgtatcaagtaaagttttggtgggtgatagaccagtaataaacaaactatttttgagactattgaagtacgaaaaatgtaagtatttattcttgacatggaaagacccttctattggtctcacttgtttgcataatttattaggaaaacagtctagcagtgttggaaagatgttaaagataagagtattagaaaggaaagttatgtttatgtcatcttgtaatgactactatgtttgtctcgttattacattttttttcttagctgtgcttgacatttatatgtatttgtatatatgtatatctattatatatatatatattttaacaaaagagggttttccttcctttaaacagggattgtctcatcattacagcaggcatcaacttctcagccgctcctgagtatgatcatctaaattttgatagtatatctaataaataaaattagaacaaagcaaggtaatgtttgagttgcatcttggttggttattatattgtttgagctgtgctatctggccaggaagaaaatgaaaacataaaaaattagcgctgcatataaaaattatatataaggttgactttggacatcaagactgatggatatgcagttcattatttttgcctttggatgttacaggtgaaatgttggtccctaaactctttaggaactccctttcggtccatactaaagtaaagttttctcctttttgctagatattcctgactctttacaaaaagctacataggaaacggaaagtcttctttggaattatttatttcagacccacttgcataggaagcatggtcaatagacttgagtatgaaatagagcagatgaaaaattgaggattaattatccatataattgctagactgaaaaagatgatactagattagacaagattacatgaacgtatcttacaacatttccaaaaagtgatattttgttctaatgtgaagaaaattattgaggatcaaacagaatattaacataattgtttttaatagtttttggactaagatgatagaatgtaaagtttaaggaccaatagacactttcatcatagttatgggggccaataagttcactaatccaagttgctgtggtaggtgtacgaacatgttaaacaatgaataggaaaatgccttaaaaatttggctagttttaaatggtttgccagataagtgtatgaaggtcaaaggctttgctgatgtaagctcatacgtgaatgctttgttttgattgcctatcaactaatccagagtctttttcataattttggtattagatcatttcttatccattgttcaaaggatttagatttggaggtctgcataatgttgcccaaaaaaaaaaaaaaa

SEQ ID NO: 194504 - DNA, 4347 bp, Cannabis indica
aggagacaagagcacattggattccaccgtcgacgatgaaattgcggcgttgaagacggaagtgttgggaattacaaacgctatcaaggaatcgatcatcgaatcgatgctcgagatggggcgcccaatgcaaatgatgcagcaacagttccagcaatttttggaagctcaagatcacgcaagaatggtccaagaaccagtgatggacaatcacgaattcttcaagaaccacctaaaacacacaccaacttctagccatcaagatatttatgctgcgaagattctagacaccataatggggataaaaagtagtccacaacggctattacaggcatgaacagcgattaaagaaactaaaaataccaaattttgacgggaacaatccaaatggatgggtcatgcaagctgaacgatttttcacgtgccatcattatgatgaagacaagaagatcgaggcagcgtttatttctctatcaggagatgccttgctctggtatcaatatgagaataagaagagaacaattctgagttgggaagaactgaagaggttggtgttgaagcattttagggacagccaaataagatccctttatgaccagtttcttttagtcaaacaggaaggatcagtgggggaatttaagaagagtttcatttgactcttggctccattggacaacatcccaccgaaattcaattgagtaccttcttcaatggcttatagccaataataaaggcagaattaagggtccaacgtccccgaaacgtggatgaggcaatggaaattgctcaggacttagaagagaaagcaaagtacttcttttttgtgccctaaaacagggaacattggacgcacgactgatcaggggccaagtcccagtacgagttcaaacagtatcaagactcctcctggtcgtgtccaaggtgaggtgagacaccttactgatgctcagatacagcaaaaaagagagagaggtttgtgtttccgctgtgatgataaatgggctccaggccactggtgcaagcaaagagaactcatgttttaatgataccaaaggcaaccgacgaagcaccatcggagcaaggctccgaagacctggaacaagacacaccaaagctagagtcaacagaagttatcaaaactgtcaaaatatcagaacaatcagtggttgagttgacttcgaataaaactttaaaactcaaaaggccatattgaatcacaggaggtcgtgattctcatagatcccaaggcaacccataacttcatttccaaggaagtgctagtgcaactcaaaattccaaagacttctaccaatatttatggtgtgattatgagcaatggagaatcaatcaataatgaaggattgtgcaaaaatctccatgttcactttctaggcatcgatgtaaaggacaatttttgccaattaaattgggaagtattgatgtgattttagggatacagtggctggccaccttaggtatgacccacaccaattggaaactccaaacaattgagttccaattgggaaaccatacaatccctgtaaagggggatccagcccttggtcgacgcttgactacactggaaaatatgtgtaaaatgctgctggctacaaaaaatggagtcttggtggagttaaatagggtggaaacagaccaaccatcgaatcctacggagtgccctccatacttacaacccaccctccacaaatacgcatccttttttgaggaacccacgggtttgccccctacacggcaacatgagcacgccattacactacaacctggtacagcccccataggtgtgcgtccatatccgtacccacattacccaaaaggtgaaattgaggaattcatccaaacaatgctctcaacagaaattatccagccgagtaacagccctttatcaagccctgtcctcttagtgaagacgaaagataggtcttggcgtttttgtgttcattaccgggccctcaatcgtgctactataccaggttatcatcaaatacgaatgaaggaggatgtgcacaagaccacctttcgcacccatgatggccgctatgagttttgggtcatgccatttggtttaacaaatgctccagccacttttcaatccttaatgaacgacaattttcgcccccatctaaggaagcgggtcttgatattcttcgatgacatactaatttatagcaagactgaatcggagcatgtgcaccacttgactgaagttttcagcattctttctcaacaaaagctcgatattaacaagaaaaagtatgcctttgggcagcaggagattgtatacctcggccacatcatttctcagaaggcaatggcgaccgaccccgacaagattaaagctatggttaattggccgacactcaccactatcaaacaacgttcgggggttctcggtcttatggggtattacaaaaaaatttgtggcaaaatatggctgcattgcccaacccctcactaactagctccaaaaagaccaattaggctagaattccatggctaaaaatgccttccaggccctagaaatagctatggtatcggtccctattctcactttacctaatttttccaagacttttgtggtggaaagagatgcatcaagtcatggattaggggcagttcttttgcaagataacaagcctatagcctacttcagccaaaaccttgggacacaagcacgaaaaaaaaaaagcaatctatgagaaggaattgatggctattgtttatgctgtagcaaagtaaagagcttacctaataggcaggaagttcgtggtccgaaccaaccagcaaagtttaaaatatttgttagaacaaagggtcattgggtctgaatatcaaaagtgggtttccaaattgatgggcttggatttcaatatcgaatataagtgtggggtgagtaaccaagtggctgatgctctttcccgtgaatccatccctgaacttcaacagttgatagctatggtggagtggagtttatggcccgaactagagaaagcgattgttgcagatcccgtgttgggtaaggtcagtagtgatattcaacaaggataacttcatcatggtttcagcttgctccagggcgtgctatattataaaatttgtccagtgatgcaccatatgccagcaaaacaagtaccttactactacacccgctcacttaattcaacctataccgctacccgctcaggtgtgggacgacatctccatggactttatcgaaggcttgccaaaatcaggtggatgagataccatcttggtggtgattgacaaattatccaagtatgccccttttttgaagttacgacatccctttacaccgaacacagtcgttgaatgcttcatggctgaaatagttcgactccatggtcttccacagtcaataatttctaaccgagattgaattttccttagcaacttctggaaacaattattcaaactccaaggcactcaactcaaacgcagcaccacatgccatccccaaacagatggttaaactgaggtactaaacaaaactttggaaacttacttgcggtgtttcacttatgagaaccccaaggagtggttcaaatggctcgcatggtcagaattctggtacaacacctcctaccacacctcccttaagtgcactctttttcaaagcactttatgggcgtgaacccccacactgctaccctataaaagagggactgccatagtttcagccatggataacttgttggagtcttgtgatgccatacttgatgacctccaaatgcatctgctaagggcacaacaataaatgcagaaacatgctaatcatgaacgccatgacatggaattccaaaccggcgataaagtgtacctcacgatcaggccgtaccgacaaaagtccctagcacgacgtaccaacgaaaaactatcagctcaattctatggtccctatacggttatccaagaagtgggaaaagtcacttaccagctccagttgcccaatgatgccaccattcaccccgtgtttcatgtgtcgcagctccgccatgctgttggtgataaccattcctccccaacccttccccctccaactcaagtcggatttagagctcggtgtcctgccaaaggctattttgcaacaacgcgtcaagacctcagaactcaccaacactgaagttctcatcaaatggcaatcgctaccgaagtttgctgctacttgggaagacttccaaactatctttgaacagcttcttaattttcacctcgaggacaaggtgaagatcttagggaggtaatgataagcctaagggcctcctcgtgtatcaaagaagaattaaaaggaataattaattcttctctctt

SEQ ID NO: 194505 - DNA, 1337 bp, Cannabis indica
tgcttattccgaagatcctaaagcataggtagaaaaattccaaattttgctttgaaaggaactaataatcagcaaattcacattataagcctacagcgtagagttactaagaacaatattttaagaatatcagtaattttcaaaacttttcttgtaaagaaacagtccaataattattatatcttcattattatgtgtaactcgcgtacctcattttgtaatgctgcaactagaagtagaaccatcaccaatttgttttcccatctgctgccagtaatatcctgtcaattcttattctcaggtccatgcatatgttgccacagggaataagaactccaaatttggtattagaaatgagaaactgcaatggtttcttgatgctgtgaaggcacatcctgaagagctgaaacttgttggggcccattgtcatctcggatctaccattactaaggtatttaaaaccccagagtccccagatatatgtatttaaatttcaatcagttgcagtaatagatagttctttacaagtatgtaaatcttatatgtttaatgtacaattccttcaatattgagtaggtattaggaaaggagcaaataacactacattcgaaaagttttaaaatgctaattttgttgattcttgtagagatactaagagaaggaggttccattttatgtgagattttgtttaaatttttccaggtggacatattcagggatgctgctgtccttatggttaactatatcgatgaaattcgagctcaaggttttgaagttgattacttgaacattggaggcggacttgggatagattattatcattctggggctgtgcttcctaccccaagagatctaattaatactgtaaggatcatttctgagtcatgctttccattttgcgtgaaaattgaagtacataagcacctcaattattgctggtatcatactttattaaactagtgtcagaaatgaaagtttttttccgcatttgattcatgattgcccccatttctttcgcctcctagttggatattgtcataaagagaactagtaaggttctctctgttgagtatgaccattatatattctcattctttttgttgatattgatttggtttaggttcgcgaactggtcctctcaagaaatcttaatctcatcatcgaacccggcagatcgctcattgcaaacacttgctgtttagttaatcgggtaacaggtgttaaaactaatggaacaaaaaatttcgttgtaattgatggcagcatggctgaacttatccgtcctagtctttatgatgcttatcaggtaagattcctaaagttgtattatcttttta

SEQ ID NO: 194506 - DNA, 2543 bp, Cannabis indica
aaccatacacactatatacacaaaaatctttttcttttttctttttttttttgaaaaaaataaaataaaataaaacttcctttgtaataatcgaaattcagcaaaaagaaattgtcacttaaacataaaaatgtaattaccctccattaattatcacaaaccaatcaaaatgtaattttaatcatatagcactcttttttcttaaatatattttgagtaattaatggaagacactatattgtaattaattttagctcaagattcaaagtttgtgtaatgacctcacttaaaattacaagattttttcatttataattttataattaattttttatttataaataaaaacagcataatttcaaaatagaaatatcttttataaaataaaataaaaaatctaaaaaaacataaaattaaaaaatcttgtatacataatattttccttataattattaattaataattaaatttaattatactagtaattttgtatgaaatatatgagtgcctaacattattgtgcaaaaataataattaaaaaaaaacgaattacaagatatatgcatgttttgttaaatagttagtctaataataataaagggtaaagtttttcactattattacagtatttttattttatttaatagtgtactatataatgtgtaatgtagagtgctgtacagtataatcacaactcacacaacaatttaaatcgcaatctaacttaaattgtaattcagattgcaacttcatttgcaatccaaattacaacccaactcaattcgcaaatcatatcacaattcacgcagcaaccctaattaaaaaaaatcagctctatcgtctctggctttgatctccaaatttggtgcgcatgtgagatccaccatgggaactcaaagctccattgctggtacgtcttcttcattgctcaagcaatttttccctaccccgatctcaccgtcaacttgattttgacaaaggaacatcctctcacgatgactccgataaattctataaatttgtgttgcttcttgctctcgcttcgaggacagtggaagagaaatgggaaagataaaataatgtaaatggcttttgatgaaggagaatattaaaataagaaaaaaataataattaaaaggaggtaaaatatatatatatatgtttaaatgtagaaataaaaaaatgagaatataaaaataaaaacaaaacaaacatataaatagataaaattatataaaattccgtattcaagtaattctccgaataataataataatatagtataaccatattattatcatgtataaattaatatttaagaattgtatgttgaaataattaatcatttcaaccggaaaaaatgattgaaagaactaaattatttgtaaaaaaatataataataatattttgtaccaagtgctttatagaaattactaattgaaatttatattctgttaaatataaaaatttagacttaaaatggtacaaaatagagtctcatcttaatttttatcaaattaaaatttaataacaacctaaccttaggtgtttttaccatattgattacatttttttcatcttctggcttcaagttgtttatatatattaaaaaaataaattactaaaaattaaatttagagtctattttgtactattttaaaaaatataatatttaaattatcatttaacaaaataattaagatctaatatatcggtaacttttacaaaacacattgtcaaaaatagtattaatcaaaaatactttaattttgtcttttttttttaattcttccttcgtacaatcatatttataaaaaataataaactaaaattcctaaaatcaatttatttattgatgtttcattatcttcttatctctagtttctacactttgtttttttttttaaaaaaaaaaaaaggaaaaaagaaagaaagaaatggtgttactaatcgtgggaatacaaagaacatgagtattcatgtgattaggtcagcctccacgtaaacataccaaaaattgtctctcaaagccatttagacaaccacaagtttcaattcaagaagttttcattcaacttagcattaatttgtatacttgatgagaaagagaaaataaataaataaaatttagttagatgggaaaacttggtgtctttttgtgtctttgtataggtcaccatctaataaaagttatcatttttatttgttttaatctattattcattcttatcattaattgcaacatatatagttatatttgtagttattaaaaagtataagtgatgcttagtattattttacgtgtcaatattgttattagtgaaattaaatatcgcattttatataatttaacgtaataatgtttagcgagtatcgctaactgttggataaaactccacttatagtgctatcttttcattaagctcgatttaagaaattacaagacaaatacagtggccttaggccttattacaaacttaaacagtcctaagagaatttagttagaatgcaccgtgaccagtcagcgatccacacctaacat

SEQ ID NO: 194507 - DNA, 684 bp, Cannabis indica
ccctaagtgtgtgtatatatataaatgtaaatcatgaaactgcagtgacgttctcatttatacgaatccatataatttttatcatatatatacaataaatgaaactgagatcagtactgttttatttatagacgtgcattattgttttttattttaagtttccatcacataataatattatttgattattctgcccaacttggaataatccaaaaatatggatattttgttaagtaattatgcaataatatataaatatctataaagggatcgaatgcttaaaattatagcctacagttttgaaagtaaaaagggtacaaaaaatattaaattttgacaaaattataaaagcatgtggcggagtataatcataattattacaaaatttatctgtttttaaaatttgtaacaatgattatttttgtaattgaacttaattacatataaaaattgttacaaatgggtacagaattatcacaatatttattttgttaattaattacaataatgtaaattgcaattttttttccttaaacacaattatgaaaaaggtgctgataatttgtaagaaagtgtttgatactgattgattaaaaaaatgttataatcatcattcaacacgttataaatatataattagcataatgtttaaatacagaagggctaatttaaatatttgggtgc

SEQ ID NO: 194508 - DNA, 2302 bp, Cannabis indica
aatctattttagttattaaataattagttttggcatttaaaaggttagaattggaaaattggcgtttttgagaaaatagagataaaatttgataaaattgcaaaattaagtgaggcccaataacaccatatggccggccacttaaatagatttttcaaattaatattttcattattttaatgccaaataaatcctaacctaaacctagtagttgcctataaatagaaagtgatggctcagtcacataacatgctttcattagtaatctgacagaaatttctctcttcagaaaactgagccttcccactttctatccttggccgaaatacctctctctcttttcccttcatctttttcgtgaccctagtgaaagagtaagtgcccacacacagcaagcagtaactcaatcatagattggaagactgtgaaggatcaaaacttgaagaagaaggacattcgggctcagatcttgattatactctgctacagaaaggaatcaagggttagagatctgagtggaaggagacattaattccgctgcatcaatgtaaggttttcttaactttatatgtgtttaatttatcgttttagaaagttcatatttaggatgttaataaacatacttgtgagtagatctaagatcctggtaaaataatttccaacaagaagcccctcagggagctcttccctaagaaaatacttggaattgagatcaaaagaaaaggcctgatttgattatgttaacacagcaagggtatttaaagaaagtcataatgaagttcaagatgcatgatgccaaactagttgtaactcccttagctcaacacttcaagcttactaaagattaagcacctcagactgaagatgaaaggagacgcatggatagcataccatatgtcaactgtgtaggatatctgatgtatgtcatggtctgcacaaggcctgacttggcctatgctatgagcattatcagcaggtttattactgatcctggacctaagcactgggatgctgttaaatgggtaatgaggtatggtatagggtctttgaaccttggcttagtctacaaagaagatgagaaaagaagctgtgaagcagagggctttgttgactcagactatgctggcagcataaatacaagaagattacttataggctacattttcacagctctaggtggatgcatcagctggaaatccaaccttcaaagagttgtagccttgtcatctacagaggttgagtatatggctgcaattgaagccataaaagaagcaattttgttgaaaggccttaccaatgaacttggattcagatcagaagatatgactgtccactgtgacaatcaaagtgctctgcacttgatgaaaaatctaatgttccatgacaggtcaaaacacattgacataaaattgtattttatcagagaaattattgcaaaaggggaagtgcaagtgaagaagatttgtatcacaatccagctgatattttcgcaaaatgtatcactcaaaccaagtttagacattgtctaaacctggtcaacataaaataaattggatgagtttctcatcctctacagaagttcagcctactcaaatcctaatctccaaatcttagtatctataccaaggtggaattgttgtattatagtctagaaactaagtctaaaattgattgtcaaggcacattctctaaacttccctcgctaacactgtttttctggtttgttagttagttcggttaaaaacagttatgtctataaatagtcataattgtagaatgcataggatttagtttttcagttcattacctccaagattcatggttcttgtttgagttggtagtctgtttagaagtgttgttcttgtttagatgagggttgtagattgagtactggtgtgtctgatctagtagctcacagtgtgaggtttaaattgtatttctttatctacttgctccctataaggactaccaacaacattgtattcgaattcctgcattcatgattatagagaagtgcctccatggctgaaattttgattccatttcaactttaattttaagttttacttttactgttttaattcaattcttgctattgtttatttaacttgattatttgtcactgttcttgcatctttctccttggtcctaacacgtgattgtttgaatgacatcagtaacttatcaatttctttttgatgttttaggtggtgtaaatgacttgacaagtggatactaatgcttgtttatggagtctagatgaagcttttaattttatcaaagttttttttttctttttctt

SEQ ID NO: 194509 - DNA, 1078 bp, Cannabis indica
tggatggttttttgcaagtaaattgatagttggggggagttttgcctcgaattactcttatgtaaaacacaaaaaaatttaaaataaccaaaaaacgactcaacaaggaattgaacccaacacctcaacaattttatgcttgcttacttacaatttgtgctacagatttttcttgatatttgttgaactaaaaattatatattatattcttttgtgtgtatatatatatcaatttaatttttcgggggcctccaaaatggtggagtctggggcctatgccccagccgccccaccctctggccggccctggctcctatcgtgtaacacttaactctattaatgtaaacttactttttcgcaatcattcaatgagaattgcaacaaatttattcctattttccctttgatttaaaaagttaagatggtatcagattaaaacactacttccgttcattttttttatcatcttcgatcatctttttcactcggccacaaaatatcttacttttagtcacaacaaaatttgtgattaaaagtgaaaaattgtgactaattataaattattatttctttgttgtgactcaaaggttcgtgactaaaagtattagccacaaaaattgtaattagttgtgactaaatgtatagtcataatatttgttgtgactaaaactaaattagtgacaacttgtaactaaatactatattttagtcacaagtagcattttgttgtgactaaaagtcacatttagtcacaaaaaaattatgttgtgactaaaacgttgtcactaaaagtaacaattttttgtagtgctcaacaatggcaaaaccacacatcaggagctctgccaattaatggggacacttctgctgatccgattccaaacactgaaatcaattctcaccacctcaacaagcatccatggattctcgtgatcgacctactcatgaggacttgtccaatccttacttcttgagcagatgatcgagtgacactttgttcatgggatggtgtgataatgcttggctttcatgtagattgagtttagaagattattgtgtaatgaccgcttagttattt

SEQ ID NO: 194510 - DNA, 840 bp, Cannabis indica
tagtgggtgtaaatttcccaaattttacatctcttattgacaatggtctcattttctattcttaataagtatttgttttttctttatttaatgctaactctaagggtggcatttagtagtattgtaatatcattgacttttctattaattcggtgaaatgaatgaataattgctattatactagtatgcctagtaagtatatatattggccgttacaatcggtcaaaagtcaaatcttattgttttggaatgtttcttcaataataatgatagctttctaaataaataaattatttagccaatgaagtcaaggatcgatttgagtgagaaaagaaaaaatagaaacctagttagttaatgcattgcaaaatttgtgaaaatgtaaccgataaaatatgagttttgaggaagctattaggttaagagaggttagaataggatgagacaaagttaaccttgaataagagaataaaaatactaaaaggcaccagtaatggcagtggtgtctagcactagtgctcaatagtaatgctcaagaagagaaatgttaaaaagcactagtagcgtttagcacactcctatgtgttattattgttattgtccaattaagtatcgggtctcatatagtttaatttaataatttttagagtatcgatagtaaattgcaaagcgacatgtctagagatgttaaacactgatgcccaataataatggtcataagataaatgcaaatctagcaccttcgaagatataataattaataatatggagtcttatattttatgagtataatacaaagtatcacaaaacaatattcaaatttcagcctcaaccacctct

SEQ ID NO: 194511 - DNA, 844 bp, Cannabis indica
tctgtcagctaaatttcacctcaactcaaggcatatgaaagactacgtttttatgcgtgcaggtctttatttgaactccacacaggagactttggaccaccatcgccatgaatcccgtttccattttcaacacttaacaacggatcggattcaacttcttttggctgtgagcaacaccataaaaattaatacatgttaacatctcgagccaaaataaaggatgaataaccactgagtagggaatggaaagcactgctgtaactgcattatgtgtgtttttatttttttctaattttgtgtgtaaccacggttttcctccaccacaagtgagggttcttaataagttcgagtgggggctattttttcaaattaaatgatgaataaagtgaaaaccagacatatccatatggcagcatgaaatgcatgaatgagagtcaggaaaagaattgcaattacctgggacagctgcactggggcttcactggccttctgctggctctcacgattgcaatagtaagaatagagtaccattccaactaccgcaactaagatccccagaatgttgcgccagctaaatgggtcacgaagtagaacatagccaaatgtcaaaactaggcatgtttttagatgtccaaggacctgataggtaacaggagacgtctttccaataaccaaaaatgtactgaagtttacggaaaccgatatcaggcaggacaaaacaatgaagaactgcaacacaggataagaaaagttaatgtcagaaagaaaccagggaaatcagatacaatttaggatgaagaagcgggagactagtttcattgttcaattctctcaccaacacttg

SEQ ID NO: 194512 - DNA, 1448 bp, Cannabis indica
gtgcacgaggcacacggtcgcgcgaaaaatgagcccattgtttactcggatggttggaaggctgaccttggcttagagaagtcaaggtgccacacgagtattctgctgcctaaaaaagtgagcccgtgacacatcgcaccattttttggcggttttttagtttcgcggtacgggtgcagtttgggaaattaaaaaaactgcatgtgcgggttggtttgaaaaaatattcaaaaatcgcaccactcgcaccgcgaacacccctagtacctatagactaacgagaatcttgaacttggactattattacaaattttcgagattagggacttatctattaatttttgaggaacttatattataatttaatatcaaatgaagacctacaacaatttagagtttgagactatggtggctgttttttaaagttaagaaattatttgcatcaaattaaatttttgtggaaacttttactgtaattttctcatttatttattaatctacttttttatatgaaccctacctttaacgaccataaaatctactaaccttgaatctctgtagccaaccgattcgttgcttttgttttaataacgaaatatattaagtaatttcgaagtttttaattaaatatttggtaccaaatcggcagtctcatcataatacctgcttttttacactctgtagtctgtatataatcttcccccttgtgcaatttatttccaattaaaaaaaaaaaaaacaaaacaacacctcagagctccaaaaaatggcgtgctgcagcttcagtctcacagccaccagagagtggttcttgcggcgatcgttctcagcggccggtctaaagtcatcgacaaccgatctcggcgacggtactttcatgcattgctgggtcccaacccaccacatcaactctaagcccactctcctcctcatccatggcatcggagccaacgcaaagtggcaatggaacgaattcgttccacttctgactccacaattcaacgtctacgtcccggacctcctcttcttcggcgactcgtacacgacccgacccgagaggtcagagtcgttccaggcccaatgcgtagcggccgttatggatgcgcacggagttaagaggatgaacgtggtggggctcagttacggcgggttcgtggggttcagcttggcggcgcagtttaaggaacgtgtggagcggctggtgctatgctgcgccggggtgtgtttggaggataaggatatggatgaagggatgtttcagtcgaggactgtggatgattcgatcaacgttttgtttcctcagacgacggaaaaggcaagggatttgattaagctctcttttcacaagcccattaggggaattccctcttttttcctcagagactatattgaggtaattaattattactgctttgacccttttagctaccattttggtaaaaacatca

SEQ ID NO: 194513 - DNA, 1930 bp, Cannabis indica
tattattggatgtagttaagtaaagtcaaaaatgtgcctctaatttagtcactttttcttttaattactttaaatataaagtggatatagagtatgttagattcctaaaattttgataaattttaatatattacacatgtgaattttctttattattaagtaaaatacatataattttttaatgaccaacagaataataataagggacataagaaaatatactcaagtgttattaaatataatgacattattatataaaaggttaacaataatcatgtcccttatatctaatattacaaacattaaattcaaagacaagcaaaaaataaaaaccctagctagtaataaagccacttagttgataatcattatgagcaataccatcatcaagacttgtaattgtgtttacacaaacaaccaaaggacttctaaccctatgaacaccatccgaccaaactatttctccaaaatcatacattcctcgagacttttttgtcggtacaagagtgacatagtaagtgatttcttccctaaaccacgagaaaaccaaaaccctaggccacaccaccacctctactccatgtggctcgacaacactactaaaatacatagcaaacttgctcagaccaacattgcggactgtccttgagattgtgactctcgagtggagatttgagactgtgatcgaaggataatttatgttagctttggattttatgacttgtgagcaagttaatgtagttgtatcatcatcgcaagagggatgaatcaaggcattgatttgttgttggttgtagccaaggttgcaaaggtataaaacatagtcaatagttttcatgtcataaactaagcccggatccatggctttcacagggtccacatggccagcaccaacgtcgaagggatcagaaactttcattgattcatcgtttactatgttgtagcccttggtgatttgatcctttgtatacgctaaacattaataacaaaaaatattgtaagtcattaataaaaataacatattaaagtttagagataaaataagaaacagctagcaaagtacccgctcaaaatattagtcgggttactatgtatgttggtaaatgccaacatgaagtagtattggtgtcatcttattatagagtaatttattgtaatatgcttaaataattcaagaataccgttatattgattttgttgcacaacataattctacatgaacattgttatttaatactatactgatgtaatatcctatatgattagcgatgtaacataaataaatatatactatcttttatcgtacttgacaccttaagatgatcgtgttccttagcatatatttctttattatatgtatagatataatacctgtagtcatgatagcagacttaataatagcaggagaccaacatggatgagcagacttaagaagagcaacaatgcccgagatgtgaggacatgacatggatgttccagacatgatattccaacttactggggttttgtatgcactcgaaggtataatcgttggaggtgtttttctaggccaagctgctagtatattcacaccgggtgcagttatatctggctacataacataataatctcaataagtcatcatatgtatggaaagtgtaagttgattattgagtaaatattattttaaaatctttattttgtaaaagttatatattgaatcttttattttattaaatgagtcaaattttattttttaaatagtacaaaataatatcttgaattctattttcatgaaaataataataatattctaacatggatgtgttatgataaggttagttatattttttacatttgttcgaaactaaattcaaattgggtatattagagcaaaatcgacgaaaattgagagctcagaatattatattgtactattttaaaaaataca

SEQ ID NO: 194514 - DNA, 2561 bp, Cannabis indica
atttatattttgaaatttggttttattttttcacggagaaaaagttggagatatgaaactcttttactttgatgtcagattgtagcactcgtgaatttgatatgcatgtataacaatgggtttgacagggaagagctggagcagagaactaagtttaatgatctagaacctgatgccatttgggctctttgaattggtatttttagttgatcattaaaaactgctgattatggtgaatttgtgcaatctgaatcaacatgcagttctgctgttagtgctgaagttgaaggtaagatgctatgaagactatttccacgaaagtgtcttgccatggtggtgaatctattaccaatctattttttgtacacaactcaagtcttgtgtacagctactcttttttttttaaaaaaaatattacacttcaaatctacgaggtcttgggttggattcctcatggagacctatttggagttatatttttctgcatctcaaagattgtagagttcagtgagaggacaaatatgaaatagtattgtacctcaaggtgtcattttcattaattgatcccatataattaaagtgggatagtttgggacacagtgaagaaaggttttgttttgtttactactcagcaatgttaaacgaatgcggaaagttggcagtattttcttttggctgccgatgccatttggggaatttaattctggtgaagtaaagttatgttctggagttctttgtcttcttctattttgtatttttgttcttttaatggttgtggggttaactgtttggaccaagactactatgttaaaaattaacatgcctatacttctgatacaatcagagtataggtttctggaaccgttgcgtagaaaggggatccctggttcaactcttcagtaataaaagtaagttcagattattgaactatagagaggctggagtcctgatttgctgtaaatttagtttttcatcatgagcaagttcatcttttttatttcttgaacatctcttaagtatttacttcttttttccacacagcattttgagaattctagagtctctaacacttcactttcaccaacagcagcagtagaagtccctgcaggttaatttgacgagattgattagctgaccaccgaggaagattggtgaatgctagttttcataatcatacgaaaatttctccccaacttagtgacaataaaaagacatacctttgctttcggtttaatggtcatcgtttcaaaaccaaattataccagattctctatgaccagtttgctgcaatggatgctattctaaatgggaaagattcatttgcgctccaggtaataaatgatgttcgcttcatgcagcttgtatttttatattatctgtgactaaaatcatccctttgtttcaaagcttcaacaaatataacactccaatttcatgctggagattgtaattgcaggcttgttgagtctctaaatacactgccatcagatttcataatataattgtacattttttacctgtttttgatagtttaattagtatatttaatatctttcattacatagagatgttgtaggctataagtgtcttatgtaaaagtttgttctgtgatacttctatgattcaaatcaagctctctttctcatttttgttatggtatagaaaatccgtttcaagcacccaatattgcaccaggctgcataagaagcaagcagctctcttatactacttagatttagacattgtccatgagtgagttcttatgctaataaagttagaaatggtatatatgatgccacgtcctttgaaacaagaccccccttctttgttgggaaataacaatttttttattgtatatattttgaacttggaacctcctctttgtaaggagagatatagtatcattaggctatgtgtgatcacaacgtttgatagttatggctgttagctatgtaccatttctctatcagaggagcttaaaaactagaacttcactaattaacatcattgaactagagttttatcaattcataaatgtataagacacgcttcagggttctgaatgtttctcatatggatcccatatataggctcttaaaattcttaatgtacagaaatatgcatagctcacagtatgacatctaaatgttttttttttttcttttctaaatccaatcttattacaaaattgtgaaatccaactattccttttgcaaaaatcttcaatagagactatcttgttcctttttttttttccgctcttgtttttgaaaaaaaaaagaaaagaaaagaaagaagaatctacttcagaattttcttttaaaagtaatacattggtgttgattaatgtttctttatatttttgtcttgtttaacatttgttttcgcaatcacgatcatcatagtggatgtgtgcaatactttatatctttttgccctctgtattttcattagctactttggtgactcaaaaaattgtaggttgattgcatattccaagctattcatataaaggatataactgagctaataaacttaattctcccaatcttggaaagggg

SEQ ID NO: 194515 - DNA, 907 bp, Cannabis indica
attaggttttgctaaggttctgagattaagtattggtactgagattaagtttttgggaatgtagttaggttttgatattattgtctcctaatgtgagtaggattatgagatgtgaacctaatcaacctatatgttgtctaggattttttctaaaatacgtagcacttcaggacgagacctaaagtacaggacatgttctgttaagtcacatctggagttcgataatcaggaggagcttcaggaagttagtcatctttgaatgacccgctgagaggatggtttttctctttccttctgcaaggaagctttacagaaaggagagatagcatgattgtacaaagtatagcgtgtagcccaaggtcaagttattgtgcacgaatttaatgcaacatgggaaataacaagttactccttaccatgaaaagcgtgtttgagggtttaaacccataattctctgacttcacggcatccaatgactcatttgacgactacattatgaattgtcaaatcatcattaagagacaaatctaatcccaccaaacgcctatatcatgcgcaggaacatcatatagaatagacaatcatgtcttataatcaagtctaagaaattgtgcaaggcatagtttatacaagcacaacaatgatcactttgttactaccatcatgagcctataaatacccccaaaaatataggagaaagggggatcgaagcattgactctctataacacaatctagaaatagaaatgactcgtagactaaggctcattaatgacccaaccacataaataatcctctaccttaatttgcattaattattcaatacttcgtgaattaattgctgtcgaaaatctcgatcaacactatatattagtcatgtctctataacatgattttgagtgtctttt

SEQ ID NO: 194516 - DNA, 3141 bp, Cannabis indica
atcttagagaaaattgtcaacccaactaggacttattggtccttaagactcattgatgcattatgggcatatcgtactgcatacaaaatgtccattggaatgtctccctatagacttgcttatgggaaggcatgccactttcccgttcagttagaacatagagcctattgggctattaagcaactaaacttttccttagaaaaagcgagcgagaaaagaaagcttcaattgaatgagttacaagaacttaggaataatgcatatgctattcaaaaaagttaaggatcgaatgaagttttaccatgaaaaaaatattttgaaaaaagatttttctctcctttaaaaagttcttttatacaattcttgtttgcatctcttttatgccgccagcttgcataccaagctgtcacaattcggtagtcttagtatttctgccataacattctcgatatacattggaattggacaactcaagatgctttagaaagataagaaagagatctttgaatcttatgtttgtggaaagatccaattctgaaaatatcactatgaaaatcctccaacaattgtaacctagtaagttaatcttactaactctactcatgagttgttacggggttgacctccgagctgcaaggaaataccacgagacttgtaagcatggatttccaagattaacgattcttaggccatatgcattgactcaatcaatctttgaccgacttttacaattgatgtctctcgactgttggggctgattattgactaatctcaaaaatcaactctgtcaatttttgggattaatatggggtaaaggttctagagtttacatccacttgaaacaccttgaatccttgctagattctaaaaaaatggaaggtaggagctggattttcttcggttattgtgggagccgagcaaagggagagagagaaagagatgaacatcttttcttaatttttaatttttctgagaatttgagaaaaaggacaattaaactatattatccttattctaattagtggtgagcttccatctaaaggagtattccacctaactcttaaaatacccaaaaggcccttattttggtgcttaagtaataatatgacttagggacaaaatggtcaaacaccataaccccgtctaatctcgatattccaaatattaacttatatttgtattagaatctaaatttacccgtgtgactctaatgaccatccatcgcattttccatcgttgccaagcaaaaaaaattgcatattttatatttaacataaataatacttttacagtttaataaaatctccaaaattgagaaattataaatctaatattcatttctaaaaatggggatcacaataactatgaaatcaagtataattataaaatgtcaataattaatgctaattgcctttactaatccataatttatcatgcggtcattacaattacacctcctgcaagctctaaaaccaaggaggcacgagtagtggaggcaccgcacctacaagatttgagaacctgataaagggtacgctgctaccatcacctctacgacttgggatcacctaacaccacacaaaggtatgaggcacaagaccacctcgtgcacctgcagtttgtagcccgaaagagatagcttgtctctttgagaccaccatgtatctcaaactattagagcctataaatacttcattctcaaatgtgagaggggttggaaaattaattgtgtaactcagatactaaatgcaataaaagaaatcattcttttactcaagaaattccttgccacttaaacttgcatttcacttaaacttcttcttacttttgaaatttgccttaaattcgaattttctagccacaaaattagttggcaagttcttaccgtcaacagccttatgtagacaacacaaaatgaggggtacctgggttaattaactgaaaaaaaatatctcaggagctgactagacaaagctactagatgagactagcagtagcagtgcaccaagctactaaaatctctcacaaattccacctattttagtcacttggttaaagatatccttgtattcctttaaagctttgactgttccatctgttgtgcctttgaaagacataggactttaagtgttcttcaatgttcaacaagtttaggcaattttatcgaatgtatcggctatacatcagacttgaccgatattgatagtagaaaagatatcattaaattactgttatatcttttctaagtcattatcactaattagttgatcctagatcaagtggtctcaatcctgatatggttaagctttagcttaattttactatacaggttctttaacttgtttggtactcgcttacccataggactagcccataattaagttggagcattaataatagatatggactttatagcttctataattatttagaagtaaaaccatggtttcttagatcttgcctaaataatataaatagaaaagctcttatttcaagtatgtatattaggttaccaaaacatcatttatttattgggttgagttattacttatcaggtttaaggaagctatctatgttcatcacttggcaataccctactacaaaacacgaattgagggttagagtgactgaacgaaaggagtcgctaatttctgctgcaaccaatataaggattctattcttcttatgtgtttatttatcattttatgaattttatattttaggatgttagactataatgtatataatcaaacacacttgttagtaaattaagatcttgataaaataagttccaacagttggtcccctgccattagcgggtactggttctcagttccaattttgtgcttccaaacgtttaccatattcataatcttttattgaatcttgtatttattggtcaattatgtgattctagttatttagtgtctttttcttctatatcttgccatgtgcaggatttgttgtcttagaaactaattggacttgttataggtgtgggaattatatgttttgtatgaactaaagttatcagtatttgcagctcttagtgttgatttgtctacttcaaattctagtttaatttgtggcactcttgccttgatcatattttaaagtctcaattttaaaaaaaaaaaaaaa

SEQ ID NO: 194517 - DNA, 1482 bp, Cannabis indica
caatatattgaattggacattattttgttaattagtacaaattttttcctttataatatgcatgaacgttaccaattcctcgcaatgcaatctatgaatatataaatatgtaaatgttacatctctgaactgcatttcctaaaagttatgaaacttaccataagcatcatattactggtgggaactggctaaacaaaaccacaagcaatcatacccaaaagcgaaaacatgattcaaagaataatgagaagcccattatacgaaagaacgagttaagaacaaacccagttttttgctcgagaatggcaggaaactgcatcttcaagaaagtgcaagtgcagattaccaagagcaccaccgtcaaaaatgaatgaaaattgaaaagcgcagactgaaacaccaagtacaagcaaattcaaataagcaattaaacaaaacacattattcaaattaactaaagaataattgataaaaaatccctattaccatttctgagttttcttgaattcaatgagatctgcagagaaaatgtgaatgcaaatgagatcccaagaaacaaaatgtaatccacataaaaacggtgaacaactgtagaaaaaatcctcttgcccagttgattattagattggttgaatctcaggaagggttgagccaagataaaatatttgagaaaaatacagaaaaaaaactgaaaaaaaaccaaaagtgcaacataaagatagaccaaaccaaactaacacataacaacaacaaaaaaggtgaatatataaacatacacgatgtcaaaaaaaagaacaaaaacaaaaaactgatcgcataaaattgataagtgataataaaatattgcagcattgcttccaaagtcccaatagcattctacaagagaacttgtcaaggcattcataaagcaacaatagatttttacaaatttatcatggatcctaggaatggttccaaaatatataaaaaccagatacttggataccaaaaatttatagttctacttttagaaaaatgatcctaatgctaatgggttacacaacaattcacaataactaagaatcaataatgaccagtccatgttattgttccacaactagtcattactgaatctgtagaacactaaattttaagggttcggatttcatcaaaatatatatatatatatatatatatgtataagtatgattaattttctaagtaaatatttttattctaagctaatgcaaagaaaaaagtagttcaaatacttctaaatcaatccatgaacaaacttaactgcacaagataatagcaacatgatcgactgtataacatatcaaaaacatccacatgacaaaatatataaggaatgccttttttcaaaatgaactcagtttgagtcacatctgtgactacaaaatgtaactcatcattaactatataacatatttatcaaaagaggacataaagcaacatgatgtgtttatatagtttaaaaac

SEQ ID NO: 194518 - DNA, 1533 bp, Cannabis indica
agtttttttacttttttttttttttttaaaaaaaaaaaataacacacaggaaagtttgtgtctaattaaaattcttcccgtggaataatatcagcgaagaatatcggctcattcaaataaataagactcggaaaattgagtggcaaaagttctaatataagaaaactaaagttatttatttatttatttattgtgtgtcatgtggcggtggataggttaatattccacacatttattaattagggattaatgcattttaaaaaaataccattgctattggagactagacaaattagaggatgctaagtaacactcatttcttgtaaaaatattagcaaagatgaagaaaatgtaatttcaacatagtttctagatggaaagattgagtattattattggataatttaaagtgtttaacactatattaaagtgacacattgtaaataattaatatttttaaaattaaatattaaattataccaatatcaatatgttattgctattactacttgacaatttaacttgcccttagcatttttgaggagttattgatcatggcatgatagatacactatatatagtttacattcaaacaaatattatatagtgtagcagtccaaataataaatattatttcaacacttgcttacatgttgaggggcacatttatgtattcagagtaagagaaagagtattgttattgggtaccagtagtgcttagcacctttaaagcgtgtcgctttacgattggctaacaatactctttaaaagttattatattaaattatatgggactcgatactaaattagaccaatagcgatattgacacgtaaaatggtgcttgacaccactggtgccttttagcatttctctaaaaaaaaccatcacatttactaccaaatgataccgcacaaagaggctaagtcctaggccaagggagcttaaggtggaccgtacgtggagtgagagttctggattctaaaaccaaacaaatgtagttacaaaaagaaaaagaaaggagtattattaggctagctccagtacaccatcactaagtgatgctttagggatattttataatagtttttacattaaatcatgtacacaatacttaaagttaataatttcacaaagatatgatacattatgtagtactaaacactactaattggcttgaaatcaaaaaaaaaaaacactactaattggcttttagcattttttgtaagaatgaagagagagagagagcgctgacccggatcattaagcatattatgtataatcctacacctaacacttttggggccatgtttaggtaaaaaaaaaaaattagagaagctaacttaattgtgaaattagaaccaaccaacttcactaacaaattgtgatcaaaattttattattacataattattatcttttaaatgattgaaaggtgatgctcatgcatgtgagaattaagatactgtagtttcattaattaattgtgaaattattacttgccacattgagtagtgaggctagtattgttcacg

SEQ ID NO: 194519 - DNA, 2724 bp, Cannabis indica
agagagagagagtgagcatttacaccttcataaagtatacattgcacattgctaaaatatccaccaaaattattatacagaatgattcctaatgaacaacacttatcaattccagaaaattagaggcattattatgcatagtaacaacaaacactattcttttggcaaatgacattttggtctatacattaataccgagcctacataattttaaaattacctccaggaagtttgcattttcgggatcatccatactcctcaaagggccatcattcacagtgaacccattgctccagaaaacaatgttgtgtacaagctgaggagtagattgaacggtttcccctgagagcaatctaccagtgccagtaaagctccttgagcttgaaggcggaacaacaggcccttctacagctcccaattgcctagcttggtcaaagattgcatccacatcattatcctttgagggatcttggacaatcattccactgcagattaaggatagcagacattaaccaactaaaatatgaaaaaaccaataaaatgatttcatactgcatatcaaattagatttaaccatccatatagaaatgcaagcagcaacactcaatcctgactgactggattgaacactaactcatgcttgtacccgaaaaaaaataatctgattaacagttttagcatctatcagaagtcctggtattctttcgagactatgttaaacagatattgatataaaggaaaaagaaatccactaacatacttccccacaattcaccctccctactctcactcccaacatgaaactagatggccagcctgattttcaaataaagacggtgccattagtcttgagaaattgtctcattatcaaacagaatcgcacagtagttgcaatctcacagtcttgagagattgtctcatacatatataaacatccaattttttgtctcctaggtgtcctaccaaattgtcaagccagactgtttttttttattccattaagaaatttgggacaagagacttctattctattcctccctaaattagtgagggtgaagacataaatgataaatccataaactgcataagaacaaaatcaaattgtatgtataaataatttcaacataacaaattttaataggttagttagtgtataaacttaaagaaggatatgaaaagctttttcttaatcgaattaatttgattttctaagttatgctcccctcttctgcataaattcagattaattggtgtgtatatggtggcttctcataaaaaaaaaaaaacaaaaaactattataagctatgacttttcagtcactcccaatcaaatacgttataaatttcggcatgaacaattccaatctatctccttcttcttttcccaaaatataatattcaacaaaccctaattttaaatattttcaaaataaggaatataaaaatacaatcacgccctcaataaccgaagcaaaattcaatatttaaaaaaaggaaaacagatatataaagatttgtaaagaggaataatagtaggatttggaaaaagcacctcttttctccgccggtgtaatactcttgagggccatcggaatcgctatcggagtcggcggaaagacgattgagatcagaaagagtacgaataccaccagttctactggtggaagccttagaagttctcttgtccttggaagccattgatgtttttgagcacttaaaacataaacacagaaaagcaatctgtaatctgtaatggaagaaaaaggaacacttctccaagtcaagcactttccctctctctccccgttacttctattattctctcactaatataatacacgcgctttcaagcgcgtctgtcactactgctacgcgcctccttgtcacgctgtcgttgatatttttttttctctatttctgggtaaccaagattttttttatactttcttttttattattattttttttatgtaatacttgaggagcaaaaaatattattacttatttatattgcaaacaacaaatgaaaacatttaattttctaagatatccgttagaataattaacattcttaagtaatttattaataatgtgtgacaaatacatatataaattttttttcttttaatatatttacaccaaatataatattaattcaattataaaattttaaagcattgtataaataatgttatgtttatccaaaaataataacataaacattttttataataattttattttattatatttttattttttattattaaatatttaaattatatctatgtatttattactatccattattataatataatatgaggtatcattaacaaatctaatattatataagacaaaatttagtagtgtaaaatatttgacaaatataccgattagaagcaaaaataattatgttcactaatgattcaaggtattgtcaatctctttttactttatttatttaccaataatctttaaacacgtaaacttgtgtgtcaattaaacaattaattttatcaacaaacaaaataaatcttatcaacatgaaagaatatcaccgactcaagataatgtttttctttttttgtgaaaggaagttattcttttgttaatgataataaataataataataataaaaaaaaaaagactaaaaaggcaagcccttaaaatctaggaaacaagaatataggtaggaatatgatatgattccacaacccaac

SEQ ID NO: 194520 - DNA, 1390 bp, Cannabis indica
tttttcaggatttcttagagtggcttaaaaaaaacacataagcaaaatagtgtggagatgcatgtcggtttttttatagataaatgtgcacctgtattaagggaagtaaggccgccaatactggtggagttgagcaaagagcacgtcttaagcaattcactgcctccttgtagtagtcattaagcatttccgtatgcacgccattctcattaaacaactttacaggtaacaatactgaattcaagccttctgaaaatacaaaacatatcgtaagagaatccacagactaaaaataataggtatttactagtaaaacaattacatcttctaatagttgaattttatatacaaggaatataaaaattacgaaaggaacatccaatttttgtagccatgaaaaaaagaatctcgcttaaaaaaagggaaaactattaaacactttaagaataaaaaccagaaggaaattaagtacccaccaagatcagagaaagtggaagtcatctgattgctatgaccaggttctaaagctccacttcctgtattatcagccgaatttgcatagaagccctgggactgaaagttctgtgggagagtttctatctgaacactatggactccaacagagttttcgatctgtaagcccttatccaaatcaatatgtgttctttgatcattgttgatagaggagttcgaatcacattgaaattctgtacaggcttgaatagaatcagctttatcccacccttctgtgaaagaaagtttattcgtatgcccgggggaacaaacctggtcagaatctgtcaacaacatttcctttggaatagtagagtaccataactggtagaatgtcaatcctacaatcatatttgaaactggctctgtaccaaaatcattttcttgcatgagcctgaaaagtaccacaaaggcaacaaaaccttacactgttttcatttgaacaaaatatattgcaaatgtcaattacaagcagtcaatcatcataatatcttacccaacaacaagaatattggaaatgaccaaactgaagatactaagtatgcctacattatatagttgcagcttatagatttgtgccagtgtaattgttttcctagtcatgaagatgtagtcaaggttttctctaaagtagtccattatgcattttacttctaagaagtgattgtaaatgtcaactaattttcacatagaatttggcgaatatgttcaagaaaacaagagaaaaatattatcataggatagatgaaagagcttataaataaaggatgccaattgccaaaaataatatgtcagtgctactcaaaataagcagtccggagaaacaaaagacttggaattggcttgtgtgcatttatatcataataatgatattttg

SEQ ID NO: 194521 - DNA, 1336 bp, Cannabis indica
atcatgggtagcagtcagtccagtccaggatttatcagtcttggacttggacctggttcttggccagttaggggttgtagacagaggattctgaggatgaataacttctggctcagaatttatattgctccttccagttgatagccgttttgattttggatctaggccacgaacatactcagatggttctgcactagcatgagtgctgctacaggttgtatccaagtctccagatattcgactaggagtcattatagagtcaatacttgatagactagaggctcggggaataccatcagtgtttggccttctcataatgtctgtgtacaggtctgacatgtcaactacttcccgttcagctgacatttttccttcttgatcctctgttgttgctggaagaaatgacagttcataactgtacttgggtaggcataaaaatttgagaaacccagccacaaaataacgtaaaggaccaaaacgcttttgatatttttcagatagctccaacaccgcacagtgtaagaagtaaagaaacaagtgatcattctttctatttatttctttctaatttactttttcatagtataaaataaatcatttctaatgaacaaaagaaaaaaaaaattagaagaacgaagaaggtaaggtatcttctagataagcaaaaacaaataacaaaaagtgaaactcacccatgataaacaaagtattctaccaacatataataaatcccaagaggagtgtcattttccttaccactcctgtttaattactatagaaatattgttcccctacccaattggcctataaaaaatccattttagtgaatcacaaactttggtttaatgaaaagaaaaaaaaaacaaagatagatcgtatttttagacagtaccaacatgccacgatgttacaaagtagcaaattcttggaatgactttatgctaaataactaccatacaactccatgggaacaaactgatttttaacagccttattattgttgacaaaccaattccctgatattttcccatcaaacccttttttttcatgttgaatttgaaatatgttcattcaccaaaaaaaacatatgcattattgaacacaagtcaaatctttttttttttttttgtaaactagactcccagcctaatctaacaatatttggaagaaattatagcatttgttattggggttgtccaggaaattctgagaataataaattaatttatgaaaataattgtcattatcttcactaccgaacatctgtttaatgatagggtgttgataatttgaaactatgccattttgcatcagtttattactatataataataat

SEQ ID NO: 194522 - DNA, 1262 bp, Cannabis indica
taactcgcatctgtcacgtagagtcaaggttagcaggatattcgagatagatagcagggtttatattaatttatgagacctattgggtctcacttgactcacaagcaccattatatgcaactcttttggagttggcctaagtttacgaagtcaaaacaattagagaattgcaaaacgatacaacaccaccttagtgtgtcttttatatattgatataatttaatatcatactaaatatttaatttttttaataaatattcattaatattaagtactcataaaatataattttatattaagtattggatattattggtatctaatatcaatactcaaaaaaaaaaaaaaaaaaaaaagaaagaagggaggagtgtacagtttttcctgtgattgattggccatttttgtccaataccaaaatatttttctgttatcctttgagttaatagtgccataaattttaatggcttctccttttgtttgtttgatttacctttaattgcattcaatcaaagtttttcaattgattattgagacattattgatcacttcacatatataaatattgagtatttaagctattttctcataaataaagcacaccctcctctctcttcacactcaataaatagttcaataaaatcataatggcttatcctttgtttgtttagttacatttatttccattcaattaaacttcttctttcattttcacttaacctaatttttttattgaatttgttattattgaaacattattgatcatatacatggatatttttctcataaagcacttccaaccaaaaaaagaaagaaaaaaaaaaagctacccatgataataatacatgggctttattaatttattgagctatatttctatattattataaattatataaaatttgtctagtaaaaccttagagtgttttagtagactttctatctttcttatttctagaaaactattttttttcttataataacgtatgttatacctatttagggccacatgtaaaattttaaaatattctaagtaatttacattaccaaaaataaaatttaaataattatttactacgcatataaaaaaataatactatttttaactctgtgaactattcaattatttttaaaaaatttacaattgatcctacataattgttacatcttacataattataatgtacacaatcattaaaataaataaactaaaaaactactcttaaatagtggaaataggtaagggttggtcctataaactt

SEQ ID NO: 194523 - DNA, 2445 bp, Cannabis indica
tgcattgtagaattttccaatatgataactcctcagttatcactaaggttttttccatctcaatgtgaatcttttcttaagtttcctcatagattttttttctctcttgaaaacttcttcatggtattagagccaactggctaacgtccatgattaattctttaaatgatcctcaatctaaatctaatgataatgatgctccaacaacaatgctttttgctccagccacgatggcctctagttttccaaatcgagtgtggacttctttctaaaagtcgctgagctcctcattgatgatcaagcttgatcgtgggaacttcttgtgttggaaatcttaagtagttcctattattatcggtcatgattttgatgatcttttgttcagcactgataaaccttccaaattcttgatcaatggtgactagaatcttctcttcagtcaatggaagcgcaaagatcacctgctacttttctggctaggatcttcaatgactgaagctgtcttggcttctcttgtttcacatacaatttcttcttcgttgtggaaggctcttgaacaaggattcccaggtcaaccaaaggctcgacttttacagctcaaaggtcaattgtgaaacaacaattttccgtctctgactcttttgacaaggtaaaatttctcagtgacagtttgtctattgctggatgtgttgtaagcgataaagatcttgagcttcaattgctaaatagtcttggaccagaatatgacttagttgtttcaggaataacatccagtagtgaatataagtccttggaagaaatccaagccctgttaatggcttaagagtgtcaacttgagcgccatcacaatgttgttgatctgtcttccaagatggcagccaatctcacaattggttctttaagaactaatcaccctagcccatacagatctccatttactcgagactcaacatctaaatctgcttcaagacctagtgccaagccatatactcgtttcttttcttcacatggttcaagacctctgtgtcaagtttgtctcaaaatgggtcatactattgctatatatcattatcggttttacgaagctttcaccaccctaaaccttcctccaattaacctcgtgcttatttgaatgaatttgaagctgatcttgatcctcaagcgtactcatcatccacaatgtcaaattttgcagatgacttcatgtggtatgcagatattggtgctacaaaccatgttgcttttggcatggaacatctagataatgttaccccttgtactggttcaaaatctttggctataggaaatggtaagaagttggtaatctgtcatattggtcatgctcttctcccatctccatctaattcttccttacaattaaattctctcctaattgtccttcttatcgctaaaagtctagttagtgtcttcaagctaacagataacaatgagtatttcttgagtttcacaaatcttgttgttttgtcaaggacaaacaatgaaagagggtcttactgaaagggtagcataaaaatggcctttgaatgcttggagatgactctcattcaccttcatccactgatttgcaatgtcaccttgccacctcctctgagtccctcactagttctcttcaatcatttgattttttgccactttactaattcgaggagtaaatgttcaatgtcaaatgattgtaataaactcaaagtaataaaaactcaatttctaaattttcttgcaatcctcaagctttttcagcctctatttctaatgtatggcattgcaaatttggtcacccttcatctcaaattttaagaaaaatattgtctaaacttcctaaatcaggctcaattaagcacttaaaattctatgaagtatgtcaaaaaggaaaaagtcataaactttccttttccttgtctccaacttgtgctaatcaacccttggaattgttgcatactgatttatggggaccttcctacagtccctctaaggatggatttagatattatgtttactttattgatgattttagcaagtatacttggattttccccttagcacaaaaatctcaaacctttgaggtgttcattagattcaaagctcttgttaaaaaacaatttggtttacctgtctgttatccttgtttccggatgatttgtacatggcagtcaaggaagggtgccacacaatatttcatattgttatcctatgtcttccccttaccagggttacgaaagacgctgtaatacccaaaggctctccccgtcagtgaatccggaaagaacttgggattctcagcgaatgctcttgctactgaaagtacataaaagttacacacactctaagatggtagcgaatcagttgatctaggaaggcctaagccagacctttgtggaactccctaaaacttaatccagagctaaacccgaaggttgcatatcttct

SEQ ID NO: 194524 - DNA, 2441 bp, Cannabis indica
aataatattatcttattttgatgagattgaaattgtttaaaaattaactccatggtgtgagttcatgaacaaagcaagtagagtttgaatagattacaaaaatattcatttggtgtgcaattgaattaaagaaaaatttattattgggttacataactgatgtgggatcacagttgtatattgttaatgattaatttaaataataataataaaagatatcgtatttagtaacttgttatataaaagcataatattctactattaaaatatagtgcaccatattctgttttttccgctctttttctatcattagtacaccatattatagtacacatattccatcattttctctatagacaatgaaattctaggagttttgttgtgcataagctcccttacactaaacagtatatacttttggtccatacatatgatccactttttagtatatttctctcacattgtaatcaaagatttccattcagaatcctcaaacggcaactccatcattggattcatcttagtgaaagattcagataaccttggacttcttgtactgtcaacaagtttgaaccattggcttgaagggtcacatgaactatctctacttaagcatttacaagtgtttgttacaacttcattatttgcagagtcaatatctagacaaacagtgtcaccattggcagtggtagaagagagttgcaacttagaatctgatatagtttcccacttggaatcagaatcagtgcactttatgctaagtcgtgctggttttcctatatcaaatgcttgtaagcagaaatatgttcctttaattgttaatttcttctgaggtgaataataccaaccatccgagctagaacaaggacctaatgtcaatggttcaaatacagattttcttaccacacaaagacctgttgatgggtggaaaatgttcttgtgtactcgagtttctgatagacccggcccttcgtaattcaaacagccaaaacatgttagtaatgtataatgaagcctaatagaagttctataaattgtactcccaattattagtgatattaaatattttcaaagttgaggatgaatacttaatatctaattcagagggcatgatttttttagggagcaaaattgatatctattctaatttgagctatatatgtattcattataacaaaaagttgtagattttattaacataccttggaaagggtattgaatagcagagatcttttgtaaaagagttgaatttcgaatttcatcccaatcccagttcatgattccataatactcgttcatcccaataacaccttgtctatagtagtagctaccaactaatgtccacaaagcccaatccaaatctaattcagctgctaaagctaagaagcaattcaagtacctgttgtcattcacattagtccctctttggtccactccaaactcactcaaaaacagaggaaatcctttctctaacaagaaccctgattgtctcataatattattcaccactgtaccacacacttggttggggttcccactttcccatgccctgccatctgtgaatgcataccaatgactttcaaaaaccagtttcccagaaaatgtgaggctgagagggcgatttcgcaagaatgaaaactctttatcataattcaaaccagacaaaatcacaagaacatctgggtttgcagagtgaactgcctctgctcctctttgcatgtacctatgatacataacataaaaataaaatgatcaaataaaaacaattgtaggtagaatttcgttcacgttattactaaagattttcttttacacgtacttgtaccaatcgtttacattctgcttggggccacgaagctcgttcctcaaactcatgccaacgacattttggacacctttgaacaatgtggccattcgagtaagacccttaatccagaggtcagggtcgaagtacttgtccccaaagaagccattttcgtcgtaactgctgcaacaccatgtgggcttggtaatgtggttatctaagatgaccatcacgttcttgtctccaagtccagataccactgcctttatattatttttttcagaagaaaaaaaatcaccagcttaaaataaaatgggcaacatactatttggatttgctactttgtattttaactaaatactaaatttaactattttttatgtataaattttttgctaactaaagaattttatttataaaattgattaactttaactttatttattgaaaagaaatcaataatatgtttttacatttttttacaataataatatatttccacctttgaactattataattaatagaattttgactatatttcatttcattttatcttttgaaattaaaaataattttatatgtttaatttctattaaaacatatgatttatcttttgaaattttgctattaaaatat

SEQ ID NO: 194525 - DNA, 1407 bp, Cannabis indica
ggtaaaatatttccaacagtagcctcttatctcctttaagacgatgttgatgtggggcatcccacctttgaatctcaccttgttcccgcacttacagatatgctgaaaaacacaaccaatataagtaataacctcaattctcgaaaaaccaaaaagagaagggatcaaggcctccaagaactgagtcaaattactgtaggggattagattaactgccagtgggaaaagacctgcaaaccagatagctttcgcaaaagcacactccttgaacaagtgaaggctgtcttcatagacattgtcacaaagacagcatctaaaatttgtaaaagaagaaagtctggctctagtagaaagagcttcactaagagtctgccatagcataatggatatttgaggatgtatccctaattcccatatccacttccaaacttatatccgaggtctaaatctggatcttcggtccaccatatgcgcatccttcacatagaatttaccatgctttattcccttccaaataactctatcttggtgaggagatggaattctttggaaagttaagtttttctctcctagatcagctccaaaaatctgtcttacaatctccccattccattcatttctattagaaacatctgcaatcgctttaattatatatccatgacctcacaatatgcccatcaattcctgaaactcgtcgaaagacaacccagggatccaagcctgcctccaaaaatcaatttcttctccctttccagttaaagaaatcgaaccacttctgatgatatctctagcctctaagatgctttttcataatgctaaatcacaactctttggacacaccgtccagaagttttcgtggccacagtatttttccaagagacaagagatcaaaggtttatttaccttactagcaatagcccatcataatttagagatgagggctttgttaacattctcgaatctcttcagccccagccctcctgattctttcagttggctgatacagtctgaggaacggaaagccatatatctgtccttcttatcattgcccacccaccaaaactttcttattgttgcatctagctctctacaagtagagaccggatcttgttcgtgaacattgcatagatagatattgaagctaaaactgatataatcaacgtcaaacgaccgacagtagaaagcaatttcgtcttccaaccttcaagcctccttgtcatgttttccatgattgcttgctccatattatctcccatcataaatgagtaagcttgagacaatgaaagcaataagactctttgactcctctacctcttttgatacacggaataaccgcgaaggagtaaaatgctatggattttactaaggaaaagtttggaactaaaaaggccttcacacttgagcttt

SEQ ID NO: 194526 - DNA, 1901 bp, Cannabis indica
tatatatatatacatttatatactaattaattatcttttcataaaagattttattttcgaatcaaattatttgagatatcttttagctgtttctaaaacttatttggataaaatttattatatcattgaataatatttagattatatatgttggaacttattttaccagattttaatttactatcacatatgttggtttacaacctaaacatgttttcaaaactattaaattaaacacataaatagtttacaatttccttatattgggaatacaacggaataaatagctctttctgttcaacactctaactcttaaatccttttggttgtagagtatcaccaagtattaaacccaaattctctttttattgtttaagcgacatgtctacataatcttccacaaaaaattgagtgccatcttgaatagtgtgggttggtactcaactcacttaaaacatgtaataggcctatgccaatgagaaaagagaagatgaaatttttgaaatccaatagtaaaaactattttcaaaaatttctaaaagaaagaaaggaggaagatgagacattagggtttctagtttcatctcttcctttttatagtacataatatgtttaagttgaatcatatacttaattaaaatattatgataaaatattttgagtaactgtgattgaatctcactcaaaactaaatctatcaaatatatatatatatattatcattttaattaaataaaaattattattattatacaattatatatattggcaaaagtataaattcaatttttttttaatccaaaattaaattcaatttttttttaatctaaaatttatagatataattattataatcttaaataataaataataaaatcttttatatattatattaattcaattctcaataattagaaattaaaaatttaaatataacaatttattaatttgacacaatgtttgacatgtggcatgagagacgacgttaggtgcagaatcttccctgctcgctgactggcctagctcaatggttgtaccttacactttctcgtggatcaatcgactcatggaaagatttagtagatgcttttggcatccagtttgctccttcccaataatgtcaaatcgagcccaataattaagtggatgtcaagcaacaggaagacgagtccctcaaggactacattcaatgattcttagaggcaacagctaagaccaaaagtcttagcgaggaagcaagggttatggcactcgcagccaggctcaaggaggtgagtcctctgtggtccgacctttttctcaagaaggtatacaccatgaacgacttcttaaataaaacatatggattcattaaacttgaagaagtcataacccaagcaaagggctcaaagggttgcaagaagaaatcgccagacattgaagcccctgctactaaggcatagggaaatgggaagaagggaggttcaaacagaggaaagagagccaacaatggtggcaagcaaggcaactcccttggaggaaagaagcctgattgggggcaagcccttaagagaatatgggcctagcttcaccacctactccattatcttggctccaagagaggagatatatacaaccatacagtcaatagtgttgtatcacaaactttttcatttcaaagagtcagggaagagggacatgaacaaattctttcattaccataacaatcatgatactaatgagtgtattcagttgtcagacgagatagaatttctcatcagacaaaaacatgctattcttgaacagtatatacaacctgaagctctagctggaggaaatgcacctctccaacttgcgccaattgcaggcaggttggagatcgtgattgaggccctcacatagttgggaattcaaggaaggcc

SEQ ID NO: 194527 - DNA, 1097 bp, Cannabis indica
ttcacttcatatcattatttgtgggtaattgtataccatgagtcctctgaactattagagaacaattttttgtcattcgaattatttttataacgattcatcaaaaatatatatatatttataatgtattctgtttactttcttttctttatagtaaacctggcaagaaaattgccaatttacatttacagctaaaagatatccttacaaaagaaaacacaaaatttctaccacctctttttggttgatatacttgtatcatttaatgctattagtaagcaataataataataataataatagcataaaatatcagtgtcagcactagagctcaattattctcgtacagcaaaatttaaggtctcttttctagttgggagcttatcattcaaaacttttgaaacataaatattgagcataaactctatctttattctttcaggctccactaagggctcggagcttcctgtgtcgtatttacaagtgaacctatgacgtccatttctcgtgttatagttattcctgttgcagagtgtgagacttgagaaggcagttcacgacttctcttgttcgttttcttctaatggtgtttgctccatttcctcattattgaagattgggccttgtggaggtccaaagagcgtggaaagtatcttccgatggcattcatcacagaaaaaatagtaggagaagtggccttcattagggagcttgtgcacaatggcttctggtaatactcgggctatatagtcggccattgacgatggagccacgtggtcaaccatgccctgtccagcaatgaaacaaaaaccattcaaaataatcataatataactagggtccaaggggtgaagtattaatacttcatagatatttccagggattcaagtaataagcattatgagtatatttactaaccattaacgaaaataagaataatataatatgaatgaggattaagaaataaaaaaattagttacgcttcctcaaattatccattcatgggttcaccttaacagtgggacacttttaccatgccttgttccaattagtagacatggcttgttccttggaagtgaaaaatttcacatattcaa

SEQ ID NO: 194528 - DNA, 1748 bp, Cannabis indica
taaaaaaaaaagactaacacaaccgaggtgcatctgcttggctttgaacacaatttctattaacaggaatagttttaacatttgtttgagggttttacagaatacaagctcatggataaacaggacaaagcgacttgcatttcaccctttcaccaaaaccaaaatgtaagaatcattatttagaagctacaaagattaccacaaaagaacatgtataacttgcggcttacatgaatggagagcgatatagccctggcgttcctctggagtacctttgtcaattaacggtaaatatatacatttctttttaaaaaataaaaaaaaaaaaaaccttaagcattctcatccaaggccaatgccagtcatgtttagactgtctgcctgtttgagttggtacgtgttaagggagaggcctcatggtcaggttcatcttcgtcgtcgtcagaggataagtaggatgaccccatccatgccttaaatccttcactaacccgtctttcaacacctggtgtgacttcaaagggattagctacaaacatctcaagaccgtggttttgactggaatctccattgtcagctgctttccttctcaaaaaaaaggcagttcccccatacagaatgaccaaaccccaagatgcaaactcatagcaccaaaagaggggtttggagcagttattccccagtgtcaggaggcttgaaccaagaaacaaagcaagaagaccaaatacaattgcaaaaattgcatttaaaatggacaaacagcggaccccacctgcacatagcaaaaaccagaatttcaaataccacttatttgcagttgccttttggcattgaatggtaagtctattattaaattcacaatgttacatcttaattgatcaactcaaaatgatgaaacaacttacgaccaacattcagaactttttatcagaaaagataagaagtgaaccaggtgaagacttgcagaataagtgaattgaagacctgatgagcctagttttcagtgtttatatctaatctagcaacaatagcacaacaagctgcaaaatatttaaaatctttttgcacctgattggttcgagattacataactgtactctcttaaaaatatgattctgaaatataaatttggatttagagccttaatacatattatgaatatatgattgggtgcattgtctgttaccagttttttgagttttaaaaactggctctgattggcagacaatctgaaaatacaacagaaacaaatttgtgactggtaaaactgaatctgaagaccaaaacacatttaacaaaaatgaccctttcttaataactattataaactaagcaatcatcaaccaattcctatgcaatgcaccacaaccaaacttgaattggtctctaattaagaacataagagatttcaagaatctccaacaacaataattcatataataccaataaagcattcactatgatcagaaccagggaatcaaattcaaagtagctaacaaatgacaatacagcaacacctatagataaaaacttaataaagttaatacaaagtatatactagaggaaataaataaagaataagcttcaaatgccagctctaaatggtatgtgtagctttgaatcattacaggtgcagaggaactgtagtgctaccaacataaaatgcactagtttaagccttataaatatatgttatgagatggaatgcaagtcaatatggtagtccacaacactatttatgtactcaa

SEQ ID NO: 194529 - DNA, 2340 bp, Cannabis indica
ttttacattagcaacaatgttatgacaagtgtgatataaaatatgcttatattaaataaaaaaaaaaaacttaaactaaagtgtaagtttatttttcatagctccccaaattatcccttctatttcaaaacaactcacccaaactctctctttcttttttgtttccctctttctcgtcttttgacattcccaacgaaaccaatacctaaatcgcactgacttccaaagtcaccatcaaatttgtacccatgatcgacgagaaggcctactgcgacgcacgtcgaccactaaagaaagaaaagggaattgcgagccagaatcacaatcttttttgctattgttatttagatgctcgatctgtggtttctttacgtattttgcgtattttttcggtaaaaaatcgagttttggtgaaatttgagtttttgggttctctgtgatttttcttgtacaaggtacaatggtgggtacgatagtagtgtaattttgaggttagggatgaagattcaataaggtacaatggtgatacgatatttggtaaacgtacgatagtacgacggtggtacgataggtgcttaaaattaatgccatgacaaaatttatggcatgataaagtttttgctgtattttttgtgaatgatcgatagtatacaatagtgggtacgatagtagtgtaatctaaatgttagggataaatgttcgatagggtacgatggcgtggtacaatggttgataaaagtacgatagtacgatggtggtacaatagggtacgataggtgtttttaagcaacaacttaaaccgtatcataccccatcatactacttcgtactttatcaactatcgtaccctatcgaactttaattcctaacttccaaagtacactgtacccaccatcgtaccctattgtactccctcgtacctatacaaaaaaatcacagagaattcaaaaatttagatttcaccaaaaaattcaattttttttaccaaaaataagcaaaaaatacaaaaacaacccacagatcgaacatctaaacaatagtagtgaaaagagtcgtgatttgtggttctcgattccctttgccttcttcagtggtcgtcctgcatcgtggcaggcctttccactggttgtgggtacgaagatgatgttggctttgcaagtgggtgcgatttgggttttgattttgtcaggactgtgagaagacgagagagagggaaagagaagagaaagagagagtctgggtgagtttttaaaacgagagggataatttgaggagatatgaaaaatagacttacattgccaatagtttattgtttcacttattataaacatattatttaaatgatccaataaaaaaaaataaagaaactcataggtaatgtaaataaaaaaaagtgaaaatttttacatacaaagacatttctccttttatttgcgttcagatgagactattgttcatagccttattgtttgtcttgtggtcgagtctttggatgttgtctgagatgatttttctgcttggtttcatcagttggccgcttaggtgggtaaggaaaagcaaagtgaagtaacagtgatctgttgggggatttgacaagctcgtaatgattttgtttggaacaagaaattttttagtgtgaatgctttggttacttcaagagaattaaatcaagataaatgttgatgctccattgtttgctgagactcaccaatcctattttaagttggtagctcatgatcacttaggctctctttttgaagcttgaattgtttgttgttttggcgatgtgacacctcagttagcttaggttatgggtatcgagaaagttcttagttggatcaaggacaaatgatgcctagtcgtggtttttgtttttgagatggattgtttagtgacaggcttgtagtcatttaatgatgcaatcttcttttagtttaattgttgatgattatagacaattgattatttgtatgagtagggtcactacaaatatggcttatgattttataagagcttcctgtttttttgagatcgaagagtgttgttcctacttaatttatgtctaccttgttaaaccattttgtctttttattgaaatccttttcaaataataaagaaaaagtgaaatttttaattatgatattattttaaaagtatttttttttttttgttttaacgggaattcgttgagttgagttcgaaacttcgaataaatgaagcatatgttggagagtgagggagcaaaacacaactcaaaaagaaaaaatagaaagagaaagtctttcggatgaacggtccagatcttctactaatgattttgttgactaagtagtcttccta

SEQ ID NO: 194530 - DNA, 1305 bp, Cannabis indica
ggtatctatacagctaacatgaaaagcatgactacacttgggcagagccgcagagtttcgcttcttcaaactcacttagcaacagagcaatctgtccttcatttacccatcatctttttatacttgcagacagtgatggaatcaatacagactgaggcaaaccaacggtgtttgatataccagatgggatgatcaagcataggcccttgatccccatcaataaagtcttgtgggtttcgaatagaatcggtgccatcctctctctggactcgttacgcctcttgaaatacctcttcagagccacgaaagcgaaacacataagaaaaacaccagcaaccacacaactaaccataaccatacgtttttgaactatatctagatgggtctgaattggtggtggtggtggtggtagaagcaatttcggagaatcagagtcatactcacaactacgagcaatacacagttgtttagcacaagcagattcatcgcactcatcagaatctcttttcaaaatgcgaaggagttttctgtgataaaagaagtctcccatttttgcagcaagagaacagagcaagaatcataccttaccataccataacagagaaagaaagctataaaggggttttggaatagtctaaagcaaggtgaagaatttgtgtatgaatggatggatcgatggtattgaaagacgttatttgtgggtacaattattttaggcttatttttccaagaaattgtttgtttgtttgtgtggttttcaacgagacggagtcgcatttcgctttcagtacaagactttagtatagtttgggggatttacttggtagtttcgtaacatttgtttggttttgggctcacttctcctcattagtcaagggtccttaatgactcgtttccgcgttaacatcatcatagttagagtctttaaagaggataagaccatcttcaatggattaatcgagtgtcatatagaaagttgttcattaaaagaagaaaaaaaaagtgaaaacgtactaatataaattagttaaaattatatcattttaaataaataaaacaggtaattaagataagagcattgctacaaggtatattgtagtgtgtatatagtgctaaatattactcataccttatagtatttcttttcaagtaatttgttaaaatttccaagaaatatatgagatacaattttatacgactgctaactgctttgttagtattcgcttcaatttttgtaacacaagacttaaacattgaacatggcgaacaataattgagatgaatttgataagggataattacacc

SEQ ID NO: 194531 - DNA, 3488 bp, Cannabis indica
atacagatcagcaaaagagcaaataacaccagcaggttttggtttcgatccatggatttccttatttcgttcagtccaaatgcaccacataagacacagaattttttccaactctgcattctgatgtaccatggctatagatgaaaaaatctcaaagccattcattcgatggagattaggatcaggattaaaaacatggtataatgaccaaacttgatgagctcgagtacaatgaaacaaagcatgaccagtatactctctcaagcaattgcaaagagaacaagtagcagtaggagagattttcctatgcatcagattaaccgcagtgggcaacgcatcattaataaccctccaagcaaaaatcttaactttttgggtatgttaagtgaccacattcgattccaccaactgtgattagagtgagaagtggaggtatcattgattttctctaattgtgcagccaactggtaaccagacttcacagtataaaagccagaatcagagtgatgccaaatcaactgatattctcttgggttaggactaatcgaaatagagaggatacgatcgatatcaatttgtccaaaatgttgccttaataaatcaagatcccaacctctatcaggagttatataatgttcaactgtaaagtccaaacctccactataagtataaggccgaaaggttgtattcccaggcagccacggatctgaagcacatttaacagtgttccctaagcctattttccatcgcaaccctttaatcaaaagctcacgaccatcacagatgctttgccatgtgagagatggcaaagttccctttgaggcgttgagaaaagtcccattttgaaataacgagctttcaacacacaagctaaaagagagtggggatcctccaatattctccaagcctgtttggctaaaagagcttgattgaaatggagaaaagaacggaatcccataccaccttcagctttagattgacaaagcaaaatccaattcttccaatgaatcttagacttattagtaccagaaccccaccaaaaattagccatcatcgattcaagctggcgacagaacttctttggaagactaaaacaactcatagcatatgttgggattgattgaacaacagcttttaataatacctcacgtccaccaatggagaaaagtttggcatgccaagcattcatgagcttccagatacggtctttaatattgctaaatagctcagatttatctcggccagcataagaaggaagtcccaaatatttttcgtgcaattcacagataggcattccaagaacagtatgaaatctagttttcagtagatcactagcattaggagagaaggacataatcgtcttgtctgtattgagaagctgacccgaggcacgatgatatatatccagaacacgactaatggcttgacatgaagaatcattcgcatggcaaaatagcaagctatccatcagcaaataataaatgagaaaagaggatctccttgtctcagacctcgttgtggagtgaccaagcctttgatagcaccatttatattgaaggaaagagttgaagaagaaacacatcgcataacgagttcaacccaaatttcatgaaaacccattttaagcatcacagccttcaggaaataccattcaacgcggtcaaaagctttgctcatatctaattttaaagcagcataactctgtcgtcctctcttcttgtttttaagacagtgaaccaattctaaagcaagaagaacattatcagtaataagtcttccaggtaaaaaagcgctctgattttgagaaatagccacaagtagcacctttttaaatctggccacaatagctttggacaccaacttatataagacagagcataagctaattgggcgatggtcacttaatctttgaggttgatcaactttcggaatgagagtaatcaaagctgagttaatatcatgcatatccgcaccttcatttaaaatcttcaaaacactagccttaaccaaaggaccaacaatatcctagtgttgctgaaaaaacatggcagacattccatccataccaggcgacttatctagagccatagacttaagagcttcatccacatctgcactcgtgaaagtcttcaataaactgtcattcatgtcttcagtaatggaagtatcaatggctgccagaatagcattaagagcttccaaatccacccccgaagtagcaaacaattgggaaaagaataaggaggcctcatcagcaaaagcttggtctgaaacaagaattcttccatcactagcttgtaaagatcgaattttattattattgtatctcgatttagctctagaatgaaaaaatttggtgttggcatatccacttttcaaccaatcaactcgagccctttgttgccaatataattcttccttttcaagaagatcatctagaactttttctgcatttaccatttgagcatgctgatcagtggaaaaaaccgaaagattatgcatctctgctgcctttttttgagctttattaatgtcatgtttcatctgcccatatttattgttgtgccaagtctgaaaagcagtagaacaagaattaatattctgtagtagggaaggcaacgaatcagtcctcaaaccagaattccaattgttgacaatcaagtttctgcattcctcatccttgagccaaaattgctcaaaacgaaatcgattacgaggtctaaaatctggctgctcctgagttaacaaggaaatattaaaagcaatcgctctatgatctgaactatagtagtccagatgatgaatgcgattttcagaaaaaagattccttccattttttaatacaagttattattaaacaatctaaaatcgtagttttattattataaaagaaaacgtaattttttaatcacatctttttttttttaaataaatcaacccctttgaatgaaataaataaataaataaataaaactgagggtgtatattggttggattgatattttgacaaaaaataattaataattttactctttgaattttcaacaatcgataatacagattttctcttaaaatataagcttgttaaaaatcccttaaacttttacatttataaaaactagtaaacagggtgcggcaatcaaattattatataaataggtattaaataattttaaattatgtatatttattaaaaaaaaataaaaatttatatagaaaactttatagaattctaaaaaaaaatatcatacaatttcttatataaataaaaaaagcacattattttttttaaatatatattatagtgaaaaaaattagaaactgaacaataaatctatagaaaactcatcatataattttaaaacaactattatcaccgtatctcatttttaggtaccattgcatttaaagtttcttacataaataaaaaaaagcacataatattttttaaatgtatattataggaaaaaaaaaattagaaactgaac

SEQ ID NO: 194532 - DNA, 2633 bp, Cannabis indica
tagtaaaaataatatcactctctgccatacaattatattattatacaataaacaattataatatgaataaaactgtggacacattttcttcctaatagttaaaaaatatatacatattaatagtatgttatgatatcgtattatttttatgggaggtcagaaaaatatgacatatcttgaagtatatattttatattttaatgtatataacggtgaaaaattaaatgaaaatgatgagtaccaaatatatataaaagatataaatatatatatataaatataaatatattgagagtaaaatataaaagatactttcatattatgaaaagatattattttttaactctcgttaatattgatcttagttagtaagcaaagcaacacttttatgttgaaatttcttccatatatatcttgaaattataaaggttagatctgaggcaaacaaaaatacattaaataagccaagcctagcctaaccaacaaaacttaatttagatctataaaagatgagacataacccatggtaaaatttattatataaatatatgggatgatgactatattattatatggaaacaaaagttctcactcactaaaatattacattaatgcgcatcgatcccatggtaagatttaatttgttatttaatttatgatcaattgataatgtgaattagtgttgtaaataagggttgggtttttgaaacggtatgaaatcgtcatgaacatgatcaagtacgaaaaatataggttcggacacaacttgacacgattaatgctataaattgacacggtacgaaaaatatatacttaagcacgatataacacgacatataaacacgaataaaaatctgaaaaatacgacacgtaacaaacttggaaagtacggcatgaaatattaaaaatcctataatttaataattataataatgcatttgtatttatcaattataaataagttaaattaataataaaacttacaatattataattatatataaataattaaaattattaaaaaatataaacctaaaattatatatttatttatagagtgatataaaaattttgaatattcataagtaaatatttaaattttaataattttaataattatttttatatgattatctatattattacaaaattacgtaaatataatatttaaaactataattgtatatataatttagtatttaattcataattgtaaaaaaaaaaaaatagaatagtaaagcatatttgatcttagattgaaaataggcttgtttgtttaagaaaaatggatcagcacggaaaagaaaatatcgagcttacggactgtgttgtgccaaccctatcgggcctatcatttttaaaaatgttggcacgacacgatactactcatatttttttacaacacaattcatattttaaaaagcatgaaaaaatataggttgagccattatggcatagacggacctacatagaactcataaagggcttaagttcaccctcaaatttcaaaacatattatataaaattaaaaatagaagaaatatataattattagagcataattggtttaagtatttattcattggttagtaaatttgactttgaatctaattccattcaattcaatcttctatttttatatatataaaaaaactataaattattaatataaagcattcaaactacaaataactttttcaattgaaaaaaaattattattaataaattatataattaatacaagttcctacattaaaaaaaaataagaaatataaaatctcatattattataatatttagatgttaaaatttgtttcaacttatatcataacttcatctaaaattttgaaaaaatgtaatatatatttttttaaaaatatatatattattttagtacaaattttagttaatacaccctaaagtatattctgagtccggggcacacaaaaatttacagatataaatattcaattggaataaaatacgtaccaaaatgcaattctatgagaaaaataattatatgtaaataaaattttacaacttaataaccaaacttataaataaatagaaaataataaaagaacaacttaaattcaataatatttttttgtgggggcatcagtactcaataattcaatatgctttgaaattataataattgataataatgaaaagatgaacacatataacttttaaacttttaatgaggccaaagcaaagtttctttcaattttttaatttattttttaatatttctttgtccactatcgattctcaatgtatattaattaacctgttctgactcctaattatattttctgttgtacacttctctatgatctatatacgattggtcttattatcattatatacatttttgttttttcttatacgtacttgcctctcaaaatacccacagagccaaatattattcatattgcattattacatataataatatatataagtatgatcatatgataagttaaatatgattttcccacttaatatatatggaccttacttaaatttctttgtcttttattcggtagaccacatgcccaactattacatattgttattattatttagaacaataatctttatatctatatataatatataatttatat

SEQ ID NO: 194533 - DNA, 833 bp, Cannabis indica
ctgatgcacgggtactagaatgtgaacctgctgtagtggcttcattttgagctagatcaggtatgttagacaaggtataatgagagaattcatgttcagagtttgatacctgatcatgaccgattggactttcttcaagggactgatctgaatgttcattaccagctggtgtgtacgaagatgtttctctgtcattgttttggttgagtcttggattttcttgttgctgagatgaggaaaaggaaactgaccaagatggcacacttactgagacttcctgttctggtttatgagtattaaagaaacctgttttacatggaaaatcattttcattgaatatcacatttctagatatatataatctccctattgtgctcatacatttatatcccttatgtgagtcactatatcctagattgatgcatttcacagagtggtactggaacttatgactttggtaaggtctaatacaaggatagcatgatgtaccgaagactctaaggaacttatagtcaggtttcttagaatagagaacttcaaagggacacttatttttaagtacaacagtaggcaatcggtttatgaggtatacagaattttggaaggcatcccaccaaaatttcagaggcatagatgcttgagccaacaaagttaggcccatttcaactatatgccgatgtttcctctcggctcttccattttgagaggaagtgtgaggacacgagtgttgaaaatcaatgccattctcaacaacacagttggaaaaggcttgaaactctccccccaatcagttcgaagagctttgatttttctatcaaattgattctcaacaa

SEQ ID NO: 194534 - DNA, 1284 bp, Cannabis indica
aggtagaaaaagtaagagaaaagaaaagaatatttaaataattaatgtagtaattacaatgataaaattgagcttattttctttattaatggatatttgtgcagccgaaagcctgccagcgcttaaatgagtcaaactactttcaattagaagttcatctttcggtaggtaaacatgccaatgcaatctatattatttatttttatcttcatcatcacatgcaaacttttttattctcctatatttatttgtatacataattatattaattatttcaaaacataaatatattagtttggactttggaatgagtttgtaggagaataagggaccaacaaataattcacctctgtaattcttgttgttaattattagaaaattattgagttaaaattacgatctcattctaataatcaatatttgtttcataattttattctgcaatacacgtgatgaggagtcttgttttagggctgtattattagagcatctaacatatgaaatacttgggagtggagtatattctatactaaaatgatgaatcatgcatacatcaaaatatatatgtataaaccaaaatatttacaaattcaaaaaggggtccacaaaagcaattggtcaaaatctctatacattaggctatggaagaagccactatattgactttaattagtttttggttttggtgtctaaattctttacatattagaaattcaatctccaaacataagaattctcttataattaaaaatgaaattaggatagtttttatccacatatcagatagtgggctccatgagagagaaaacgcatggcagatgggttcccacttctggtagaaattaaaattatggtcatatctcatatatgaaaccaaaaacgggctttgacctgaaaacatggatagacgagcaaagtatatgtagttgtccttatccacaactttgacccattcttacaagggaattgaatgattattctatgttttagctgcatgaaattatcgtgttttcatctaaatgcacacttgtctttccagctacaaattgtcggttgaatgatattgtataatttgcataattttattaatatttacaattcttacacatatataatcttaattaaaagaatagcaaaaatattttattttatgcgattttattgtagtcgtacattttttaattattaagtgtcaatttaaaaacatatagtaatataatattagataatatattaaatgagctaaagaatatctccacacggtacttaattatcacttaacaa

SEQ ID NO: 194535 - DNA, 1341 bp, Cannabis indica
aatttaactttttactatactgcacatcatagatgattcattttccttttcttatttttattttatttctcattttcagtttgttattttttttttttttaaacaaaaaagaaaagaaatatacgtgatagatgactgattgtatctactaattacatagaacaaaaaaagtacaggaatatatcaactaattactatataattttgtaatgtcaattattgtgacatgtgtcattagtattttacattaatttcatgtcatcgaaataaatgggacacatcacatcattcacaatagcactctattacaaaagagtgctctatatattcttcatcagtagtttttatttctttccttaacttttttttttattttttttatttttttattctcatttaaattatttttttaaaattatgctatatattgctatatgatccaacatgtgtggttaggagagggtcgatgcttgcttagtggagttgcttatgttagtcccctacctttgtacactttttggaatccaaattaatggagttgtcattggcaacaagctactcacttaaaataaagatgttatacactctaccaaaaaaaaaatgttataaataacattattgcttacttaattatacaagacaaccataattatttatgttacttatttaactagaaagtgtaatcaagatgctttaaagtagagttaaaaaatgatgaaaaagtgtaatcaagatgctttaaaattattgttaaaaaacaatgctttaaaattgtttatttttttaataaaccattttgaaaactaaaatttcaggttaaaattatgctttttttttttggttcaattattaaaattcttctcaccaaaacaaaattatttaatttcttcttccttctatattgacaagctcaatattgaattttttcttccttctattgacaagctcaatcttaataatactttcagacgctcaattattatatgtctgaaaattgaattttttgtaaggaaagaaaaagataaaaagaatgttggagaaaaaaaaagtgtggtgaataaaaaaaaaagaatcaaattattgtgtttgacatggaaaattttgttaaatcgagaattttttatacaatttttcattttatacctaacagtggcggagctagccgtaaatgttagtggggtttttttttttttttttagcaaaagtagcttattaataaaaaaaaacttatttttgtaagaaagaaaatataaaccttttagagacataaataaatatgtgagaataaaaataaaaataaatttttatagaataaatataaaatatgtgagataaaaaaaa

SEQ ID NO: 194536 - DNA, 1321 bp, Cannabis indica
atgactcctaagtctacccctgctgacccatctcgacacaccattatgggtaagattccctcgttgggtttttctttccccatgaggcctcttagtctcggccatgattacctcaccaaggcaggtgagtctgctgctatcttgaaaaggcatcatgagcgggagcaagtaaatcttcaaaaataggctactcggctatcttccatcaagacggctgaaattgcaaagggagttcgccagccttcctcccccgacccagtgttggatcttgctggagcgagccaaaacttagtatctaaggtggccagagtcgttgtccctcacactgcagtgatgttggatagcatgagccttaatgtgagcaaacttacgtccaagaagtgggctgtgagcagtaatgttgatccatacacactatcgatggctgctaaacaacaggtagcgggggtaagtctcaattttctgaccagttcttccttttggcaaaatttttaattaccaaaatgtgtataatttatttgccattatttttctttctctagatggcattgtttacagagaggaccaccaaagaagtgggcaacatgaccactgaactgagccaatttcgcactaaggtctaatccttgataaccgaaaatggtgccttatgcgtagaagttgagcaagtcaagacccatgctgtctcaaacatctaaaaggtctaggaggactgcaatgccaagctagcagttgaggagaagaagatagacaccaaatatggaagctatatttagaacacaaggcccaagttgagaaagaagtcgaggagactgtgtgttcccttcaagagaactaagatgaggtcaaggaggagctccatctttctcgggaggagaaagacaaagctaaggaggaactctgtctttcttgggaggagaaagacaaagctaaggccaaggttgttctctagttttaaacaatatctacccaaatttaggaagttagccctctccaaggggacatctaacgaaaggactcactcatacaaagccttcgtaatgattgtgacacagagaaaaatcagaaatagtcctagatgacgaaacacaataatctgaacatacttcttcatgcaacttaccataatagcgaccttcgtctggtgaccattaacaagttacaaaggcaagtcaatcaaagcccagcgaatggtacgaaggcatatattgctttggctgctatgcaaagaatgagagaaacaacccctagactcttcgagatgcagctaaggcagagaagaccttcgctccttggagatgtcttatgccatggtcctttt

SEQ ID NO: 194537 - DNA, 882 bp, Cannabis indica
agctctattaccatcgcgatatgcacagtgaactactataaattctggtattctctctttagttattaattttttttctgtttgttgttatcaaatatcagaagatacgaagttgactactttttagcgtcaacaatctcaatggagcaatcattttctatttaattagtctattctactttaatgaaaataaaataaattttttgactcaatagttttttttggagaagaaaacactaaaacttcaccttaaagagcaatagctctaaataagagaaagaggaggtatatatcattagaaattcatagtatcaagcatgattgaattttgaatacaatctagattatttggccagtgtctaccaaactttggtagttgccacaaataaatcatacctaaaaagattgtgggcaacaatatttctttgtcctaaaataatgaaaaaaattcacattattaaagagaaccaaattacaatatacgtcacaaagaactaaaactagcgtcgactctaaagaaatattattgttaataatcttattagggcatacccataatacataaaccccttagctacatctaatgaatattatggttattttatatttactagttatccacaacatgtgattttataattttctagtaaaatgtacataaaattagtattaatataaaattctaaaattatggtaatattcattattaagagattaagttgcattaatgaaataatcagtaattagacgttgcagaacgacaaggcctcagtaccagaaatgaaagcccgaaaaggccaggcccaggcccaggcccaatccactatcgttcccgctcccaatgttttggcgcgaaaattgagactcggtctctctctctct

SEQ ID NO: 194538 - DNA, 1403 bp, Cannabis indica
gtgttttccactttccacttgttaacaaattaaaagccactcccttttctacgtgttgtaaatttgaatcacagaataggtccccaaccgaatatgaattgttgttaagaatgagttgagttgaagctgactgaaatccaacttcatatcaaagataaaatcatgtagataaaaagttaattaaagaaaggcaaagaggcatccttcccaacccaaaagctgctatacctttttgtttcaacacacatgttaaaattataatggaaactttcccaaaggaaaaaaataaaaataaacatataatatatatatatataattatatattcggggtgcaggcgcagggagcaggggcagcacaattagacttagtttacatatactgtatgcatatatgcccatgtagtaaattcatttcctagtcaaacaacatgcaattgtcgatctatgatcaattcaagacccacccatcttacttgaagacttttcttttcttttaccctctctctctttgttgttgctacttgctatgactctatctttctcttcacaataatctaaattaatatgatattaagacgtgcaactaacttgattagaatattgttcaatactacttaataaggtatacagtgatcccagtaatttaatatcagatttcatttataaaaaatagatattaaattacacttaacgtaatgatgcatcaaatggtgttagacatatattaatgttatgatcagccgattatcaaacttattccaatatatcactatttggtacttacccctaactttttctttctttaaatgatatcaatcaagccatttccgtgccccaaaccactcactcattatcaaaaaatagttataataataaagtcgtagtaatctaaatataaaaacaactgggtatttggccaatgtgctctccacaaatattaactaaacaaaattgagccaacatgttgatgggaacattataaccatataccatgttagtcatatgccatctaagaggtataataaagagttcgatcaactaaaacaactaaccatagacgtaggataggtgaaagagactgccagaaagagtcaacacgtgataaatgaacgagcctgatcttttcaaacctgtgataagagccaaagtattgaaattgctagaagaatcagctaaagcagaacaccctccgagaaaagggaaagatatatttagtagtatctagtaaaatccaaagagcatattttcataagagacttttggctaattcaactaatttttgaaaagaagtaactttcatttcaaagggtcactaccctttcatgcaaggattgaggcagcaaagaacacagcaaaacatacacacatatatgaccaaatatcagaatcaaaccaaaccaa

SEQ ID NO: 194539 - DNA, 677 bp, Cannabis indica
ggaacttttgtgttctttatacttggtactataatttgcaggaagcttcttcttgttgttcactggtcctgttctgctcatttcaatccttgcctttgcttacatatcatctctggtgaagaggatttttcaaagtatgtcatgatgtggttttgtttcaaggcagtctttagtttttattattatataatctcactaattatgtagaagctcactcttcattcccaattgttataatttaatgtgagttgtcatggcaagtttgtatgcttacaattacagtgattaaattttagggcatggctgtccttcccttgttatttaatcccatgagttttcttgttttgaattgaatatatttattgtgttataggaagaagaggtctggtcatccaagtttcaggttgtggactttccctgtgattgtggatggaccttttggggtcgtttctgctgctgagcttattggaattcttctctttggtgtgtatgttatctgggctgtctattcatattccttgaaggccatcagcttaattcctgaccagttaagctttaaagtgcaaaggtatatacataacatgtatttatatggttttttcaatcatcattttgtcctagtttaaaatataactgtccatcaatttttacaccaagggatgaaccgctctgttgtt

SEQ ID NO: 194540 - DNA, 1881 bp, Cannabis indica
ttcccaaacaaattttcacaacaatcaatagcaagataatcctcccacaatattatcgtttaattactgaaatgatcaatcttcataagtttgattaagtaaacagcaggatcccaaagttttgaagttttcttgcatcacaatttcattcaccacctctgttcttgttttcgttgctaaaagttgaaatgagaactcaaaggcactagaccagtaaaattggtccaagcatataggctgtgttcaaagagtttgaataatattgtccattagacaaattaactttcattttgtgtattatactaaatatttgaatcaataaaactacttctcctgaaataccaagaaaatagtttgacaaagaaattacaaaactaaagcaattctgctatggtaacgtctaggggtcaaactcacacattctaacatgtaaacacttcaagcaaggcgcgatcacctcaataagattgacccccaagagcaagctacaatacatacctatactctagaaaataacttcctagttttcttctctgaatcatcacagtgtactactacgataatcatcaatggtttgtttcatttgatccaactgcaacaccacataatccagcttcttgcaacaaatctcattggctattctcgaactgtaatcacacttctcaaatggacgataatcacatgcactcttgatttcttctctcaatgccacttggatatcctgatttaaaaaccaacaaaaatgtcataattttcgttctcgattttgaagcaatcagcctacaccagagctcaaagcatatatgaaatactataaactcaactggtttatactcactttcttcttctacgttaaaaactaaatcacagagaccaaatgatcgaaacaaaacatagtctatcaacattacaaacaggtataggtcatgttatctgacatggtagctacaatgggagattcagaattcaggtgtttcacttcttctacagctaatctataatgagatgtacaatgaataaagataagaaaagagtctccacgattcatgtgtctacttatacagtttgattcctactctgtagtacttcaaccaatactcctcacttaaaaatagtgatacaaattatgaggcaaaatgtcaaacagtttgcagactcatcaaacattccataaaaacatctacttgttttgcaaaatctcaaaattatgattttttttttcaaattataatgcaacccgtttttcaccccctcaaatcccaatccccaacctcaatttcagaaaaaatcccaaatcattacgatttcaaaaaaaaaaaaagaaagatgaaatatggacaaaccttgatcatttgcatgaactcgcggcaatggttgttgacgaactcctttctgggaccggtggggttggaaagctcgtccatgactccggcagcaagttccaaaaccctaacgattctctgtacaaatagtgtcaaattaataaaaatcaattgttaaaattctgtgccctagaaaaacaatttaagcttgattttgatattagaaggatcatggaattatttgaataccttctccacattttgaagtctctgcaacgacgtgttctgtgtctgggaatccatgtgtgaagttgattgggtttgatactgattccaaattgaaaccaaaacgagatagcaaagagaaacactgacagacgagacgagattagtaaattccggtcactacaagaacgacaactatttgttaaaaacgacatccatttgctaaacgacctaaaatatgttttagagattttttcatttatacattttaaattatttgaagtagtttatagtgtccaaaatctaatgccggcatcatctgcatttgataaga

SEQ ID NO: 194541 - DNA, 960 bp, Cannabis indica
atatatatatatatatatcgtatgatatatattattaatgcatatgattttctttcacttgttctgttatgtacttcttcttggccatgttgaattctttcttttggattatattcctcttatatatcgttcaaaaggagagatcaactatacttagaaaaagcttagcatgatagggaactttatgtattaagataagcatgaagaatatttatatatataagatgagcaatcatctacaaataatcaagttctcttggatgccaaagaaaacgaatctatcctaagtgaattagggaatttagtagaacaatccattttctctctacaaaaagttgtattttatatttttttccagttcatgtgattctctcattgacaaaccttacagcccgtaaatgtacccatcattggctttccgcaaagcatgagaatatgtcatataatgcaacatatataaaaaaagctaattaatttcacttctctttcttaatcacaaagaataaatattacttaatatatctctacaccaattaaaaataagttgaagggataactttgcattaaccatgcatttttcttttttgatatattcggtaagcataatcatcaaagcaaacgatatacaaagaagatgagaatcttacttttacaaccctcgtttaaaatgttaaagtacttcttgttagatgcacacacataataaatatatgtatagttgtaacatatatatatatatataaattaagtaggaacttttcaacaatatatatcttatatagtgatgagaccaccagagtatatatatgaagtatatttgtacatatatgcatccaagctgagaatggatccatgaaaaagtacttgatattattttcaaaaatcactatttaggccaacttagatctagctattttcattaatagcaataagaaaagaccaaaataatagacctgaaaa

SEQ ID NO: 194542 - DNA, 2467 bp, Cannabis indica
gttgtgaaaaaaaaaagtgtgcgagtttgttatgtgatgagagtgagaagaagcagagagtgtattgagatttaggtgaagagattgagataaagagcatatgtaattttgaagtgataagtgaaatatatctctcttagtgataattttggagtttttaccaaactgagtaaattttcttcgtttcgtttctttattatttcgctgcgcttgaagtttatcattatcattctgctccacaattaaaatgtgttaacaatgggttaagaaaagaaaagtgagagtagttgaccatcttggagtggtgtgatccacaaatcatgtctatgaccgttaattgtggggttggacttaatcctggtgggttgtctagcttatttttgtaggttaaccacctgggctgagatagactcaaatgagctctcgtgcttttgggcttaccacctcttgtatcgttaagttttgaattggatttccagataaatttgagaaaagaatttatgtgtttaataataatgagagatagccacgttcagggtcgttgtctaaattccctctcagtccaagagatttttcataatttttttcttttaagtatatttttcaaaaattagcctataaggctcctttttttttttgtttttttttaaaaaaggtttaaaaaattatttgaattttattttatttctcaaataaaaaatttattttttaaaattttgacctatttaaataaagtaaaatatcatcctatgaaacaagtgggatgaagcctaaacttagacgacaaaaagcaaaagggaacaaagaatcaaaacccattgtctcctctatatgaaaatatagaatgtgtatgtacttacttaacaacaatacatgaactaatccaccaaaaattataacataatttaacaattaattataccaaaatatatatttttatataaattaataaatgcatggtttttggtttttggtttgtggttgaagtgaaaaagtctatatgaagcatatgccctaaagatggttccactccaattgggttatcacaaaatcatcacatccatacatggcttatatatatacatatatatatatttatatgcttttcacaaaaaatatatgcaatattctttaatcaacaaaactagcccatcaaacttattttgcacgttttgccaccaattaattataatacgaatataagaaaagaagaagaagaagaaaatattcattgtactatataatatcatggtttaagtgctaaagaatatacattatacaccaaccatgaatttcttaattacttttattcattaagtacttcataataaaaagaaaaaaagagtgagtacacttggtattaaaatactatcaccacaaaaaaaaaaactatatttagtaaaacttaatttttagtcacaatataaatttgtgtgactaaacttttcttatttcttttttaaggatccccgaatcgaatgatattcttgttccaattttcgcctttttttctccctctgaattaaactttttcttgccataatgattcaattcctattagtttaataaaaaattccttgtgactaaaacatggtatttagatacaagttatcactaatttagttttagtcacaaaaaatattgtaactaaaaacatatttagtcataataaattataatttttgtgattaatacatttagctacggacatattaatcacaacatagaaatgataatttataattagtcacatattttttacttttaattataaattttatcgtgattaaaaataattttttttatagtgtatattatatatgaaaattttaggacactatttttatctttattggtaggaacattcatattttgtttttatttttagtatgtatttagaaaaattataacttaaattttattgtatatggttatatccattatagttttattattagacaataccatttagatcttgtattttgtaaaagttattgattggacgttctgttttgttataagttataaagtagaccttatattttctaaaatagtacaatttttgacaatttttagcacaaaataatataaaaaacgtaactaattttgtcatcatacctctatatcagattattattacattttatgttgtaaaaaaaaaccagttcaaggtgaacgactatttagtattattttaaaaacacagagtaattattttttaacaaaatagataatgaaatcaatcacttttataaaacaaatttaaaatagtatttaccttaattttatagcaaacaattccacattattgttttggaaaaagtagataatataatgtgctgaaaatatagatatattgaagataagtggcttgaataataaagcatgcatatgtctagttcattatggaataagtcattttctcatgagaatactatttattcatttaaatttatatattatataa

SEQ ID NO: 194543 - DNA, 789 bp, Cannabis indica
ttaattaataacatgtactagatgaacatatacttgtgaagaaggagaaggacattatttcattattatcattataattggtcatgtcaataatccaagtcaatgtgactaaatatttctcaatcaacttgcatagccctgttattcaagggaaaaagtagagacaaatggtagtaaagctgaggtgatagatatgatgtgttaataaatgaaagagatttatggtactaaaataatctcgtgtgttgaggtacatcataattgagtttacttaattaataatatgtagatgttattggatattggatatggtcaagtttcagggaaagttcaacacaatatttcaatatttcaatttacagcataaggaagaggaggattaaatatgacaaattaggcctcgacacatcacatgtttttcaactgtagtttaggtttgtatgtatatgtaatggtgtctggtaatgctattgcttattatgaagaagggagaatatatgtaaaagagagagaaccaaaaaaatatgtggtccccttctagatgtagctcttcctgtagaactttagaccaaaaaaaaaaaaaacaaaaagaaaaaacaaaaagtaagaggttttatcattaaattgttgttggaactaaaagtgattatttaatgataatttttggtttaagaatttgattttcattttttgttaaaattaacaagaagttatctctcacgttaaattaaatactaaaattcaaactcaattagaatatgaatctattttatcaccgaacaaaaaaag

SEQ ID NO: 194544 - DNA, 545 bp, Cannabis indica
atatatatataaaaatatacaaacaaatatttgttcgtgaaatgcacgtttgtagtcttgaactctagcgttgtaatttgcaaataaatacataaaattattataatttatgtggttaatgattgaacatttgggtggcttcaacaagaaccgttcttcactttctaataagaaacaaacaaacgtggattaaactacttaaccaactaatatattcccaatttgcaaaacgccaagcaataataatttgtactaatattttatttcataagaaaagaaaatcgagaagagtttatatatgctaaatatggtgatattttaatgctcgaaagggtagtcaaagtcttcaataatcagctgaaagagagtacgtatcaagatttttctactattattatatttaaatctcaatcaccattaaatattattgggtgtttgttactaaccaaaggtaatattagtatttgttttattttggtatcgatgccaaagttctattttgttttgtttgattgagtcaagtttttagaggctgaggattttat

SEQ ID NO: 194545 - DNA, 2723 bp, Cannabis indica
aaactatgactatgctgtagattattgtcttatgtttgtttttcttttacttttcagctggttgctatattagtatctatagagtgaatgagtagacaggatactttaacttgaataatgtatatatttttctgctttcgattttcagttttataacccctacaaatcttgacctgtagaactgtcaagaagttaatttgctgaaaacttttaagaatttctcatggtaattatatggctgcatatatgctctgatgaggaataccaatcagttggattgttaaacattttccccttttcttgttattattttcaattctatgatgcattacttcattttatcttcagtaatctgttcaacaatggttacctcacttgtattgaatttatgcatctttaatctgtacatggatctctcatttcacctacaagctatagaaggatatgttgttgtttaaagcttcgcacatatcatggttttgtgacaactttatgagtggtaccttatcatcattgtactcgtattgctgctggcattattgccagaacatgtcactaagtggctttgaacaaacaaggttcctcccactgtttagttcatgaatatgaaaatcgtgcagaatatcgtttggactcagttctttttgaagggaacagatcttttctgcttcttcatagccaaaagcagggaaccagagaagaaaaaccattgttgttttgatacagactttatacccactctcagtaacaaatctccaagcattaagaataaccataccggtcggttgttctgattgtgggaactgttgctggtgttgtgattttaagaattatgtttgtaagtggctttctacattgttcaactcaaaagcagggtcaaatgaattaaggtaacattctaattttttcgatattccaacactttgaacatagaatgctgtgctgagtttgatgtttttctcaagaaaagctacttcattattgctatagtgatctatagaattctgatctgctattttcttcgcacacacaaaaagctcgttatatcatttcgttataattctatgggaatgctatagtgatctatagactgctgatctgcaaattttgtaacaactaacttgcaggctaaaagttatcatttgtacgatacaaaagctcgttgtataatcttccctataagtcaatagggaatgctatagtgatctattgtctgatgccccggtaatttcaatgttttgagccggtgtgtcgctcaaatcgccagataaaatactaatgttaacaagtataccttgaaaacaagagttttgatcaagcattattaactgctaatctcaagttttgtgtatttttggatcgaatccgactgccttcaagcggttaaactccttggaaagaaagatcggggctgtagtgatgttgatggaattgtgttagataaccaaaatacaaaggttggccttatggaagagttgcgttccaattaaggtaaaagttttctgatggctggcagttttgggaaaggtgaatgctcatgacacaatgcaacaaagaagaccatctatctcttctactattggaatgtaccttttccaaatcatgatggcccaggttgttggtggagtttgggagagttgttggtgttgctagttcaagtgttttgtgtgtttagtgggtttctactcccactttgacataaaactctgaatgtgatcaaattaattaagaaagctacttctttatttgcatttgggcaatctattgaacatttaagccaagagcactagtcaatttgacaaagagtggacgattagcgaggactggttcagagctagagtcggctagcattcttttaatttcactctcgacttggatatattatccaagtcggctaggatcggttcaatgaaaaaaaagtgttctctgaaccgaacgtgaaagtagttttccatcaaacggctgttctcgcaactctactctcgccttggattatatatctatcaccaatagtatgtccatctatgttcagagttggggcaattattagtgtttaaaatgttactacgaaatgaggtataatacctcaaatatgtacctcgtcatttttcttaactaaatgtaatgaatagttatgagctaaatatttttatattcttttcacttttatttagtttaatttattttcagaaaaaatttatatgaaaaaaaaaaaccaacctttattacaattttatctctataacttttatacttcttttattttctttaccaatataacttttgcacacacataaaccttttatgatgatgtcattatattctattgatactcaaaatatttttcttatcttttatatacatgttcactattttatttttagttttcattttaatttttcatttcaatttcattttgaattatttttctacaatcaaaatcaattttttctctaaaaaattactccccacgatctccaactaccgttaaagttccatcctaacgatttttcttttgttttttctttcttccaaattctgtgtaaatggtcgtgacccgctcctcttcttcaccatccccattcgtgaaaaaaatcattgttaagaagcccatttgtaaaagctctaaactaacaacaatgagtgttaaatcattgttgaacaaagagatagggaaacaaactatagttaaagatgataactctaatgaagattttgttgaa

SEQ ID NO: 194546 - DNA, 1701 bp, Cannabis indica
taatgatgatgctcatctctttcatttaatattctaaaatatatatatacattacaaaaactgaaggaattaatctacaccacagaatcctatagaagcaaatatctaagaccaaaagaataaatacaaaactgttttagtaaataatgagtacaaaacagaatatatacatgtattaaagaattagtcaaagttaagataataaatatatattattttaatactttattagaagtatcggtctataattgattagcgatttttttttataagatttattaaagtaaaataagtggcatcccatactgagttgtaccataactatattacactttacaagagttaggcaaaagcacatgaatacatttttctataaataaaatagagttcaacgtaatcaacttactaaaatgatggcattggctagtttggtttgaaccaaagaagtttaagatgatacctaataatttattgagtaggtgtttaaatattcttttttaaaagaatttttaaaaaatttagtttgtattttttaagaaaacaattctattgtatattattttatttttctaagataattacttatattattacttgatataaatgaaaagttatcaatcatacttaccaacgaaaaagaaaattaatttaaaaaaaaatgtaatgcattcgaatattttacacataataattatcggaaaattactctatttattatttttatttaatttttttttaatttatgatttgagttgctctcataattttttcagtagtttttatatagattgttatgtagatattgattacgatttaaattaatccattagttgactataaaaaattttatgtaaattttcatacaaaaagttattttaaaatataaaaataataaaaaaaaacctcatacttattttggtttcaatttaacaagggggccactaagtactcgttgtacatacaaatataactacatatattaaattaaacaaaaaagacaatatacatgtgttttgggggtggggggctagggccaccctaggcttgtatatgcctcccctctctggtttcatagtttggtggcctagaactccttgttgcttttaaacttttgcttcttatgagaattcattcacttaaaaaaaaatagtaattaaaaaaaaaaaaacatgaaaaattggttactttagagcaaacacaatcaaatctttctcccttagatactagccagtatgagcataaaatattattactctaattagtgttgaaaatgagacatgaaattattgggatgtatatagagtgagtcaattcattagctgtttctttatatatatttgactcaaccactaatatttttttaaaaaaatcttagtccatttctaacacgtcatattaaaatgacacgttacttactaactataatttaacaaaacattaattattaataaatgaatgatatattatatatttggaaagtaaagataagatgacatcattttatttaattatacatgagcacatcaattttatatttaaaatctcttaataatttactttaatcacccaaatgtaaatagttgcattttgaaaatataaatatatgaattttgtgttttaaaaattacaattacaaatgatcatagaaaaattacaattgatatagaaaaacaactcaaactcaaactctaccaatattat

SEQ ID NO: 194547 - DNA, 1306 bp, Cannabis indica
atgtgaatattcgaactgctagactagaccaagaacagtattatagttatttaatgattttagggacatgtgatggtacaattttaacttcatgcacaaaagcaaggaaatataattttagaagtaacaatgaaattttgtgcctaccagtttgatttataagattatgaaattcagccttttcaaatctaagctataacttttcatcggctggacaaagtgcagcccaaatttacggtagcagtgtatacaataaatcaataaaattttattagtgtgaaatttgatgttttaaaaaacatgtttgatattgtaagcctttctttgcactgaatctatctatctgttaaggtgaagtttcttgaatatgcttgatatttttccatttaattcccagatcagattttttgctttactgtattcttttttattctagtatgttcatagtggtggtaataatatgctgctttacagatgacattatagtcactggcgtcttaactgcaaggtggtcacctgacttaaaagatgttcgctgcgaccttgatcctgtgctgattgctaatcatgtgaggtaaatgtaacagctttgtttgaaggaacaaatatttttcattgttgagagagatggctattgttccattggagtcatatgtggtaaagggagctaattagtttagctcattacctcgccttggtcttggggaaccataatcccatctttcatatgatacaagggatatcattagtgcagtcagttgatgttttaaataaaaagggatagaaaaggatttggtggtaactcttttaagggatgcgaaagtaatatcagatagattgaaatagctacagatactgaaaagagactcaaaacttgttacaaatgtatttctatattaaaaataatacaaatgagtttttggcgaaaacaataaagtagaaagtactttttatatgtcaacttatcttatctgagtatcaaaatttggttagaaaaatagaactagaattcaggatttttgttgattgagtagattacttagctcaatcataacaaaaaaagaaaaaatcttggaaccagtattacatgaaagttaacatactaccatagatttaatgctgtggatatttcaaaaaacctgttcaaatataaatatatttgctgccagtgaggaacttaattttatgcctcaagagtgaaaagcatttttatcatcaccctatcctaagcagatgtcatccatttgatgctgctctaaataagtgagatagttcccaataaggcaaatagaaaagaaagaaaaac

SEQ ID NO: 194548 - DNA, 828 bp, Cannabis indica
gtttacatgccattgttgttgcagttactgctggccctctgtttctggtaatgaaacatatgttagcattgaatatgaagcgtcctcaatgtttgatctgcggaatgttgtgatctctgtacctcttcctgctcttcgtgaggctccaaatgtcagacaagttgatggtgaatggaggtaagaaattaattttcttttaccttttgcttctgaggaaatagcattaagtaaaaacagaatatgtaactgatgttcttgactaactctacatgttggggtttctgggtttggctactttatatatagttccttgtgaaatcaaatgggtgatgttgcgatcatactttagttgttttttttgggggttgagatagttctcaagtctgactgctgtgatttagtgataaattaataactttattaaattaaactcgcataatacctgttggattttgtggtttgcttttttttttatactgtacaaaaaatcattgctttagtattgccattttacacaaaatagcaaataatgtccaattgccctctttctcctctgtgatgtgtaagtagcacatattgagttacattggcaatgaaatttcagggtatttatcgtatcatgataggttctatcacatttttgctgaactgtacttcatgttgttcaagttctgtatccatttgcattgtttatgagttgcactacattttatttgagtttggtatcgatttgcactttgtatggattgcaggtttgacccaaggaattctgtgttggagtggtccattctacttattgacaactcgaaccgaaggtaagaacttgtt

SEQ ID NO: 194549 - DNA, 790 bp, Cannabis indica
ttttctttttttttttattaatcgagatattgtggattgtgaactctgttggtgtcagataaggcggagagattgttggccgaagcggctgggtatgggtctcagctcgttgtgtttcctgaggccttcgttggtggataccctcgtggttctaattttggtgttactattgggagtcgaacgcccaaaggcaaagaggagtttcgcaagtaccattcctccgccattgatgttcctggtgagttctttctttgtgcaaagtattttctgcttaatttcaagttgtttgaaaatgtatgtactcgaaatgtctcttttgatatttaattgtaaatttgggaaagaaagctttactctcgtttgtattgtaagtcttcaatcatagaacatgttttcaatgagcatatgactgcagaaacatagtgattagcaccatggcatcctataagtaaatggttagcggtttttttaataattattaaagtaaaataagtgagacccgataataaattttagtgatcaagatatgacatcatattttataagggtgctactgataggcaccataggcgccctttagcagggtcaccttgttaggaccaaggtgcattttacttaagctaggagaggtaagggtgctacgggccaagggtaatatggtcttttactctgttggtggtactttggtaattgttgggtgagttgcaagcttttaagtgcagtgagagggtttatggggtttatgcatgcattaagaatatttattcacagcaggggtcctatagggctc

SEQ ID NO: 194550 - DNA, 1156 bp, Cannabis indica
aaataaaataaaataaaaatacactaatttaattattatcaaattcaattttatacctaaaacgaattgccacaaatttgttgcccgacctttaaatgttaggaaatcttaattttagcttttccacctttgaaacactataaagctacactattaatttaagccccttcaattttattttataacttaaacttgtaatttggtcgtttctttaatataatacttattattttatttgtttaaaacgtcacaattttttttaaaatatatttttcttcataaatagtaaatagtgatagaagatttgaaatagtgtatatttttagtttaatttagtgtacgtgtcaattttttccccaactatactctcttgacctttgggttggagtaatcgtttttcttttctaaaaaaatagttttatgtattaataaattatacttaattaatacaattgtatgtgttaagattagattgttcttcatttatactagtaataaatatcattttagatcaaatttaaaaaaaaatatttagtatttctctttttataaatgacaatatggattctgtattcataaaaaacaacctaacacttagaattccatagcattgttaaactattttgtatcctattcctataactttatagttttttttattatatataaatttttgtagtaatttaacatttaatctagttataaaacaaaatatttgaattgttatttaaaaagatagattgttaaattataatttatagtatcatttaataaattaaaaaatacactctctcaaaaaaaaaattacattatttaatttttataattgttttcttctttggtgatctaaacatattactaattgtggcttccacaatccagttgaatttttatatataaataaataaacaaaagtaaattataggggaccacacaaaaataagactatgacaaaaatccctacaattgggaatatgaacccaaaaacccaattttatatttaattattatattttgaacaaagcaaagctacttattaaatttggtaaagtctcatcatacgtgtgttttgatacattatatttagactttcatacaacatttatttttttaattttttttttttgaaagaaattttattaagaaatagcctcag

SEQ ID NO: 194551 - DNA, 1948 bp, Cannabis indica
atctaaaaatgaaatataattacatatgtccatcaattacaaaaaaaaaacaataaaaataatttattttatatacgggcaaaaatgccttcagagttttaatggatatataaaatagtatttgaattcagaatatgagctaatgatgatgagtaatgtacaactctacatgtatccatgaatgatgataattgcttccaggtgatcctatacttagctctattactcaagtttctttacttttacatagctagctagctcactccttccctatagatacaagtcaaaatgtacaaaataactaataaggacatttttagtaaattcccaaagtatataataaactaatattagctaccatatttcccaataataaagttccttagctagcaagaaataatgacacgatacataaagttgtattgtatatcatgatcatgacaaaacctaaaaacacacacaccgaataaaataaaaaaaagctaccaatgactaaaagggatcaagagacattttgaatttccaaagtgcacccacacatatttatctagaaagccttcacaagaataaaaagagaggctcaaagcaaaagagaaagaaattaagcatcaaagcaataagactacattaaaaaaaatgtaccggttgagcaacacagtgatagggttcttgaacctcttcactctcttggcttccatacctatcatcggcggaggcctatggatggctcgaagcagcaccacctgcgagagcttcctccaaaccccacttctcgtggttggcttcgtagtcctcatagtctctttagcaggcttcataggcgcatgttttcacgtggcatgggctctttgggtctacctagttgtcatgctcttccttatagccacactcatgggtctcaccgttttcgggtttgtcgtcaccggccctggtggcggtgtcgaagtccccggtagggtatacaaagaataccatcttgaaaaatactcaccatggttaaccaacaggattaagaatcctaattattggagtaccataaggggttgtattttcagctccaaaacttgtgccaagctttctatttggacccctttagattatatggaaaaagatatgagtcctatacaatcgggttgttgtaaacctccaacggcatgtaactataacgtgattggaagtagtgcacaagacccagattgttaccgttggaacaacgcacagaatctgttgtgttacgagtgtgattcttgcaaggctggagtgttggaagatattaggatcgactggcacaagctgtcagtactcaacatcgtcatgcttgtcttccttatcgctatttactccattggttgctgtgcttttcagaacaccaaacgtgctgagaccgattacccttacggcgaaaaccacatgaagagggtccgccctcgttgggattactactggtacgtcctaataattatcatcattaacactaatccatccaattcgttttttttttaatgttttatcattattatataagtaatttttaccgtattcatagctaggctgggtgtccaaaataagatcctaataaattatttaggatttactgaaaatatttaaaggttggacatatattatcatctaattaacatatatctatgtgctataaaaaaacataatatgccatagaaacgtgtacaagcttaatcattatttatccccagctaatagctatagtgcactaataatagtacttaaagtgtgattatagtgcgaaacccacttataagtgacatcaatttattaattaactacctttaatgtacttattttcttttccacatagtatataaatatatattgggtcgggcatgcttttttgcccaccatcgtgatacaaaattcaaatttttgcactagacaatttttataacacagttattatatttaagatcatgct

SEQ ID NO: 194552 - DNA, 3234 bp, Cannabis indica
caatgattgtttcttagttaattattttcattcttcttatacattaatttgtgcgaggatcatcattgtctagtagggtaaataactgtgttggttattggaactataaggccttttttatgctcatcttctatgcaacaataggaagcatctactctacggtacatttgatttgattttgttctttcaatgatagtatagaatgcttttgctaagaaatagattcattcttgttcagatcatagtcattacatgtgcatttcaaaaggactgggatttcaatggacacatcccactcaaggttttttatgtaagtgtttaattgttttatccaacctattgattcattcagctacaacgtaagtcagagtttaaagaggtttttccctgcgtttggcttcgtaaaaatttatcaagttgtttgtttttgatattcacaatgactaagtttgaatgcaagatttgtgcatttggcatgattgagttttttgtccatttttcccttagagaagcccatatgacgtgacctttttgtaaagtttgttaaactaacttaaattttgaacttattcggatttcatttttcgcatgctgctgtacaacattaagctatgtcacttgattatgagtcaagattctaggagtttgctgcctgctcgattaaataatgcccaagtacttgaccttgtatattctcatattgcatgttagctaaactgaaaactttcatcaattatcttatatatgcttaaaaccttgagattttcaggttacttgtggagttatgatgtctgccctgagcttgacgcttggtacactattcggttggcatatctacctcattatccataacatgacaaccatagaggtacgtaataagtttcccatattggacacaccttttttctgtttttcctttcttctcctctgttttttggttgctcatgatctaaggaatggatctttgccagtattatgaaggaatacgctcagcatggatggctaagaaatctgggcaaaactatcgtcatccgtttgatcttaatgcatacaaaaacattaccttggtttctttctctccccatgaatgtttattacatttatttgtttgtgtgttgatccatcttctttttgttttgctttttcttcaccgtttaaaataaattgttggtctttgtgttattccagcacactgtcagcatttaaaaactgatcatttcctttcatctgtttgatcaggtcttaggcccaaacatgctaaaatggtggtgccccaccgcagtaagccatctgaaagatggcctcactttccctgttatacgtgataattcgtagacggtcctcttaaacttcagaatcatcatacaaaactcctctccctgaatattagcaatataagaaagaaagcaatccaatagaggctgctacactatgacaaagtttccagatcaagaaatcatggagttcaagtttacaaaatccgcaatgatatcagataatgttggcaaaataccaggtagctcgctatttttttaccatgctcgctcaagtaaccaaatttgtttattgcatctgtcagattggtgtaggaattgtacattcaaattgcaactcatagtagattatgtttaatcactccaaaccttattcttatactgattacattacattccaaggaaagggtgttcttgttcatgtctataaagctttcctttatacatttgtcagtgtttcatgtctaaaaatcagtggcttatgcatttgttagcaaagttgcttattatgctgtgaagcacaattggattactggtagtgtccacaactttctcattgcaaaatcttcaactaaataattcatgtgatttatggataccaaatttgtatatctaatatagattatcatattcaattggtaaggacaaaatttccaatagtgtaagatacattagattagatacaataatagtaatactaatagtaaaaccaaatgcatataagacttaattgaaactaagtggcaaaaaaaactgtaatatatatgtatctataattgtaatgtactattgtggatgcattttgacttaaaaagaaaaatataggccaactctcatgacccatatgagagacaccctacagctttagcctcagcaaagcaaacttgttatgatcatttattttgactttttatgtttgtggcaaagacactaaattgtgaaaagatgccaagtattaagaatttatcacagtgccgttttattggagtaatgttataaaattggacagtaatgcaatcaaaatgctttaacctagtatcgtttgtgcaaatgcaatttccaaagtggtgctttgttcgtaataaaaaaaaaatgaatttatgttggatttggtttgtttaagtatttgaattttaggatttgtgcataatggtgatactaagtatgaatacagactgtggacagaggaaaagaaaaacatgttagcccttctatccaccggaccaccggaaaattatattaacgatggccaatcttttcacaatctaagtttgagaggagagttaaagaccagaagcaatagtataggaacaaagagggttctacctcattattaacattcaagggccaatctaagatcaatctcaaattcagtccaagtgctaaagcgcactatttcatcatttttcttctcactcattttcaaacctcagtttatagtctaattagctgaaactaagaacaaccatttttgattaaatttatgtttatagtctaatttttttaccggattacaaacaataaaaacatttgcataatgcttaaaaaaaaggaaaacatttgaaattttttcaattaattagattttttttaattactgcctaaattgaattttgcttaaacacaacagagcaaaattattttaaccctttaaataacgttaatgtcattccaaatgaaagctagctcataaattatatccaaagtaaaagattatgataatattttggtaataattatgttgatgattccattctcatccaacaatctatgttcaactttgtttgaaatttagattttaagaaagaaaatggaaaaaaaataaaaaattaatgatttctactttaagagttctacctaaatatttaatcatattcaagttttacctaaacatttaataactagagaacggaacgcgcgctttcgcgcggtcttaagacatatatttacataatgtatt

SEQ ID NO: 194553 - DNA, 3215 bp, Cannabis indica
atctactaaatccagcgcttcttgcagcaaagcttgattcgttgccagatcgtaagtggttctgatgtgggagggaattatggcttctaccgagaccatggcttcacacccgtacaaatgtggagggtatttttgggtttaagattttttggagtattattttcctatatattttaatgtggtatattaaaataccatacaccatttttaagcacgtttaatcaaatttccctttaaagttaatttaggcagtaaaattcttcaaatgtcatagtttaaggataaaaattctatttattctttataactatagggtcagaattataatactaaaataaaaaaaaattaatgataattttgtaaaaacacaaaatttaaaatagtatttatataataaaaaaacttttatcaattgtatattttatctcgaatttaaataatatttttgaacaaccaaaattaaataacattgaatacgtaatattaataagaacactttttctttgcaagaacttctagttcattagtagggaaaggtaatgggaaccaccggggggccctccccttaaataaaaccagcattgaggctagactctcttgcacttctagctatcccatccgcaattacattatcttaacgtttaacgaaaattagattacatataccaaaatcatttaacaacttcaaaatctcgaaggagacattccaaagctgcgaatccaggatacgccttctattggaaaaggctttcaccaacgttagagagtctgaggcaatagtaatgttgtggagatcattttcctttgcccaggagagtaccatgagaatagcacggacctccccctcaagggaagaagtagcagggcaatggatcgctttagaagaccaggaattggtcgaattgttgcaccagacaacagccagacctgcaataccaatcatccaggaggcatcgacaaggaagatgtgatcccctggatcaggagtctaaaaattgtagtttggtcgaggttgagaatcacttttctcccgagaagagtcttccctgatgcttagaattcctcaaatcttctgtggattgtgtcaacaacgcacttaccattaacgctcattcacttaaaaaaagtagttatttctgtgtgactagatttctaagatcaaacatccagtccataggttctctctgcggggtaaaacattaggcacaaattaataacaaactcttttagagaatcccctgggatattagaactatgaaccttgaatttaccaccgaaccaagctgccttagcaattggacaatctcagaaaagatgcaaaccagattcatatccgtgggaccatagtatacattccttttgtgcaacaaaaggtagcctatctaaagtaggaaggatatccaggatggccctccataatatcatacttattctaggatgtatatccggtttccatatccaccgccaaatatcacattgtgcatcaaacctgcttccttgatctgagaggtacacctccttgactgggaaagtatcgacaacattgtttttccatatcaaatagtcattctcctcaggaggaagtctgaagattttaactatctccgcaccaatctcctgaccaaagaactcgcaggtgagttcatgatcccaggtattgttgtgtgacaaatcagcaacaatttttaacagagggaattagtttctgcatgtctccataaggttgcgaaactccagaaaatttaaccatggaatccatggttggtgccgaagatcaaccttatcacctttgccaattaacgtgagacaacctttttagattacctttctagcttcaagtatgttcttccatccatacgaatctgaatttttcactttaacttcccagaatgaagttttcgaacagtatttatgtagtaaacagttactccacgatctaggattaggacaagcaagctgccatgccaattttacaataaggcatgattgatatccttaaatcttcttaatcctatccccccacaaagctattgggttggcagattttgtcccaagcagttaaagccaaaaaacgatccttatccagattgccattccaccaatatttccgaaccaaagcatccatttcccgacaagtcgagattggaatcttcatggttgacatattatagacaggcaaactaattaatacagatttgatcatggttgttcttcccgcataagaaagaagcctcatcttccatccctcaaggcaagatttcatcctttcctttagtagtaagtagtcttcttttttcctccttttgaagataagcgggttccccaagtgtttttcattactattgacacaactgacatctagcatcgataataaagaccttcttgcttctctattcaaattggatgagaagaggacatttgatttgggtttgctgcagagttgtcccgaccaatcctcatacttcttaatgcatctcatcaggttttaggcttcacagacattagctcttgcgaataaaatagtattatccgcaaacataaggtgggagattggaggagaattcctctcgatcttaattccatggactctgccctcaacttcttccttttgaattagtttggaaagaacttcttggcataaaaggaatatgtatggggacaaagggtctccttatctcaaccccattgggggtatattttcttcagaggtctttcattcaagagggtcgaataagatacactgtttacacatgccattatcacattatacacttcagcatcgaaaccatttaccataagcactttttgtagaacccactccattcgatcataagctttgtgcatgtcgagcttcacagccatcaatccgctcaagcctttcagcctattgatggtatgaacaatctcttgagtgaggatagacgattccgcaatccacctcccaggaatgaatgcggaattggagaggagaaatgaggttatccatgatggggcggagcctatttgctaggattttggcaatgattttgtatgtaaagttgcaaaaactaatgggtctaaacttctccactttatcaggattctcgactttgggaattagacaaatgtaggtgaagttaagtttactatccaccattccagtatagtaaagaaatctcttactgtattgatgactttgtcttcgactatgttccagtaactgcgatagaagcacc

SEQ ID NO: 194554 - DNA, 522 bp, Cannabis indica
ttagttattttcttactttttgccaagataatcatatttttataattttaaaatttgaaattagtatttttgtaaataaaaaatttaagtcactaaattgaaaataaaacatagaaaaaatatattcaaaaactcatcctaataaaacagcttgttagtggaggattgtcctcaaagtagatcgagtatatatcactttgttacaacaaaaatttagtagtaattttattatttagacaattaattaagactaactattatctctctttaaatgagtttttttcacagaaaacaacgatatgtgtatggaacaagactgaataatcttgcaaaaatcaccggaattgttaagttcgatctgaattgtgaaccagaaaatagtaaaacatgtcttgaagttggtggaaatattcaaggcatctatgatcttggaccaaatagatttggttctgaggctgtatacgtacccaaagttaaaggactcgattctgatgaagaagaagatgatggctacttaatatt

SEQ ID NO: 194555 - DNA, 1142 bp, Cannabis indica
acctccacaaaaccatcaccaaagttaacaccattcccaaaattataggttcgagcaaggtgcgattgagggaaaaagagttaaactgtgtcattataaaaatcttctttatgccactattaatgcaattgctcattgggatatcaatcagcctgtaacatcccccgataggaacctgcaaataatgattgtgtcatgatatattcatataaatttgaaagccatagccaactaaaaatctttcaagaagaacaatttgccaaaagcgcagccaaaaatgagaattggacatctgagagtcctgtacaaaaggtgaacatcttaccgccggcttagctcttttacccgttagaggaaatagacgagtcccagcaccgccacccaatatgatcgaaactacatttttggggtctgcttgtggagtctcaaacattggtgtttgaaacgtttgctgtgatcaaattgaaaaggcaaatacgagagtcaataatgaatattcacattaaattcaaagtgggattttagtttcagacattagtaattcttttttgaatggacttacagtctctttgtctacatctgtgagaatagaataagcgacaccaggcttatatttgttatcactcttcaaacctttccgctgttgaatattcaagtttctgcatttaaggctccccttaatgctctccccaaaaaatcctgaagttcgattcctgaagcttccttttttgactttaacagggtagacattggtcttcaaggtcgcacagcccgaatccatggttgatccagctagaaatcaaatacccagatagcctttaacagattccactctaaaaaggcagcagaataaggaatgttagaaaattaagcacacgccatgaacagaaaaaagataataaggggaagaaaagaaaggaaaagtaaaaaaaaagcttaacccgaaccccaataaaggaaagatcataagtaaaagtaccaataaattgaaaaaaaaaaaaaaaacctaacagatcagatcaaactaatgattcacaactaaaactaactacaaattacagcaatagactactataaagaggaaagaagaaccagatactaaacaataaatttacttgagaaactacggtcaaaaagaagac

SEQ ID NO: 194556 - DNA, 4848 bp, Cannabis indica
cccttaattggaatggagcacctattagtatcttggagaatcatgtactgttgaatttctatttgtgtaagacattgatgaactataagtctagattcaagttgttgatgttgcttgtctatttattcatgcacacatttgaagtcatttgttggtgtgggctcaaaattttgttttgtggacttgcttgctgtcgttccatatatatagttgttgtgtattttttgtatatatatgcgccttctttcccatgctaaattacttactatgagaatgagattgaaattatagtaataatttattgtaatgttaaggtaatgtacctaactgattagctcttttctaattggttttaatactctttatcttgataaaattactaaatcaatcattcatttttttattatgtttttggtcacaccacagtattcgtgtaattcacccgatcaagcttggttttagtgtttttttagcttctttaacccgatcaatttggggaggagaagggagtgtttaattatgttttatgggtttagagatctgtattttgaggaatttttcttgtgagaatttggagtaattatgagattttgttatggttggtagggtggtgcttgcgcccatgactagatgcagagctttgaatggaatccctgggccgactttggctgagtactacacacaaagatccacccaaggtggattcctcatcactgaagggattctggtctccaacaccgcggcctggtaggtttcttaatttgtctccactgtaaagagtttttttctttttaattgttcagtgttgaaatttgttagttgtgggcaatggactagattggtaaccacgctgttcaaattgagtttaagacttaagtagatttagctgtttgtgccttagattatttaccctatgttttaaggtacaataccagtaccacaacgagccttcaatgtgatagagttgccataaggtaggaagagagttttagtatttgttctttaggaattaagaacttggacccataattagacatgagcatataactaaaaattgtcgctaatatcaggtaggattgcatttatttatttgctttggttgataactaaacttcaatttgtacgaaaatatacagccaatataaatttatttcactcacacttatgttattttttttgttagtttcccacatgtccctgggatttacaaagaagaacaagtggaggcatggaagaagatagtggacgcagtccatgctaaaggcagcatcattttctgtcaactttggcacgttggtcgtgcctctcatcaaggtaaactcataaaatcactaaatcaatcattcattttttattatgtttttggtcacaccacagtattcgttttactctatatatatgctaattagttagatcaacaaaattggtttattatttattcaagtaaaaaaaattagtttgtgatatattgcagtttatcaacctagtggggggtccccaatatcttcaaccaacaagcccatttcgaaccggtggagaattctattgccagacgggtcatatgggacgtatcctaagcctcgggccttggagacctatgaaatacgcgacgtggtggaggattatcgccgtgctgccataaatgccattcgagctggttagttttataatgttgctatttttgttttgttaacactgaatgtcatgaactcagctgctatttatgagtgtctccctcttttttttttttattgttttaaattagtttgaacttacagcggaaaaatgttataatagatcaaaaaaggtcactggtgaatttgtcacactgtcatacccgtgcgctgactaatgattttcactcgtgcgattctatcccctttagcaggaagaccagtctagtctaacgaatatgccccctcttttaactatatagcctttggacttgtcagtgttaatcttatttatttcacttttagcatgttactatgattttttaaaatctagatcgatgaagattctctagactaacgatatttttcaaaatagatatcttttttattatagtagtacaactataatagcactatagtttatgtggtctcccaaaagcaccgtcatttgtcttgacgcgttgttctataatggccatacatgttcattttacaggttttgatggaattgaaatacatggtgcacatggatacctccttgaccaattcttaaaagatggaatcaacgatcgaaccgacgagtacggtggctcgattgataaccgttgcaaattcataatgcaagttgttgaagcagtagcctcagccattggtgcctctagagttggtgttagaatttcaccagcaatcgatcaccttgacgccatggattccgacccacttggccttggtttagcagtggtggagaggcttaacaaactccaactgaagcagagatcgcaactcacttatctccatgtgactcagcctcgatacacagcctatggtcagacagaatcaggcagacccggtagtgatgaagaagaagcccacttaatcaggacattaagaaaaaactacgaggggaaactatcatgtgtagtggtggcttcactcgggagctgggaatgcaagtccttagcggatggtgatgctagatttggtgtcttatggtcgcctttttatcttcaaaccctgatttagtattaagatttaagctgaatgcacctttgactaagtacaataggaagaccttttacacacaggatcctgttgttgggtacactgactacccttttcttagcaacgcaagtgggagatcacgtctttgagttaaataccatatggaatatatcattaactatttattgtattgtatggagatgaagtcttggttctcatttaccaaatatgcatatatagtcattgactagttgtagttgttcatataagacattgtctcctctcctgccgcatttttcccgggcaaatgctcaattaagcaacattataataagagaaattaaggggtgtacgtttggaagttattgtgtagttacaaagtctaagttgtataattattatagtctattgaaaagacagaatagtaaatattgtgtcataattaaaaaaagaaagattatttacagtatatgttgaatatataatttgatgatgatatattttgttcttatttcaatcaaaaattcaagcacataacatttgaaaaatataatgtaaatagtgaagttcgaatttgtagtatggtgactctttcaattatatgtgaataagcaaatttgtccacgaatttcaaaaaaatatcaatcaaattcatatttttttttaaaataaccactagcaattctaccttttacactaacttttgtatattttattgaacaaacatttaactgacgaacgtgatgtcaacgagcaagaataaagagagatgcacatgctatttatttgttaggagttaactattttcttaaataaaaacaaaaaacaaatacagtacgtgtcttaaatcaaaaaagaaaaaaaaaaaatgggcacatacaacttcagccaccatggaaacatcaagaggatgtttggactggactagacttggacccggacccccgaattcagacccgatcacggacttggatccaaaccctgatgctgaccctgaacctagacccagactcagaccacggacccgaactcagatcagattccacacccagatcccgaacctcggacctggacccaaaccccagacttggggctaggtctgaggtcctcgaccaagtaggggttcgggcccagccaaccaaagcctagctaattaagattgaaaaatcctaaacagcccgattgcattattgattattaaatatttctaaatttgaaaaaattacaaaattaattaagtcgaaatgcgtagcaaagttcaattagatttccaataccagttagtcgaaactcgacatgcatatgggctgacatcaatattagtagtctaacagtaaaaaatacaaatgataattacattttttttcataataataacgtgataattatggactattcatagaccactttttttgataaaggaaacgattcataattacttttctccgtccacgaaaacatgaaaaatacaataaaaaaaataaagtggttggtcggtagtctaaaagcatcttccatagttttttttgctaaccaagcgtcccccatagaattttaaacagagaattcaaaaacctttccatattacatatatatatatgtgtacatattgatgaaagacttaactcttataacacatcagtcatcaccctctctcttccaaagccttcaattcctccactctgcctttcacattcctctctctcagcctgatctgatccctccaacccatttctgtttggcattcaatcaactcctctcattgaagtaagagttatttgcttttaattaatataaagatgtgcatatgaatatgatacaaagattaagaaaaaaaagtaacatcaatcttacacttttatactgttttctgtgtttgtgtgttttccattggggttttgaatagttgccccttgcccatcatatataacattgacttttgcttttaaatttctaaaaagtggcttttgtctctttctcatagtttcttaagtgagcaaaatagattcaacaacagcatattaccctccctttgcataatacagtcatattttatttctctgcaaaaacagaaaattctgaaactaaatacttttatttaacttagtctcctaattctaagctagctatatggctttaggcatttctattttgtaccaccatagcctaattg

SEQ ID NO: 194557 - DNA, 2875 bp, Cannabis indica
ctctctctctctctctaactcttaagcttctctccttcgccttgtgtgttgttcttcgtgtttatgagggtatttatagacgttgaagatgagatccttaagttggtcgtttgttactgatttcagttaaatttgttacaccttaacaaactccgataattgagatatccatgtcaacacttacaaagttactctgaatgtgagaacacacttcctgaactaagcgagacgtgttcttggaaggatgagaaaaggcttccctgaggcttagatctgggatcaaatagccttccacgattctttttcctagaggacgactagcttctctaaagcctctatttgggaaacaactagccttttaagactccctttcttggaggatgactagcttccttgaagcttttatccggggaacagctacccttccaagactcctttcgtgaaggaagactagctttcctgaaacctctatccggggaacaaactgaacttcatggaactctcttctagacaataactagcttccgtgaagtagcttctggaaaccttaagttagacagattctaagtataatgactttgcttatggtagagttcatactaactgttcgtatttttgtataaaaataataataaaaaattaaaaattataaaaaaaatttataatttgtatatcttgatttttttttttaatttttttagttaaatatgaaataataaaacataattataccatgggatctaattatttttatctatgaagaaacttatttaaaaacaacaaataatcccaacaaatttaaatagttcttcaaaaattatagattatagaacgtatatttttttttcataaatagaagtagagaactaaaaaaaaaagccggtggaaataaaataaagagtaatttgtggcaaaacctccttatatgttttaatttatatacacttaactctctttattttttttttttgtggcaaaacttccttatgttttaattttaatacacttaaccgccttatcttttttttttttgtgtggcaaaacccccttatgttttagttttaatacacttaacccccttatattttattttggtggcaaaaccctcttaagtttacttttctttgcaaatttaaagttttagttagatactatcgttaaatattactactatatcaactttgaggttttactgttacatatatacacaggtgtatatagtgatcatccagttgatatttaacggtaatatttaactggtgtgtaaaatttgcaaagaaaaataaacataagggagttttaccacaaaaaaaaataaggaggttaagtgtataaacattaaaacataagggggtttcgccacaaaaaaaaagataaggatgttgagtgtataaaagttaaaacataagggggttttgccaaccaaaaaaaaaaaaaataagggggttaagtgtttaaaaattaaaacataagggagttttgccacaaattgctctaaaataaattattatttctgagatcaagaaaactaggttcttattaagttgttgacatgtgtaattatgaatccaatgagtacaatttcaacgaatgtgaagctttattataatttagtgtgcatttttttgaataaataattttcttaatatgtgatataagatatcttcacattacttctatattttgaagtgacactatgatagcacatttttttttggataaactcaaaagtttattgaaagagaaatagcgcattaaaactcaaagtttgtagtggcaacaaggggtgccacttttctaccagagaacaacttaaaacactcattggaggcagcccaagatgcaaggcgatgagcagcacatagattatgggggatccaacacagcttagcattgacgatacgagataagctatttagggtagggtcaaatgtcctacaagccttccacactgaacatttcccagccagcaaaccgtgcaccgccacttgacagtctgagaaaatggacacaatcgactagccacagtgtagggcccgaagacatgcatgttgaattgcaatcagctccgcttcgagagaggaacccaccatactcttcactgtgagcgcctcgaccactgcacctgtaatatcccatatcatcacgacaacaatcccttaatcatctcgcactgtagcatccacgaaaatattatgctcggaccaatggaagtttcagacatgaagtgattcactgtactcggttctcttcctaaccgagttcacaggagagcaactctccaccgaagcaagaatttcacgctggatcattaggacagaaggggaaaaatcgtcatggaaggagtggtttctcgtcccccacaacttataagagagatgtatagcatgtagggagaaggcatattgtcaccagtattctcaagtgggatattcaggggagacatcagccatctcaccaaagtcttaaggtcatcaaactggagctgatcatagtataatctgttggaaattattttaccaggatctagatttactaacaagtatgtttgattaacatcctaatatgaattctaaaacaatgaaaataaacacatataaagtttaagaaaccttacagtgggtgcagcggaatattatgactccttccattcagatctctagcccttgattcctttctgtagcagagcataatcaagatctgaatctggatcttcttttctccttctttgatgcagattttccatagtcttacatactatgattgagataccacttgatgtgtgtgggcactactcatcactcaaggaatttcgaaatttagagagaagaaaagagagagaggcgtgtggctttctgagagaaactaaatgatc

SEQ ID NO: 194558 - DNA, 916 bp, Cannabis indica
ttaatggcacatattttcaagttaatgaggtaagtctcttcaagaaaaatatgttcactcttacatcctagaaaaataattacttgttacacaccattctgtagatacattagtatgagttgaatagatataccaaaacatgcttcttaagcctaaaagaagagtcacaagcataagtttggtatggttagatttatgtatccttacttgatggggcaggaccacttgtcctgcacccattcaacccaactaattgaacaagaatatttctttgcttacccttgtaagacaaaagtgcatttatctttttgtccaactgtgtcatcttgcagatgtttgcagatcatgattcaagtctcaatcctatcaatgttcctagagagtggatatggaatttgccaagaaggatggtatactttggaacttctgtatcaacaattttcaaaggtactgtgctacaggtttataaacactacataatttcccaaaatgaaaagataaagtaactgacaaataaaatatgtatcaggcctatcaacagaaggaattcagttttgcttttggaaaggtacatattactgctcttcgttgactgtggtcattatacaatttttagtgacattcaggcatttttcatagttactgcactggagtttgagttagcaactcggcattttttaaaattataagaatgatggattccacaacaagattttgatgaacatcttaactatcaagtaacaactttgaaataccagcttaaaacacactagctaaaacattcttgttatcattaagtatctcgtcaagccattgaagctaggatgtgataaacttggaggtctgagtggcctctgttatttttttcttaagatcaccagatgtgctggctatatgaataaaaaaaaaaaaaaaa

SEQ ID NO: 194559 - DNA, 3388 bp, Cannabis indica
tttctcttattattatgctcattcaatttctctcaagtcacttactccccaatgacttccaaacttgataaaagatatataaatatgtagacatttaaaaaagatgtacggtaaataaaaatgtctccaaatatacactatttaatatgttcacaattattactatatggagacatattttctaaaagcaagacttacaaatattataacttatttcttttaaggatattataacttattttagtgtagaatttattcctatttagaactagtccaagttagaactataactttttatgactatttatgagttattctgttttactgcatttgaaattgtaattgttaattttacttattgaataaagataacaccttcgattccagatattatgctttcctctaatctggctggtcacatcatttaacaatattttataaaacagacaatgaagcaaaatgtgatggctagtaacgtcaattgtagttgtagacatatgaaattgacgtctttaatcttgaagcagcattcctaatgttgaccactatcacctaacccagcccaacaaggtttaaacaaaacaactactagaattgcagaaaagatggcccaagtgggggtgacatgactgccaaccaaatgttccgacaagcaacgcaagcaaagggcattacaaatttacattttatccactaaaaaaaaaagataacaagagaatcgcgtagtcatagttaatatttcaatcaatatgttcaatggagtaggctaacgaagcgttgtgattggatccatgtaaaatgagattatatcattgattcacaaaggcaagagcataattttgtgcgattaaacacaagagaaaggaagaaaaaaaactacaaatatttgtggctatactttaactaattttatctgcaagagggttctaatgtgattgagctgatgttaataggagacgaggactgtaaacttggccagaatatttaactgcataccttcgttagctatacaaaagggttatgtcgcttattactcatctaatatggtaatactattaactcttgcagttagtcctactctgaaagatactcaacctcctcctcttgtagttcaaatgcatcaatttctgcaaaataagctctctgctgctcgataaattcttgtgacaaagctttcttttgaccctgcttacacagaaatcatattgacagattttagcttgagaatcaaataaaatcattttttaagcaggaaaatagcttcatagttcatccgatggtacaataatggtaaagagctccctgcaaagaaaggaatagatcaatctaaaaacaaacctttttagttggaactgtgtttgccttcgatacactatttcctccagtttcccttatgttctccctgttttgaaagcaaagagagaccccaggaggtaaatattagtttacatacaagacctttgcaaatcaaataaacttatatttggctgcacaaaaaatcaagagtttcaattgtgcgtcaacatttagtacatctgtgaagttacatgtaaatatcaaacatgaagaaaatacataatactaactaatatacttacccaatcttctggatctttgttgcaggaggacaactcacaggctcagcaatggccttgcctttgcacttatgtgctcttaacaagtcactcaaacgttcatcgcttgcctctgctgtacatttcctcttctgtgcagtccgtctacaactgtaaatgtggcatggcttgaaaggatcaacagtatttccacctgaaaatcagacaatagaatttttccgtaagtttatgaaccacaaacaatccacactcaatgacaatgtccctaaacctgagaaataatatgcagagtcaaaattcaactaaaatatagcttgtctaatgcatgaaatggcagcaaatccctaccaaaccaatgctgaaaaataaagttctgcaaacatgttcaggataagatgtaacgatgttcttagaagtgtgtttaggtaagggagaacaatgagaaaaaagagggaaggagggggaggggggggggaggctacaggatggaattagattacggtggttgattgataagaaagattaaagaaagcagtagaattaacaatccatttggccaacttttactccttccataaatggacttataacatataggcaaaataagaaccctcccactcctgtacactttccttccctgtgtcatgtacctcttctaactttctgccctcatcacatggcctatgtaactatgcagaaactaaaaaattctgaagacaatgataaaacaatgatgcagcaaggggagattaaaaatagtatagacaaggccagagcaccagtaattcccagacaacatcaaattcaaccgttcctaaaacaagaactggatataataattcccttaaactaaaataaagaataagccctacatttttgatacaaaatagatatcatacctgaaatagacaatgaactaggccgtgaaggagaggaaacagtcggaggtggggaaggatagaatgattctgatgtcttgccctttttaactgtggatcgagtgatgctgtacatccataaagatagactgtaaacacaaagcaggaagaaaataaaagatcaaattaacttggatactcactaaatcttctttgttggaggaatgcaagtattgggatcaacaattccctttcctttgttccttcttttctctgctattaaagcatcctcaaaaagctcctcagttggggttattgtactcctccttttcttcagaggtctgtctatgaacattgactgaacatggctcgagagaccttggaaacaatcggaggtgaggagagatagaccatatctgacgtgtgttatcctttcggacggtggattgagtgatgctatacatccaacaagatacactataaatacaaagcaaggaaaaaaataaaagattaaagtaacttggatacttactaaatcttctttgttgcgggagtgcaagtattgggatcaacaatttcctttcctttcttccttcttttctctgctattaaagcatcctcaataagctcctcacttggggttattgtactcttccttttctcagaggtctgtctatgaacgttaactgaacatggctcgagaggcttggaaacaatcggaggtgaggagaggtagaccaattctgacgtgttctccttttggacggtggattgaatgatgctgtacatccatcaatatacactataaatacaaagcagaaagaaaataaaacatcaaagtaacttgggaacctactcaatcttctttgttgcgggcgaacaagtattggggtcaacaatttcctttcctttctt

SEQ ID NO: 194560 - DNA, 2358 bp, Cannabis indica
aataaatgaagaacagtttccaatttaatctactaaatacagcaacctatgcgacttctctagtgcgagttggctgttcatattcttgcataagctcgcaggcttaagatgcattcgagactagtcgagtctaagatgtctgcgtccttgtaaagtcgttttcgcagacatcatataacaggctgatagaaccaatacatgcgagtttatatcggtttatcgaggttgttgggtcatcgggactagctcgcaatatagagaatcgatctctatgttttcgcaggaggatcgcgaagatactcgcatatatcttgatatatgcgagctaaagtcgttcattggtcctacatgatgtgagtcatacgaatgcgaatagacttggtcatattcgcatcatctcgctgagtctggttcaggcgaggttcatactttgaggagtctcacattgacatctcaactttcctcgggaaaattgagtacacgtgttcttttagataggagtctggtctcgagtttctaggtgagaaaaatctcactataacataattgacttttcctctagcaaacagggtaataacctctcaacctaaattagtctcgtgttggaagaatcctaggatgtagattttataagtacatccactctaatatggtgatgcactagcgaaacgaaattatttggactccttactgggcaatctactttatctatgaagtcattgctagggtacagtctaagctaaaaaaatatgggtcaaatcccccttggtcattactaatttaatatactaaggaaggagccgtaattatgcgaaagggtgtctcaccacttctggaagtaatcgctctcggagcatcctcatttgggactacattcttgaaatggatagtgagctcttcagcctcacttaattcttctagaaattttcttctccagtcagctagccagtgttcatcggccttcacaacttttaaggcctctttagcagttatggcagcaatggcctcctttacctcgtgaggatcccccctaagtgattcctgaacacactccttcactgacattgggtcaactttcttatgcggatcaatgaggctgaccctttgaaggttctcggtggtcaccaaccgagccaccaacaattccttggatgataaggaattgtagaaaattattctctcctttagctctgaagtctgaggtgattggggaaggcaatcttgaagacacagaatgtacattagaatataacaaagggaagaaaacgagaagtgaaacctatgaaaagaagaaacacctatttgttgtattgaaattcaggttgagtgtagggactctctacagtgggaagccaaaagtgtagaaccagtaatcccagaagtcgtgtgtgtacttcgtcaaactaatggggcaagctacactcttggaatgatgttccagcctatagaagccaaccttttccttgtggcccctaatgcgctgggacttaatcttgtagaagtacaagatctcctccagcgttggtgcatatttattgtgctaggcataaaagacataccacccaaataaaaggcaatatacctgaggaataaactggaacggtgggactttggctatggcacagaagttggcgaagtaacacctcaacggaaggtgtccgcccatttccacatgggcccaggtctagatgccaaaacccccatacgcatttacgtggcctctctccatgaacggaagcctgttctagtacaatcccaaaacacttctgagccctcgctgggtctcgtacttccttaagttattatatatcctaaatttattgacgtattagtccatctcccatagactatcattaagaactagttttggagcatccccctactctagaacctcctcttcaactttaacctcttcttgtgggatgctcttagacattgttttttgtaaaaaagaaggaagaccaagcattcagctacccaaactacctaatatagaaagggagtaagaaagtcctctcccatgaacttcaatgagaggttcctactagacttactatctagaaacaaaaaaaaaattagggaacattcgttccagacagaaactcaggaacatcgaagaagaggaatggaatagaaatcaataaaatacccaaaaccagaaggattttgagcacaggaaaattttgccaacactttttacaaaatggctgatcccaaaattcctaacgtggaaacctaaaggcaatacaacttacaatgcctaaatctaccaacagtataaatcgtacaatcagagaatcctaatttcattcataacagaacatgcaagtacaatatatagcagaaaaatccaaaaaa

SEQ ID NO: 194561 - DNA, 2096 bp, Cannabis indica
aaaaaattctgagttcctgatctgggtgatcgatcagctttgtataaagaattactagtcttcaagccacaaaaattccttaaaatcagtagataacgatattacccggggccatattcgttttaataaaataaaaaatctttcacatacttaatataaaaaatcatgatatatatatgggtgaagaaaatatatatacctagggccgctgcaaaactcaaagagtttgcctcgagcagaaaagattattagagcaacctcagcatcacataaaacggagagctcataagccttcttcagcaaaccattccttcttttagcaaaggtcacttgtcgatttatcttgttttcaatcctcttcagttccacctttcccctacccatattcaaatataaaaatatatatttctatatagccaaattatgaatttaaatgtatatagtaagcttgatatgctaaactactatatatataaatatagtttcttgtataagccttatgcctttttcttatccggcctttaggttaaagttttctaatcctctcttacctaccgtataccataacattagcatagatatttaattttccaaaaagaacagagagacaagaagcaaatattactatgggtacttggtaggtttactattattattttcattaattagttttttttatatatatataaaaaaaattatatttgtcctattgtttttttttctaatagtaaggcaaccattcggtgtaaatattgccttcaccacctcttcgtagctttgataatgtttgatctaggtatcaactatagtagtcttatgccttattctgctttaattaaattatgagtatgtatcccatgaggattttcattctattaaagataacacttccacaacaaaattttctcccaaaagaataaacataattccttacaattgaattgttataaaattcgaacacttaatccaaacaaaaccaattttactactacacaacatgcgctatcaaaaattttacttttagtcacaataaaatttgtgattaaaagtgaaaaaaattgtgactaattataaattatcatcattcttatattatgactaaaaggtgtgtttttattaattacaaaaattacaatttggtgtcactatatatgttttaagtcataatattcgttgttagtaaaactaaattaataacaatttgtatttaaattttatgttttaatcacaaaataaatttttagtgatgattaaaaatcacatttaattaaaaaaaaatatgttttgattaaaaaattctcactaaaagtccattttttgtagtgctggttgctttgtttgttttttttgtgaggtcaagttgtcttattagtagtttgtttatatatgtaagaagtcagaaaagatatagtactgtccatttcatgacacacgtaagtaacattaccacaagaaaagcagtttcaatcctttgatcaattcaaaaataatgtcagtatacaataataataataataataaaaatgattaacttttttaaatacacgcagttgtagtcgtttacattcctgcctttaagggctgctgtatacgtgtcgaactgagtatggtactggcgatgggaatcttaatctttactttcttttgctcaatcttattatgccttccctggcgttaacaatatctgtacgaactcttgttttgaaaatatcagtacgaactccttagttactcttaaaaatatagtacgaactcttcctattatttttttattgagaattgttaaaatctattactaacttctagggttttctttaatagtatatcttaattaatttaaaaaaattatcgctaactaatcataatacgtcacttatatagtactaaatatccctagtaacttataacaatgctcttgtttattaattttagtaaaatgctaaaatacaccagtagtactaagcatcattttacgtgtcaatatcactattgatttaattaaatatcgagttccgagagtatcattagaagttacccaagtatacatcaatcctattctaaaacgatttccctccttaagttacaaaaaaaaaaaa

SEQ ID NO: 194562 - DNA, 1155 bp, Cannabis indica
cacagaggtacattaaatttattttcaatgtccttctgttttgatttttttattcaagttgctaattattgtttgaggttcgtgtctcaaaagatgatttgcaaaaagaaaggggtgctgtaatggaagaatacagagggagcagaaatgccactggaaggatgcaggatgcaaattggattttgatgatggaaggttcaaaggtattgctactatactttccccgctaactaaaggagatgtttcaaattatgtttactcttgctttgtacaaccacttgggtgcaactcatcctcatgaaactagtctatgagtggaggttgcccatgtggtttattaccgaccaatttcatatttagtcaatgtggggtcctgcaatacattctttttcaagccaacatccacggtctttcaagctgcctcttatgcaatgaggccccccactagaaagtgctggttcggatatcatttgttacaaccaattggggagagctcattcccataagcctagcctatgaaaggagggtgcccaaatgtttatattataaactagcaacatatatatcttatttgtgacttgtaatgtcaatgtatgactacaattcgttggaaaggatgttcctcattctggttgtgtcatgtcatctgcaattagcatatatataaatgcatatttctcaatcatttgagcctcagacctgtatttttatgatttttgacaggaattcctaacttgaaagtttaagacttctattaaatttcatcattccttaaaatccttggtttaatgcagtacgccgaacggttaccaattggattagagaaggtgattcggaatgtgtcagctgagactgtgaaacagttttataagaagtggtaccatttgagcaatatggcagtgatagcagttggagatttttctgatacagaggtttgatgttttgacacatggaaatgatgttttaagaattcgtttagatttgaaataatttaatgatttatgtctctttccctttttttctctttctcaagagtgtagttgagctgataaagactcattttggacataaagtttcagcacctgaacctccagtaatacctacattttctgttccatctcataacgaaccgcgcttttcatgctttgttgaatc

SEQ ID NO: 194563 - DNA, 2165 bp, Cannabis indica
gggattcaatggtgtatgccctaaacattcagccaactgattacatgtaaattgaaaggtaatcggagaaccacacaactatggagagcagcagtgttggttgtattttgggggtggttggttggaaagaaatcgaaggatctttgaaggaattgaaaatggggctgaagatgtatgggaaaagatcaaatccttggtggctacatggttgtttaagtcgaaagtgtttgaggggatatcttttcaagatttgactaaagactgggatcttattttacattatgaaatcataaatagtttgtaatttgactcgtgtttgtatttcttttattatcttttgggtcgctaaaacttagccagtaaccacgatttttctccgccataagtgaggctcccgaataaaatttggtgggaggtacaaaaaagtgacctctgtctctgtctacaaaaaataaaataaaataatcaataatcttagcctgtacggatagtgatattttaaagatgattagtctaagtttggcctagttctttttatcttattgagagagaattttctgaaataacaataatcaagaagaattttccctttctaaagagtgctcaagcccctatttataagggagagcaagttaaatgtttgacttttgaaagtacaattgacatttcgtttggttgcactcttgtgacatctaatctgaccatttaactcataatatagagtagaaccctgctatttccttagaataaatttcatggtgaagcttgtttaaggaaggttcgtgtggcatgtcctttgggatttttcagtagagaattgtatggcagaatgctgtgtactttggttcagtttttatttcattagctgtttggtttccttttgtggcttatgtagtagacatcctagccataacattttattcagtcaccttaggtcaattacttttagttggtgtgcaatgcaaattgcaggatgctacttacaaattatttgaatggttgattatttgtttaatataaaacacaagacctcattaatttgaaacaaagctccaaaactaactgcctttggtgattagtttctcaacttttaccactcttgactagctatctctagtttcatcaactagtatattttttcagaaagaaaaaaagttaacaatgtgcaaacaagattgttgttttcagggttactatatttgttcaagcttctttgttttcaccttgttttgtctatctgcaggctgctcttgaaaaagagaagagctcggaacagagtgaagttgaggaaactaacaaggaagaattagtaccgcttaaaaatgttggccgtggttcggaatctgtcaagtcattgacatctcaaatgaatgagctagatgtttccgcaaatccttcagcggtttctcctccttcagactcagtagaggactcaaattcaggagatcccatccaagatattgataaaagaattcgagctcttaaaaagaaggtacaaataatttttatacataaccttcgcgttattttctcgaatgttttaattgtaaaaagtaacccctaataatttcgaacattctttagaaatctcttggacaatttattgattttctcgaacccttctatttcaaatttgtgaggattagttttattggcacaatagacacaataagggttttatgtaactcttattcatcttaaatgattctagaaataggtcttacctttttctttctgcaaagattatcaagaattatatatctttggacaagaatatattttagctctttttttctttttcccttttaatttatgttttattgaacttttaagtttctgtatcaacattggactcgacagcaatagtatcctgatttcaattgtgaatttgtttctgttgtacctaaatgcagattcgacttactgaagctcaaaaacagaaaatcgcagagcaggacatgaagccggaacagttagacaagttttcaaagcttgaaggttggtgtcaagaactaaagcttttagaggatagaaaagctgaacttactgcatcttgaattaggttttgtgttagataaagcttgaaataaccatgtagtttttcttttttatctcctttttagattatgtctttgtttttgtgaaaatgagaaaaaaaaaagaag

SEQ ID NO: 194564 - DNA, 2495 bp, Cannabis indica
aaaaaaaaacttgtaaaaatgtagttaatttacatctatttatcaattattatctatattgtcacttttttaattacaataaaattaaatataatatgatagaaagactacgtttatattatgtaaaagttatattatgcaccattacaatttaaactataatggaataatcttaacatcttttaattggacacaaattaattttacaatttataactataatttttataattgctattatgatttttcttttgaggatttggtgaaatatcgcttaaaaatacacttttaaatcattttttaggtcaacttttttactttgatgtatagtaaaaaatatatattcatatcatatgtgttgccttgcactaaaattttgaatatagaactaattaaatctaatttattatttttgttagttgacaaagaatattatatcatagttcccaatataaacaaaatatatgcatttattctaaaatgtaataaataaaatttatgtattagattttattaagatatacaataaatatgtaattataaataggtatgctgtgctaatctactatagctagtataaatatgtaatatgcaatgaaaaaaaaaaatctgggaaattaataaatcattattttgtaaaaattcaagtaatatatatgttagtgtatatatataatgaagtgcatgttgttgctttcagtgatgtgttcctatcttttaataagaagttagaccacaaaaataaaataaaactatatataatatatcagtataaataataagatcgaagggaatacactcaaaattataattataatatataatatacagtcatatcaccaatatcaaaaataatgaaaactatacgttacattaaacatttctacaaagatacgacaaacaacgtaaaaaaacgtccacaaaatatccagcaataataatatagcttttttattattattttttataataatatcttcaccatattttgggacacctatttatagtattagttttttactttttagatttttaaatactacttttataaggatttgttattggtttttgttgttatttgacgtcttagttcggcatcccaagttaaaatttggaagtttaattagactttgaaatgattttaagccatttttagtgtccatttgacgagtcgtcttcatcactagaatcagctcatcgaggagaataatatatactaagtcattttgcccgacacactatttttttaggtgatgtttttgtagatctgtcattttctagcgatatcgtataccgttttgacaaatagttggctttgatgtgatctactcgttgaggtgattgttttgatatatcactcctattttttgtggtatttctagtacaccaatttaaaccactactaataattaatgtgtactacttaagtgagatttttgaactctaaagtttaaacatagtcatgttatatgtcgttggactcattttgaatgtagaatgtaattatgataattatttagccatttgatgatataggtgagataatatttaagattggactaaacaattaaagctcaagacttaagaatctgtacaggaagtgaattgaacgtgcactcacataatttgtgcaagtttttcgtgtatgcacatctaattttttctctatataaataaatgattttatttttttaattagttgctctgtataatatctttttcttatgcagatgtagataggtaatgttttaattttgtttttctgagttttaatttgtttgactttgaatataactggaaaaattcaaagttaaaggtaattcaactagatcaagcaattcacctactctgtaaattttaaaggtaatacttgatctttgggtatttttttgagttttaatcttttgtctttttttttttcttttgatgtttagtcgattcgttagctgtaaaaagaaaagaaaggatatggatgttataatccttacaatgaggaaaggaaaaaaataatttaattgaaaatttataagaatttgaggtgcatcaatatcttctaactattacataatgtggtttaaaagttgtatgatattctaataagacctgaaaattgaaaaatgtattataatgcttggaatgaatagatttagttccaaatgattggcttaaaattttgcaaggatttctctctggttttagatgttgaatagaaatagagtatgtaattattggttagaaaatcaattttatctttgtactagctttgtaataatgtttggaagggatgatatatatatgagataggggtattgttcttctttcaaatactttttcgtacaatatttagagtctatagagaaaggaagttggagtggaaatatgagtaagtattgaacttcattttcctttggcttctttagaacataaagtttgctcaccttcatgaaataattatataattgctttgttgtgctatgaatatgcacattcactac

SEQ ID NO: 194565 - DNA, 1613 bp, Cannabis indica
agagagagagagagaaagaagagagtgtgagagatagagagagaaagagaagagagagaggagtagggattaggaaagatcaagtggcggaagaagatagactacgacggaagcgacacttgaaaggacgccgacttgggcagtggcaacagtttgctttgtttttgattttagtctctattatcatcgagcatctgcttcatcgcttagccaaggtaccgttatcacccatattttatcattttcctcaaatatatatctttgcagttaattactatcattataatcagttgtaatcttaaaaaagctgcccttaactctcttatttcatagtttctaaacaaaagacggaagaaatctctacttgaagctcttgataagatcaaatcaggtgtgattttgatttgtaatgtttttcttttagtataaatgaattattgtgggattattatatataactaattgttaatcatgaattaatgcagagctgatgctgttggggttcgtatcattgtttctaacaattagcgaaaagacaattgcaaacatatgtatacccgaaagtgttggccacacatttcttccttgtggtacccaaatgtccaccgacgtagaggaggaagctaagtgcgcccaacaggtaaaatatacccttttttttggacaaaaaaatgtggtatttttgcaaaattatatttatggtattttaaagaaaaaggatttagaaacagtggtgtatggatggaaaaacaggataaggtttctctgctatcgagaaatggtgtaaggcagcttcagtacctgatctttgtgttggccgtttcccatgtcttctcttgcgttcttaccttcggttttggcattgccaaggtagaaaattctttacattcaaaatattacatttaaattcggttaaaggttaagaagaaaaaaactgacagaataaaatggataggaatatatatttcgtattttcattgttaccaaaataaatacatgtttaggctgtagttaatatttaatgtaatattgctagtgcaagtcataaaagtatgattcaaaataaaatgaaaatagaagttaaatgaaggtgctagatgagctttccaagcaaaacaagagtgtgtcaattgctgaagtcgggacttttccatcagtttagatctaattaaatagaaagaaaggacaaattggcttggcttgtgtttggatatctttataaattcattctaatttcaacattaacgattgaaaaaaataaatttcagatgatgaggtgggaggcatgggaggcagaaaccagaacattggactatcaattttctaatggtatgttttttttctttttcttttttttttatttattattattattattattattattttgtgtgtgtttttgaatgtatataatatccctatatattaatagcattgtgttggacctaattatactattttggttgggacatatttgtcataaatagaaaaggtaagcgacaaaactgtgaacctaactagtggacaaaaaatgtacaattgaaagatacatgactatattaccgcgttggatatctaaaactaatcattcttattggatttcaaaaaaaaaa

SEQ ID NO: 194566 - DNA, 1066 bp, Cannabis indica
atatccagatctcagactccaacttgacctcaaatcctggaccgtagacacccgaccctagacctcaaccacgaacctagacccaaatcctggacattaacctcgctctggccccgaaccttagaccttgacctggacccaaacctagacccaaacttggcctcaaacccaaaccccgtccccagaactcgaccctgaatctagatttggccccaaccccgaagcctggcccacgaccctggactcgaaccacaacctcggccccagacccgagtaagtgagacaaaatgtaaaaagcatatatattagaccaaaaaataagttattttttaaatagaaaataacactttgatgttttcagattcttttgtaactcaattttaaaaaaaaaaaaaaaattttggccaaacaccctattagtttttaaagcaattttctattttaaaaagttaaaacaattttttaattatggagctaaatatcctcttaatctttgcagttggagaaagtttcaaatttattgctcgtatataaactaactacagccaaaacacacgtataatgccaaaatcttataaagaagtaaaaagatcgtcaatatgttagcatatttattttaccttgaactgtttagcaaagataacttctatgattgaatatacaaatctcaactagaataggtttatcagtttatggtcatcactatccttattaggcactggttctgatccatcttagttcttccatagccaaaagagaaaaaataaaaaataaaagaaggcaaaaaattgtacacgtgcaatgaaagtgtaaaagtttcttccttaacgagggagaaacttgaaagctgtgtaactaaaaaaagcatttaactgccatcatgccaaaagctgtggtattcttgtttttcacttggatgttaaggtcagtaattccaacaaataagaactgaaaatcatttaaagccaaaagaagattatgctagtcataacagataccatgtaatcgttgactcttaacttatagtatcaagcaaaagaaatcaatgtgtatatatatatatata

SEQ ID NO: 194567 - DNA, 1777 bp, Cannabis indica
taaacattgttttctgaaactatacaaattgatgcacattgagtttctggtgttttaattttattctatttttgacattaggtagggggttcgtacttggaaaagctagcaccattagaggctattatgctagtagtactatgctcttaagaatgcatatggtagttgagagtgaatatgcgttcttaggattgtgttactttggtagtttgcttgtgttgatccttcttaataaatgtgttatgattttcatcagaaagaaaccatttaccattaaaactgttatgaactttcttaaatctcgttaggcattgtgcagattaaaatattggatatcttgttgtcctgttacagttgaaaagaaggctcaagtttgatatgaaagttacaatgggaaagttaactttatgttcaatatgaaaccatacaagtacaacacagctcgaaccaatggtttttcgtaaaccagatgtataaattgtttcattgagtttggcctcaagtaaaatgatgggtaaggaagctgtgccacaaattaacagggcagatagtgttgaaggttgctcacctactcgcaatgacaatttagagccttactcaactcgcagttcagacatggaggctgacttagaaacttgtcgcgtatgccaatgtgctgaatcagacaaaaggggagatgctgccttagagtttctaggtgttactcctcctttacacgaagcacataaaagcgatggagcattgaagcctgataacaaactgattatgaatcatgctgacaaagatgtctctgttaagaagaatgttagagaatcccatgtcatggaatttgtgagtcctgatggggaggttctcatttgtaatgatgatgtagaaatgggctcgtgtggttatcaagatgcgttaactgagcttggttgcttgtgcaaaaatgaccttgctctagtacactatgcttgtgcactgaaatggtttgttaaccatggttctactgtttgtgaaatatgtggacatgaagcaaaaaatattagagctgcagactacagaaaggttttggcttctttgaaagaatatgaggcactaagggaaaggactgccagtggagaaccctatcatgcccaggttccctcaagtacaggtgtagaccctgatgctgtagctgctatccgaaggcaacggttgagtgagatttcgctatggtttagtccacacaacaacaacaacaacaataacagccatattgcactttcacaagcatctgaacaacctctaaataatgtcactgaagaggttttccctactgaaaatcctgcaactaggtgggctgtggaaggtactgggattttgctggctacaggtttacttactgttactcttgcatggcttatagcacctcgagtcggtaaggtatgcatgttttcgatttccacttgattaaataattgcagatacaaaatcagatgacaactttacaaagttaagatagaacatagcaaataccatgtactaaaaagcaatccaaatacagtgcttctacttttacttgcttgggtcaatcaaactaccacttggtacttcgattttctctatatttaggtacataacttataattgtaatgaacatgaaagaaaaagatttattgaatggagaaacgtttgtgacacttaggcatgcctctaagttgtactagggccaaacaagacttgtagggaggtcataatagagtggaggtgcggtttttttttttttcggggggggggggggggggtggggggt

SEQ ID NO: 194568 - DNA, 1499 bp, Cannabis indica
ttttgttatatattattattttgaactcttccttccctattttaaggttgcttctttttatatatatataattaattttgtagttgaatgtattatttcatttattcaactttttacattaaaataaaataggtgatgctccttctataaggagttataatatgatttttattttattatcattactattatttatttatctaactgataacccatccttttcatttgatcactttggtttactcgattagttaataaaattaatggttgaaattgaaactataaaaatcaaattgtaagaaatggttcttatattatactaaaatgaaaatgtataatcttaaataaatttgactaataatgctatgagatttttttatttttcattttaaaatattttttttttttaacatttttacaaaattttacatagaaactcctactgcaactaatgttgcaacctaaattgcaacaaaaaatcctatagaaatttctattgcaactggtgctacaaccactttaaaatctcaaaccttaaatttgaaaaaaaattaaaaaaatgatatataagataattctcctaatgctattatcattgcagttttttacaaaaaaaaaaaaaacagacattgtctagccaaaaagtatgctaagtttttataatacataactcgtaacattaatattgataataataaaaaaaaaaattagggccgtagggatgtaaatgtagcgggatgtggtttcaacccggcaaaatgggtttattgccatgctattaggagaatgtgaatgtgccagttttcttgcaagtaatcatttgggagagtatgctgatgcatttgttgaattaacaactataagaaatggccacaccaactttgcttttatagtttcaatcttccttttgggatacaaacaaacaaacaaacaaacaaatgagctgtacaaatgctggactcaaactcacaaactaaacaatttatttactccaaacaacattttggtgataaatattttgacaacttggaaatttaaaaataaataaaaaattatgggagtgaatacgggagaggcaagcaaataaagaaaaatgtgttcgaaatcgaaactgcaactctgtatcgaacatgtacatgatcctcgagaatgtggtgacgacgacatgattaacatttctgaatagataagctaaaaacttcctgaagaaatggaaacacatgaagaagacagacgaagaagcaagtcaagcaagcaaactaatccaaggcattggaagatgaacatcacattaaattaaattaacaaaaccattgatggtgagttttactacaaataaatgggataagagtgtatgaggttttcaaaagaatcataaaaccatattcgtctcgttcggggcaacttaccagacaatgggactcccaaactaaaagaggcccaacatcctcagctccgtcacatgactgggatcaagttcgggaacattcttattacct

SEQ ID NO: 194569 - DNA, 1306 bp, Cannabis indica
aaaaaggttactttttatatatatttttctcttatttattttacataagcgtgtgttaaatagctagatgtataacctcttttcgaaaacagtttattatacgtgcatattataaatatcaaaacaaatataataaattgtttgaatcttaacttgacatattaaactatcatttttcttttgaaaatttatgaataatctctcataattacattatatatggtcacatctaaaagcaaaataaaactataacttattcatgtaagaaaaatgcgtacttatagagtacatctacctcatcggttatactttgaaccaatctcgattatactttgaaccattgagattggtcatcatctctatatcgaaagtcaaatcttcaacaatcgacaatcatcgaaataggtttatctcattcttaaccgtcgagatagagtaattttcttgtagtattatagacaattaatattaattaagcactaattaaccaataatatgttttcaagcaattagtgaatatagggtacgaaatcttacaagaacataagctaaactcgaaacaagaaccatccaacgatcgggaattcgtttacgatttcttaagaatctgattgggacggggagtatagcagtgaaaccccaaaataaattgacaatggcagcagcatgcctgaaattgatctccatttctctagtcaagtatgccatcaccaaaaataacccatattctgctaatgtatctgaccaacccaacactatacataataacacaataataaaataatcataattaacataactatatgcatgtatgaattagagagattaattaatttttaattaattattacctgctactcttagaggagaccccattaataattattgttcttcttccaatcccaagttttgtatatatgcttttattgtacaaaaattggatatagtcacttgtatatatagctttataattaaccttattattgcagtgttggacaagtaaagtaaatataaatacatttttgattaggaccactttttaataaatatgattatattgttaaaaaaaaattaggttatatagtaaaagtgttttttttttttaaaatattacaatttaaatttaaatttactatatatttctatcttttattttattttatatttaaatgtgtttatatgatataattttttttaatatcgcaatttaaatttaaactcatttcacatatttaagaaagtatttttttattattattttttatactaaaaaataaatatttctattattattattttaaaaaat

SEQ ID NO: 194570 - DNA, 1090 bp, Cannabis indica
gccaaacacgttccatgtaagacaaaaaacaacatgggctcccacgtgggcctcacacgacaccaatagaagaatatgagttcatgcatgagcccagagacaatgaacgtggccataattgctggtatagaagcccatttaggcccaattatacgggcccaaaaccccaatgtgggtttgtatatagtaggacgtagcacacggcttaccatgaggttccaccttctaccccaaaaatcttgtagtgagctagagaggtatggctcgtcgaaatgtggctcgagctctactccattcgcggctcgagccagagccgttgttgtggctaaaattaggtcaagaatgaggtatatgtatagggtgtaaagaaataaaatgacctttgggtgcatatatttcttgtactcaaacacactagtaaccaaaatagccaaaatcaagcctttaattgcatatatcacaaaaacccaatttttttggccttgtttaggttttttgagagatgggttgttgttgttgtgtttattatttttgtcatcagaattaagggtattttggtcattttgaatctcaataggaaaacaagcataggcaataaaacgaccgagggaattactctttggcgggttttgaaccaaagggccttttccaaaagcaaagagcaaaagcttaaaatttgcaagccatgaaatgaaaaaggcggtattacccccacaattgattgaggtgagatttagaggtaagatgagaaaaaggggtataattgggaaaatgaatatgagtcttttggtacccttcgagactattttaccaataaaatagcaataacataatgataaaattattacaaggcatacctttaagaacttgttcatttcatgaccctccattaggttagtgtaatcctctaatcttaacatcttgtttagatattttttcaatgaagaagaagaagactccaaacatgttgaccaaatcaaatgtggacaaagtataaatatatatttaaaattacaaaggagagtgtgatgagaagtgggatatgaattgaatcaaagaaacatatttattcatatattattattattat

SEQ ID NO: 194571 - DNA, 1537 bp, Cannabis indica
  modified_base (1492)..(1492): a, c, t, g, unknown or other
tcataaaaatcgaaaaattgaaatcgactatcaaattgaccagattataactgaattttttgattttcacgtcatcgttgaatttggtggttaatttcaattacaatttgcttgacatggccatcggtttcagtttttgacaaaaaaaatataggttaaactgccaaaaatcaaaaatccaaaaaatcgctaaaaattatacgaccagctttggacggttataatttctcaatggttggttgaggttttcataaaataaaaatcgtcaccgacttgttggttataaagttggtaaaaaaaataacataaccaattgaatttcacccctaattggtgttatatttagctgcgaagaaagatttgtaatttgttattgtagaatgtgactcttgttattataatattaatcaaaaattaaataatcataaaaaaaaaataccaacttatttaaggcatcaaacatagtgagtaaagcatattactttataataatggccatgaatcttcatacatcattcatactcctttaactttgcaatctacacgagaaaaaagagatataagggtcacaactcttattaattctctaatattttagccacgcacatttcaccccatagagtcactaataaaagagcataacccttttatgaggaactctgggccaattgggtctagatgactaatacgagagaattaattgttttggtccgaagggttgaccaaagacattttagagtgtgtatataggctctgagcgtgttagtaggttatgtccatcttctattcactttgaatcttcattttgcttcatttttttgcattctattcgcctcttactcgtagtttaaattaaatttatttttaactaaatgcacaaaaaaaaatagttaatagaaatttaattttacaatttcaagttgtatttgctgttttaggtccttccagtagacgatgacctctactcacaccttttgtgtcaccccctctagggtctcctattcgcctttgcctctctcaagttaacaatattcttcttccatgctttttttcgagttcgatctcaaattgtatattctttttgacatcgctaacaaaccgtaaatcacgaatttagaattattaagtgggaactcgaatttagtttgaaaaaaatataattattaaagtcatatatatacgtatttgtacaatagttttttttttttttgagaagtattacaataacaattgaatgttatcgttgatctatccaaaatagtttgaatatatgcttggtaaacgctctcccaagtgaacttattcatgagaatggtgttgtgaataaagagtttgaccatgttgttaaatttgttcccatagtcgtctatgggggccccactctagatgacatcgaatttaacttgtgccctgcaggctacttgctagttcatcttttacattttttttccttgttacgctccttaactccatttttttcttctgttgtccncacctgcaccaaacattctatacgtacaagctatatttattaaat

SEQ ID NO: 194572 - DNA, 949 bp, Cannabis indica
aaaatttccctaataataaaatcaaaaatagatttttaattactttgctttagagactatgtacatatataaaagtaagaaataatcaatatatagttaattattataagctaattaataacattggccacttcttccatattgactctttcatcattatattctacggattaataaccaaaacctcaatttttctcatcaatcaattaattaattattataataagtaaaatacacgtagtagattatttgatctcatccataataataaaccaaacatatatatattgcttagtctttatatatacatatttctttcactttattttctcttttaaataaaaataatgacacttttccaagagccatattaatatccaattgtgggggaccaaacagaatcgaatctacataattttgctcaacaaattgaaacaaaaacaaaaacttatatatatatattgaatataattactagttgatattgtttacctatgaaaaaatgttaattatagtacttattattgttggtgtgttatatatataatagattattaagtttgatagggaataatatataagtgtgaggatcaatttgagtgagtgcttaccaaagccaactaaaaattaggattggaattaattaattactctaaagtataaagatataattggcgttatggtacgtcgagagggcactttttgggttaaaataataagtggttcataaattttattgaaataaataattaaaaataaaaataaaaaaggcttggttcacaatcatatatataattcacaactatatgtatataacataataacttcaagttggttgataaagttattattgtgtatagttttgagattgaggattggttttaactcacatggcttgtcaagttaatgtctctttctatattcatcatcataaataataataataata

SEQ ID NO: 194573 - DNA, 1334 bp, Cannabis indica
ataaccaacccattaagagttggccatgaatgatccatgcctcaaaatctagattcgagagtaactcagtgaccacttcatcactgtcattcttcgtttcaacagagacaaactctagtgggcatggtttttgaccatttagatacccctctagcctatgacctctaatgatggtaaacaccatcgtcttccacaaagggaagttattacggtccagtttgagtgagaatgtttggcctaatgtgttgctaaaaggagttgtgagtgaggggatagtagcaaccgtggatgattgtgctctggagcttccatttcctactctcgcatgtgagatttgagctgtttggctgttgacatggaagaggcaagaaccttggctctgataccaagttaaattttagagaaagaattgattggaaaacttagctcatcgagtgattgctacaacctttcattaaataggcaaaaatacaattcagggtaaatacatgagccaataaaggcattacacgtgttacacaaatatctaggctcaacgaaaaggttgttagcaaaaataatgattacaaatgattacacattcatccttgggatcccctcatttacaatgtccatcatgcccttgtgccacttcatgagcataatcaatttcttttacaagccttcaacaatggctactcaataccagcgcaacataacaaattataggaaaactctctctcactctaacttgatctcaccacaagtctctctcgactcttctcttcctttaactcaccaaagcagaaatgaaccaaccctaataataaacctattgaatagtttatatagacaaaaaaaaaaataaagttgccaatatggcataactaacttaattgaattgaaaagaacctgactaatagaaattggtggctgtccaacctagcaatacgagcgaatcattgtagactaatagattatgaacatgtagcaagtgattaggatgagctgaaactaacacatttgatgaagttttatacaatttgtgcaaaagtgtataattttctaaaaaaaaaagttatttattagaaaaattacaaaaaaaaaaaaaaagttaaagaaatataggattaccttacactatttttattcttatgatttttatggggttttatttatttatttatttttttttggcaaagtttacaaaattaaatttttttttttttgaaaaaattattcaacacgaaataaaaaaaaataaaaattatgagaaaaataagttaaggcaaccaattaccttatattaattttcttatatttttaattttcttgcataaaataatttttcataa

SEQ ID NO: 194574 - DNA, 605 bp, Cannabis indica
gagtatcaatggcgagagacaattctgtatgggagtggtggataatagtgaggagccatgcttggggcgtggtaggaagacgcgagggaaatacaagaatagctccacaaaacgtaactctggagttaagactcggagtggtaggaaaaagagaagattgaagatgctgggaaatcgatgtctacaagcaatttgaatgatatacaggcaaactgtgttgacgttatagtagaataggagcaaaattttggcaatggcgaggaggcggccgtaagcatgctcccactgtctttatgaggtgcttagcgtggaactgtcggggcctctgaagggctgtggcagagagaaccctcaggggtttaatttgcaactgtgatgcagatttaatttttctttaagaaactaaagttgatatggaaacgatgaggcacgttactaggcgactaggtttttcaaatgtctcgtgtatccttgttgttggtatagtagggggtttctgtgtggctttgagaagaggggttaattgtcatgtggttgaaacattagatttgggttttcgtgtggtggttaagggggggataggtctattggaattattttaccag

SEQ ID NO: 194575 - DNA, 1847 bp, Cannabis indica
atgaacttaatattgaagtgaataaaaaataagaaactaagtataaattgatcacataaaaagtgttaatttttttatataatatatttagattagtttgagatatttatataaatatatatatatatttaaaaaataaatacttaaaattcattatgatacatatattccctgaattatttatttaccattaccaatattaattaaaatagatgagaaaaaataataaataaaacaaacaaattcatatggcatatatacatataaatatatttataaattgtaactaaatttttgaacacttactcaaaaatcctctaatttcatttgtattatagatttatctttttcttaaaaaaatactaacaattaatttactgaaatatgaaatattaaaagagaagaaaataagtgaaaagaaaaaaatagtaaaaagtgaaatacacttacacaaattaatgttccgtaaaattatgtatcttaacaaatatattcttcccaaattcattattttaaagcaagaaattttgtacatgcattctatttagtattgcattgaaaagttataataacaattaaaaaaaataattaacatgagcagtagaattataaacaactatagagaatgaaaaaaaattaaaaggtttatttacagaacccttgtagcttctatcaaccctactactaagtattgttgtaatctatgtatatctagtctatattatgcatggtttaaatatttggtatatatatataatatatcgtatatataagagagatagatatatattttttttgaaagaactaaagggagttcattgtagaagataatttggaatcacaataggggatccctccctattaatgtagccattacaatgcatattgcctctagcccatcgagctaaagcatcagaagctgtattgtctttgcgggaaatataataaaaattacaaacactaaacctatcacacaaatttaaaaccaccatggccagaggccttagcttccacatgggaggacatttttgatcattcaaagcattgatttttgcatccgaggctccagcgaatgagtagaaccccttctgctccgctaaatgcaatgcccatttaatagccaaaagttctgtctctgctgcagaagaggcttgatcatactttgcataccagaaagattcatgattccgtctgtccagcaagccaacagctagacccgcattactctccttccatgaagcatccgacacacaaaatacatcattcgaattgcatagtacccttccatccgcaacagccggggtcctaagatctattctgtgatctaaaatttgctcagcattagccagcatcagatactcatagtatcttctcataatggaactcctaaccacggcaatatcaactaatactcctttgaataaaaaatcgttcctggccttccaaatgccttcaaaaaagcagcctataaaagagacaaatttctcacaaagatctgagggaagtgttgacagaacctagtccaacctttccttgactgaattaccaaacccagccccataacacaaaggaaaagggctgctaaatcataaggctcgcgcacagtggcactcccagaagatatgcaaggcggactcagaagacccatcacacaagggacagctcttatcccccacgaaatcgagtctatctctagttggcacacagcccatgactgctctccagatcataacagaatacctataatgcactttcttaccccaaactttcttccacagattgccatcttccaatgaaacacccccaagagtggcattataaccactcttaactgtgaacctcccatc

SEQ ID NO: 194576 - DNA, 2950 bp, Cannabis indica
gtatgaatttaccataaccggtcagtccgtctacaaaattatgattcaactaccttctttcaggtgagcaatctaaaatttataaaggaatagtgagagtttgaagggggtgattattttcaaattttattaaatttaatgtaatttttgttttctcttaattattaaaatgtttaaatttcaagattatacaagcttagaaaagaaattagattggaactgatttttataagttctggtgcaaactctgaaatttaaaggtactactgaaagctctcaatttagtatgtcatgctacttcaaattgtttgtccaccttgactcaactaagtggttagaaggttccagttcaaatcatgtgtccagattgtcaaaaaggtgaggatactatttttcatgtacttatttcctattcaatcgttgctcaatgtttgcagaggcttttagctagaattaggccgattgttcctcctgacttttgcagttggtttgattaatttttacaaaggtgcagtaaggacaagtgtgaggaggttgttatgttgtgttagggtttatggaaggctcgaaacgagttggtttggaaccaaaagtatgctaaggtagatggtgttcttatctcaaaatagaggttcaaaggcttcttttctaaattttaaagctagtgatagagctgaattttggattaagccacaagagaatacaatcaaagtagttgttgatgtcaccattttccgtgatcgagctacatttgctcataagtcgctcgagactctcaaggagaagtagtgatggctaagtcgggtatttttgttagtacaggcactcctgatttagctaaaataattggtataaaagaaacgctaagctagattaaaactcaaccatggcgaaaaagtagagttggagtcaaattgcttggtagcaatccaatctattcgaaattcattacctatgctttctacttttggggttattatagaaaattatcgtaaatttcttgcatctttaaacaatgtttctttgctttttattaaacaatttaccaacatagttgcccatagtcttgttagaacattttgttcttttccaaatcgagtgttcaacaagggtgatgttcctgttgaagtacaaccttatcttttaactgatttagcaaattaataaaagttctatatttatttaaaaaaaaaatgactaaattaaacaaaaaaaaattgtcgtgtttgtgaaaacctcgattaaacacgagactaaagagtttcagttgaacattgtcactggagaaaggctttaaaaatccaaccttagtggaaatctgacccttctaattctaaacatggtttgcttgtgtgtgctaacaggataccactcaatggccagtaaaaacagtacattatttaaatataatgtgatcttaccatattgattggtttcttctaaataaaaatactaccatatgattgtaccaaacaaaaaaatggattgatgttttcctaacagattcatctgtttttccatattgggcctcaaagtgttgacagtgcccatggctggtaattattttcaaccagaattatgtacaagaaaaccataaaattagaatccaaaacatataaaaatagtagtacattcttaacgaaaagatattttcagttaagctagaatataagaaagatgcctacctctataaccttcagataaaaaaaaaaagattctttgctcagataaaaatcaattcagccttgttatctgccagaaattacaaaacttgcagttgttccagaagcctgaaaaaaactagtttgaatattttgtgaagctaccttaatgatatagcaaaaggaatgccccttgttcagggtggatatacagttaagaggaatcaattagtctgagtttaggcatctcggatagggtggaaaaacaaagacataccatggacgagtgttttactatggagacactagtggcgttgttttcccgatcacgggaaagaagaagcctcacatgtgggatactcttccaagtctccccaagagctggtttaggaacacctccctccccacctacagtgtgattggtcacctaatcatacatttgattcagtgttattccactatcgagtaaaaactattttgaaattaaaagactagttaattcacatcaacataaattcagaagaatattaatttgaaaagaaagttaagtgatgtaaatgtgtgaaatgaatttagagaataaaatctttacataaaacgataggactgaaaaacaaccatcgaaaacaataatatgaaagttggattttggtgagaaaagaaaaaagtagaaacaatgtaaattaaacaaaattttccaaatcaaacatgaaaaattattttttttctgttgtccacactttttttttcttatattttccctaccttttctttcctcgtcaaaatccaacttccgaacatacccttaaaattactattcaagagaagaaaacttaccattactgcaagattgtgctcatgtgccaacttctttagaagatatccagcagataccatcaatgcatgccctgcaattactccacacacaagaaatgataagttttcaatataaataatatctgttgacataattacacaatgtgtgaattaactaattgaaaaccagaaacaaagtatacaaacattcctagagaaagcttctaataacacgataacatttaaaaacaaatcttaggagagaataccatgtgaaccgctgcctccaagaattggggtaataagtgaagagattgaatccacaataatcaaccgcaccatttggggtcctctctgagatctcatattcgattcaagctgatgtaaaactctaaacatagtgaagatatcaaacactgactgacagaagatattgttcataacattctgaagacgacgaccttcagcctata

SEQ ID NO: 194577 - DNA, 3031 bp, Cannabis indica
aatgaaaaatatttttcactctttttttctagatttttttccctacctatattttccgtgtcttctattttctttcttttctaccaaaaatagggtgaaaaaagctttgttccagtttgaatttccgaatggcatgtgaaaatggattcagttataaaggttgacacttacaatagcttgtttctttatgttcaaaaaaaaaaatagcttgtttcttatattttctgattattaaaatatgaaacgtgtaaataactaatcataatatataattatgatggagttgttgtccaggttaatatctaagggcagtgttcaaaatgatcttaattacgatgtgtttgattgaatttttaggagaagaatagattaaattgtcattaagataattaaattttttacttttgcctaattctaatgatttcattattcatttacatggtccaataaaagttattttatttaaactcaaagttttgaaattttcatttatgatcatcacttgatatcgtatgcttacagtacggaatcccagacccaattgatcaagttatatacacaagatcagctaagagtggagctggcagttgttaatattgagagaggtttgtgttgtgttttgtttaactttcgaaaaatttaaaagaaaaatggcgctagaagaaacgatctctttacactacgtacccaaaaatatcttacaaattttctaccaaaaaaagttgaaactactatgccgagctcataggagaatctttatatttgattactgcaatacgatcgaattaatgaataagatgagaacgtacccgaagatgtagcagaaaaagtatcggatccacatctagcgttataagctctatctttgcagtaacatttgaattgccttgttgtattatctgttccacacactccctcagaccttaaacattcctcgcagtagctgttattcgcattccactctattccaaatcctaaatcgatggcaccactcacatcatctgtagttaaattgggggtctctaatttattggctgccgaatccaaaatgcgtagaacaacaccttccccgcaacttggaatatcggcaacagcactcctcatggagtccgttgcgtatacattagtaacgcctgttctatctccggggcaactgaattgctttgcgctaatcatttcggtaagtaaagatgaaggacatccgtagtaaagcgttaggttttgtgaacccacaccataacgaaacaaagggtattccacgttgcgttttgtcgatcatctgggcagaggttgtcccagtaatcatcccgaacaactgtcagttttcgttcatcccaaatgatttcaatcactcgatagtcaattgagtcaattgtgatctccggtgcatccccactgcatttgagctcaaaatctgggtggccgcaatagaccggtcggccttctccccagaaaggatagctgaggttcctgaatttttctccacagtttaagagcgtgttgttgcatgttgtgtattccgtgtattcttgggcaaatacagaggtacgtaatatcattgttatgatgatgaagatggaggatgcgatatggggaagcattttcagaaacagagaagaagacagatacagatcactttgtaattatgataatgtaaaagatgtgggagatgaaatattagtggtctgttcaaatgagagcatcataagaaagtgatggagttttgacaaactaccctacctactaataaaattattgtcaaagtggaagtttctaatatgtggccaagtcattagctgagtttaggcgacctcgtctaacatctgtttcggttttccattgcgatattcaattgtccatattcggtttaaccacaccaaaatgaaactaaaaacggccgtaacttcaaagtcataaagtcaaagaaatcagcctcgtgattacatcatttgccttcaaatgaataatactcttgacttctttgtataatacatggcaattgaattgaacatacaccagccaccacttataaatgtcgtgaagtgagctgagtaagattcaaattctaccccaagcccatatcattatacttgaaataataaataaataatcttttattgtatttttagaaccaacaaaaaacataccaaaggaaggagcaaagaaattaatcaaaatagaaaggacaaaagtagttgactgctggtgcggtacattttgtgcaagaagtatcaaatagtccaacgaattcgatcgtttgcaaatacaacgtgtaaattaagatagattatcgattgtgccaactgccaaaatatgggcgtcaccatacttaggtccttctataaccagacaaaagaataaagcctaggtgttcaacttcagagtcctaatttgtcagcttaagaaagctaagctcgacctaacggcgtggtcatagtgacgtagtagctagcttatagacataaattaaaataatttatggatttgtcaccaaaaagtagagacacgagatgtcatatttaaaacaaatcctggctaaattcaatttactgttatttgcagaacaagcaccaaaattagaagctcagactcataaaaacagagaattttctctgtaattgatcggcccaattaaatggttattctagtacgttgttattgctcggaaaacaagttcgaatgatattcgacgtccaaatttggcatttgatagattaatggctgcagtttgtgtacttgaagggatcatcgatgaacaatgtaacatatatcagcttgcatcgaagataacgaaaatggagagagaactaaaagaaaaaacaaattaatttttctctatttttctaacctatatttgcagcttggattttattgtggaaatctttgaagcttgtcaacctttatttttgtaaaggtaacttgaagcctatagaaattgttcaagcagccattaacagcttttgtgctaaaagggctctatgccaacaaaactaaatctcaggtcttctttggagagattaaagaggattgc

SEQ ID NO: 194578 - DNA, 2577 bp, Cannabis indica
tataatcatcaatatcatgatcatggtcttcatggtcgttataataatgatcatcatcatatgatacagcactatggatcctcaggagctaataatagaagtcatgaagatggtcatggagactttgaacagaagcctaacatttcattcatgaccggtagtactaagactgaacccttctaggctgcctagcttgctatgtaataatatgtacttaatattttttcttttatttttatagttatgatctatatatgcatgatttgtggtaataattaagtttatatattataatggtgtagtagtaatatatatggtacgtgcttgctgcgttttggttattaatattattggagagatcgaactctgtcgaagttttaaatatatacaataatacatatatattatagtgtaaactaatttgcagaataaactcctaattttaactcgcattacagataaatatcaaaatttaagttatatttttgaaacatgtgtatcgaaaccagtggcggactcaaaatttttgaggatttttgatcggtaggggcttaattaattgttataaaaatgtttattatttactttttattaaaattataattattttgtgggggcttgttagtattttttgttctataattatttaactaaatgaaaagtatttaattttttttaacactaacttttttttatgggctatggcccccacactattattattatgtctgtctctgactagaacatttgtaggtatctaataagtgtcaagtgaataatcatgtgtgtcagtttatgattggtccacatcattaaatttttatctttaccttaaaaattaatttaaatatactaataaaaaaatatcacgtggataatgatttgacacttaacagttatgtacctacgaaagttccagaactataatttagatattaagacagccaaaaattaaacttaagtatttatttgtaaccaagagttaaacttagccatttacgccgtaaattactctttattgtaccaacagatcaaacttcatggttgactatgtgtgttgtaaacacttgtgtgaatgtgacataatgactcatttagctgattgattcatcgtaataattttaattattagataaaataatttaaaattttaatacgtgtataaatatattttaaatttaatatagcgtatgtatattttatatttatatataaataaaatataaaaaaaaataattttttacatacaatttccttttctcttctttagaatttatggtttttcgagacataaaataataataatttattttattagttacataaaaaaaaatatgttttaataaatattaaataattcatattaaaaaaaaagtaactaatctataataaataatctaaaataattaatccaatccagtttgcaatagtgtggattaaattgaatttgatttgagctattttaccgattagattagatccaaaatataaaatccacatatagtgcagatcgaatgcactatacgcaaatagagcgggttgaattggatgaacaagtagtgtgattatgaataatttttctactactgttacagtgcggcgtgattaagtaaaataaatttaaaatgataattttcacatatataataatttttacgtatattttaaatgtagattctcatttttattttttattctaacctaattaattaatttcaatttgttatagtcatttgctaatatttatctttctttttttatcaattgtagaaaaattttgaattcaaaactactcaaacattcctacatatacaaataaacgtataaaaatgaagatttattagaaatatatcataatttataactagtttttatttgagaagtgttattgtaaagtataatattgttattagtgcaattcaatattaagtcttacttatttatatatatttttttggatgaataatgatctttttattgcccaacaaacaaattaaaactcaagagcaaaagctttatgttcaaaccaaatacaatcagtgagaaaatccattacaaatgcttcttttaattttttaaacaatagtatcaatgtacacaaatttattccacaaataattatttatagcttctcaaatactatatacaacactattaacatttgcaagtgtgtaccgaaatttttgaaaactgaaatattcaagagctaaaaaaaataaatgaatggcagaaaataagagaggaagattttttacgtgattcggttgttaacgaaccttagtccacgagtcaatctattagcctcgttgggcagtgttgatgattttataatgttacgtaggaaaccctacatcttttttcttaatttcttttttaaaaagaaaaagaagaagatcaaggatgatttttgctgagtttttgctacgtgtttggttggcttgtcccctttgcatgaaaatgaagggggtatttatagccttggtgatttgtatggatcgctccatgacccgcctagggtatctactcaaatctcactactaggtaaaatacatgaaatgtagagctgactggttgatc

SEQ ID NO: 194579 - DNA, 754 bp, Cannabis indica
aaacaatgtctcaaaaaaaaaaaaaacccaaaaagaccaatgaaaagaaagcgattaaattgtagtatgtctatatataattttctgcagtcattcaaaatgattttcagtaatttgggggaaatgcccaatatgtattgagtaactaaccaaataaaaacccacccagaatatgaaaccattatacagtgtgtgattgcagtcacatccaatgagaaggactgacaagagatagtcctatgtcttggtggtaattatctccaggatgtaggatggcagataatttttattttataattagaagttacttttgttctttgaaagtcagttttaaaaattaaaatgggggctaggcgcagtggctcatgcctataatcacagcactttgggaggctgaagtgggcagatagcctgaaccctggagtttgaaactagcatgggcaacatggcaggaccttgtctctacaaaaacatacaaaaattagctgggtatggtggtgcatgcctgtattcccagctactcaggagactgaggcgggaggatcatatgagcctggggaggtgaggcgggaggatcatgtgagtctgggaggctgaggctgtggtaaaacccgatggttgtgccacgggcactccaggcctggggtgacagaggaaaacccctagggaaaaaataaaataaaaatgcactaaactatattaaactgcatttttaaaaaagagtatagtgaaaggaaaaggggaatgggaaaga

SEQ ID NO: 194580 - DNA, 1849 bp, Cannabis indica
ttttaaattttattttacaataccacaacttatttaaagtttttttaaaattttactgattatcttgaataactacaccttacactattataaaaaacagtttacatttaaaaaaaaaaatactgaaaaacaataagtgatactatagatttttccatgtaatataactaaaaatatcatatccctaaaaaaaaaatataactaaaaatatcatataaaaaaatataactaaaaatatcatgtaaaaaaaactatataactaaaaatatattaattgattaaagactaaccatgcaatcgggtaagcaggaatccgggtcgagatcgggtcggtccccagtagtccatggagacccgccttgagtagcccaagcagtactgacagcttcataatccaatctcaacaaaatctgatgtttctgtttcttcatttttttattcttttttatcaacatcatcatcgaactagtactactactattcttcttattatcaaaaacgacgtcgtttacatcatttccattgtcgtttttcatttcctttatcataatattattctcatcattctcctcctccacaccacacgacggtgcaggtgacacgtcatcgtcgtaatcatcgaagttgaactgaaaaggctccctcgtgatcatcaccatatcatccaaactagtattacctcctaatccaacggctaataattgatcatcattctgatcttcttctttttcaacctttacacctcctgattcttctgttgtcgttgtcgtttcatcttttgaatccacaaagcccaattccttcataccaaaacactcatcattttcaagcccatggcccaataaactctccacgtcagcagcgaactccgccagatcatccatctcttgagccggaaaaacaaacccatttattaaattattattattattagcagctccaaacgacgtcgttgatttcgatacttgtgcgttttggcttgccacaacgaaaggatcgtatacgggaacacggtaaagaagctggtcctcattttcttcttcgggcgaattcaaatactcgggtaccaaagaaaacgggttcggtaccgtacccgaacttccactggagctaccgtggggtttgttgttgttgttgttctgtttcgcttgtctgggtgtacgtgcttttttagtgaaccctcggtgccacgtaggcgaggagggtaattcggtcaatttaatcggagacgacgccgttttgagtcgaactctctcgtgccttttggctaaagagtttgccgagtgtacggaatgatcgcatgactggcagaggaaagcatcgtctgcggcgcagtaccaccgtgcgcgcttttttacgtcagctatcgcaggccctcgctgtttacctcctacgacgtcgttgatgccttcttgttataaatcgaagtagtagtagtagtagtattgttactcatatttctggaaattaaaaacggtaaaaaaaatatttatatatatctggaaaaattctaatcacaaaaagaaaagaaaattagaatttttgaaatcccagttgatagagtgacatttgaaaaatagtttgattttttctatatatgatctctcaatttgggaagatgacccacaaaacaaaagtaagcactttacagagattatatatattatttaatattcagtgagaaaagaaaatatggtgtaatgcactttttggattgtacttttctttttctcttttttcttttagcagagattggattatgcactttgggtcccacaagtttgccttatctggtttttgattgggtaagaattgatataatcctaattcgtgggttctgattggttac

SEQ ID NO: 194581 - DNA, 738 bp, Cannabis indica
aaaaaaagatatcaacaaacataataatcgttcttgatgagttgagaaaactacttaaatgtcattaagtagttacaatgtacttatacttgattatttcttgacaaaactatcatatttggaaatcttgatgtgaatgatgtacttttgtataacatgcaagcttgtgtatctcctgctatcaaattaaaattaattagcgcttggattcctttctgctactattcgaattgctacttatcttaaaacaaataaactttagactgctaattaaagttaagagaaaatccaattctatagaatataaaaattcgtaggcatatataatgtggaaaatgagatgtcagaattttcagttgtaattaaggatcataatcatggatatatgaatactttctgcgacccatatttcaaaataatcaccataaattattgaaattgctacttatcttaaaacaaataagttgcattgtctgacaagaatattagagaatcatttggtaaagttccttaattaaatgtttaatcttttcccatagcttgatcttaaaatcaacacatgcattacatcattaaaccttagcactaaacaaatgatcggtaaggaattattattaaaaagcaaccttaacttttcccagtgcttccttcttagtattcaagtttaagataagtaaattaaggatgttctactcatgaaaactaaacttcacaaatgcactactttgtttttatttt

SEQ ID NO: 194582 - DNA, 913 bp, Cannabis indica
aatcaaaatcttgtagaggttcttatactgttagttagtacaatatctctcattcttaattaattatatttaaaaaataattttaaatatttaaatttatttttaacatatgaattcaataattatttaaaagtagtaacaaaattaaatgattatttttttatataaatcttaatttaaatgtaatgaattaaaagttaattcaattaattaatcatactttataacaaatttattagttatatattgttatatctaaacttatttacttattttgttttgtaataatttaattagatatactttttataaataaatttaaaattagttaaattttatatattcaaaaaaatataattaaataattgcattagatttaatttttttattatttaaattaacaattagataagaataattctaatacaacactctaagtaaatatgcattagatggtactaaataatacttagtaatatatgtatacaaattgtgggagttctactactacctccaactttgagcttcagcaataggttgtaaactgcacttttgaatattgatatccaaaattgtttgatagttatgaaaatttggtagcaattttcagtggttttgacttttaatcactgttatttttgggataaacctatcaattcaaaagcacaaataagattgttaaaaaaaaaaaagacaaggagaagttttcttattaatttctgtttaaaaaaataaaacgaaaaattaactcaaatgaatggcaccaattaaattccatttggtaataaggaaaagaaaatggcaccaagaaaaagaaaactcgtcaaccaaataatacgtacactgttttggtattaagatatttgagcaaaagaagagtactatagaatagatagtgacatgttttaatttt

SEQ ID NO: 194583 - DNA, 751 bp, Cannabis indica
aattaattataaagaagtgactgcgtacatgaggggtgctttgtaatttccagagttctgtggataccatagtggcattggaagctttagtatttggaatattgatctcttcactttctagaagaatctttagatcgagaatcctgcgtcgtatccataggtaaggctgtttgtttcccatattgaaatatttttggtttggataaattagtcatgaatgatatggatatcctccttttaataccttttcagaaatttaacaaaattagctcacagaaggcacagaaagtcacgtctgtctgagctttcctcttctgaagattctcttgataaataattacaatatccgaagcagtgaagacttcaatttccgaacagggcatcaatcaaagggttactctattgctccaagcagttctgatcatggtttgcttctgctgattctatacaccacttaataaaagacaccatggaccaacctaaaatgctctgttttatgaacctgtttatgtttcaggttttagcaacaatacctccagtcagctatacttgtctagttttcataccacacctgaaaggagaagattctcaaagcctgattgggaagagttcaccaaagaatccaccgagaaagccctcgaagagcttgtttcttcacctggttttgggaaatggctttccaaaagtgcagacagaattagcgttactccacctagcggtagaagacctgaacaaaagggcaagtggtttc

SEQ ID NO: 194584 - DNA, 1272 bp, Cannabis indica
ctatactaaacacacacgacacagtaacacagacatgacatatatgaatcttaaaaaaataacataatttaaaaagggaatggtttatagtttttcaatatcattattttgattatttttcctaggctcttttatcaggatgctctgctgggggtttagcttcctttttgcattgtgataacttcaccaaatatttaccaacaaataccactgtaaagtgcttgagtgatgctggttattttcttgatgagtaggtgatcatttctgtattaatttattaaattaattgctctttttttttttttaatttttaatatttttttttacagggctgacattagcttgaatcgccctatgaggtctttatacaaagaaatagtttctctacaggtatacctctttttcaataaaatttcatcacttaataagttatattgcatcaatatataggatttttcttgattaatttaattgcatatttatgatagggtgtagagcagaatctggacaagaactgtaccacacaccttaaactcccagagttggtattatttcctcagcaattttgaattaattcttttatgatctcattcttctgatgtttgattatagcctatatattgttggtgcagtgcttttttcctcaatacgcattgagattcattcagacaccattttttgttctgaactcagcatatgacgtattccaagtactaatatgaaccaagttaatctaattaattaacactacaaattgctaatttgaaacaacttctaaaataatgttatttaattattaacagttccatcatgggttggtgccaccttctgctgatccacatggtcattggaaccgttgcaaacttaatcctgctgcatgtgatgctaaccagacagccatattgcaaggtcattatatatttgttaataatgaatttcttaaatggagctaccttcacattattaattaattatagttttgtaaggattagttctgcatttttctaaatttgatttttttatttttttggctgtagatttcagggcatgatatgattgtaactctaaaattattcattcaccccaaaaactcaagaagagatggggatgtttattaattcatgttttcgctcattgccaaagtgagtctcaagatactggtttgctgttgattccccaacagtacacaataaggtatcggaaatctctctctctctcttcaaaaagaaaaaaaaaaatataaatttttttctcaactacctttcttttcac

SEQ ID NO: 194585 - DNA, 661 bp, Cannabis indica
aaaaaaaagaaaagaataaaagataaaaggataaatatgaaagatctgatgatttatacgttggaaattttacgatcagtaaataaaaaacacccatcaaagaaaattaatcaaaacccaagaaaatctcagtgaaagagagaaatatcaaagatttgttaatatatgaggttggaagaaagtttgggatatggtctgggagataaagcttgacttttttttctttaaaaaataataataatatatatatatatttttctctgtttgcattattattaattattattattattaacaagtaggacttattaaatatgaatgcatttgattttgaaggcttcaaagtcggaggacaaaaacagagaccggcgcacgatagcatagaatgttacacgtggcacggcagtgtgcggaaggtgttataggggtgtgtggtctaattctatatcctctaaaggttggtctgtcttaaatttttggttggttggttggttttgttagttggtcatggttataaagcttcaattttttttccctttattattattataaaaagaaaacaaaaacagagaatttggtctcccattactgttaatggacatcactaacaacaaggtttctgtatggttttaattaattaagaaaatagttaaactatttt

SEQ ID NO: 194586 - DNA, 1581 bp, Cannabis indica
tatttatgcctattgtagaattggaaaacattgaagctgtatatttgtttcatagctcactcattaggttggcttagaattaacatcatctcatttatttggtcttattatccctagcctccattcaaactcttttgattgtaagctttgatgggatagagaaggtggcaaggtgggtcttgattttcatggaagttatttgattttaagatttgtttagttggaatccttgaaattcattcactatcaattaactactgcactaatcttgttggatttcaagttatcaaattaatcagttgtctccaaaagctgagattaacttctagatttcttaacttctatcttcactctccatgaaggtattaattttagatgaatgtcaaaatttgacactggcttcaatacttccacgaagaacaatataaatcaaaatatgatgatcctaatgattcataatatttgcaagttatgtgattttgattgggctgcttgcccctcgacttgacggtcccttatcgactggatagtatttatttgttcttccacaatttcctgcaagataaagaaacaacacacaatctcttgatcttttgttgagtctcaatatcattacataacgactatcattttgaagctaaaatggcttaaagcttggcaaacttataaaaatattggaatttaggttaatttttataaaacaccagtaaaacacaaagcaaaacaactcaaaacaacagtagaacaactaaaaaatactagtgaaaacttaacacagtatactgcattatgaaacttataaaaacatacattaaaaagtaaaaaaataccgcctgacattatttttgttaaaaaatgacaaaaattaagatactatgtaaattttcctaaagctttgcttgtaagtttgggcatctctcgttaggactgaacatcatgagagttgattgggtttcgatttggaaaaaaagaacttgtgctagcccataaaatgatcgggttcatcaggtcaacgtgtttgcaagtcaacaagtttgggttgaccaggacgaccggttttttaaaaaattacttgggctccggttgttggatgtcgtggatcgaggaggaggaaaggctattggacaaggcacactagtgacaacaaggaggagagatggcttcaacgacaagtgtgaaaggagaggcgagctctggttggggcttccggtcgtcttcgtcaagggagggccgatctcgggtagaacagttgaatggggccgccatcgtcgattgagcggaggggggctttggtctggcttagggcttaatttgggtgggtaaggagagtcgaggtcggggtcagaggtgtttggtctagtggcttagttttaggttttatttttatgttaagtttaaaagtttaattttagaaaaattaaaaaaccaaattattaaattgtaaaatgttcgggtttggcgggcggatacaggtccaactcgaagtcgcctgataaagctaaatatgttggacccgacctgccattggggaacaagtttttgagacagccgagttttatgggtttaggaatgtcaatctgg

SEQ ID NO: 194587 - DNA, 1253 bp, Cannabis indica
agaaaaataataaataaaaattacaacaacttcaaaatcaccctctataaaaaaacaaaaacccaacaacgaacaactctgggcagaagaggatcgccaaaacaacatgaagttgaagagtttgtgctcatcaaatgagtgactcccttgaaaagaaaaaaaaaactctaaataaacaaaatatacattagtaatcaatgtaatttgaaatgtgaaaagtttctcaaaaataaacaaaatttctttttgcttcttttatatatggaatttggaaagtttctcaaaaataaatttaacaaaatgttattttctcttgaaattggatggttatatataaataattaagattataatatatattgtaattaataaattaataactaattaaaagccagccatgcatgtctaaatttatatctttaattatttataaagttttattgctttagtttttaggtttgatgatcagcatgacttttctaaagtttttacataataataataaattaagaacttaaacaaaaaaaatgagtgatgtatatttttatgagtatggatagattgagagaattgttaaaagatattatattgtgcctaatatattttttggtaccatattgttattggtgtagttaaataacatgtttcatatcatttagaaaaataatttttaaaaaatatcgctaactaataacatagtactacttatagaaggtgttggacataacaagtccaatagcaatgctcctagatttagatatacacttaaattgtaaacatttattacgtatacacaaatgtaaagtcaaagtgtaataaatatctactgcttatatttttaaatgggatcatatcacttttaattatatgattgaaattaattacatattttgtttgtaagaagtacctataatttgagtgtctcccaactatttttctatttttattgtgtaaatttatgttatgatttacatatatacataagtatatttttttaaaaaaagtacaatataatgtttacatatatggtcaaataaaattgattatggttttttaagaaaaaatggttaaacgaatgaatatcaattaatattgttgaaaaatgataagatctaagatcttgaataataatctcatgtgtgtgacaacaaacaaaattatgtcaatttgaaataataaattaataaatttcttttgaacacaacaaagtccataatgcaagcaaaggtacttgaatatttaagtccaaaaaa

SEQ ID NO: 194588 - DNA, 2198 bp, Cannabis indica
tttttttttctttccctcttttctctttttcctaagtgatattggatatagaattttaaccttaaatggtatattaactattaaggatgggtttataatcaaagaataatagggttagctttattttccaatatgtctggaaaaaagacagaataatccaacaatgagtagtgataataacttcatttcgcagctctttttatcaaatcatttcacatctactttggatactaaaataactttaattaatgagttcatgattaaaattatttatataataaattattgttctctttagtaagcctagagatcactaattataataagtctattttaaatgttttatcatgatatattttcttaatgatagtgtttaatgttgttgtagcacaccctctataatttttttttttaagaaaaattggtgagtgttaaacaaaaaaatttattgggttctttattaaaaaatatacaatatttttaaaaaatacttaaaaatacatatatattttagaagaaaatattttgaagtactcaatgaaactccctattatacaaatatttttgtacacatatatataacatacaatatatccattggttcaaaaagcatacaagatatccatatgatggattgatctttggtcgttcgagcccaaattaagtcccgatttattttttaagaaaatgttttttttagggaagaaaatgttttaataaataagttttttttttatgaaacgttttgcttaaactactttttttttttgacaaaatctttccaaactaaatggttgaaaatatctccctttaattacattttgctcattttttaaaacaatttactgacaataattaattatataattaattgtagtacaaaaatctatttaattaacaactttaatcatcgaaaagccaatttatttattatttttcctacaaacaatagttataagaatacatatacatatttctagaattcatattgctattttgaactgaatctacatcaacgatcaataatatttttatatttcaaaaagaatctttgcaacaaaagaaaaaagagagagaacaaaacactcataatttagaagacaaataatcctatttattcttttctatttttgcatgaagaacaccatgatcattttagttagaaataataattaataaaacagagaatacaaaagtgaaacatcctagatcctatacgtgcaaaacgtttgggaatccaatccagctaataaataataatattatatatgagaaatgctaaattacaccattgtttaacacctttttatgtgtcaatatggtccaactaagtaacgggtccatataaattaatataatagcttttagggtgtatcgttagccaatcgcaacgcggcatgtcgagaaggtactaagcaccactggtgcctaatagtcatgctcattatatatatataagtacataggtaccctgtttttcataatatttgagtgagtgtgtttagagagagagaaatggatttgaattcgtttctaacatcgttaggaacgtactgtctgatatttttgattttggtattgctctactcatggatgtcgaggttgccagtaaacgccgtcgtttactaccccaatctcatgaataaaaagtccaaattacccaaagggaccggaacgacgtcgttggagttggatccgactaaatacggatctggatcgggttgctgcaacccgtttgggtggatcggagatgccgttaattctagtgaagaggatattatcaacatgtcaggagtggacactgctgtctacttcgtcttcctcaccactagtacgtatacatctataaatatatatatatatatatatttggttactagtaactaaatttgttgtaactaatatgtataatttgtttggcagttttgaaagtactatttttaagtgggttagttctgctaccagttcttctaccagttgctgtcactgatgatcgattgcaacgcatcaaagaagagatagatgatgatcttcctcttgatcttcaaaaattaacaggaggaaatgtatatatatatatacacacaattataatacacacacactctatattatatatatatatatatttcatttaactttatttattaggatactaattatggtccattctgaattttaggggctcccatttcaaa

SEQ ID NO: 194589 - DNA, 784 bp, Cannabis indica
ccttaccaaacatgagaaaataattttctttccctgctaaaatccaacttccaaaagtaaaatgcaaacccagatttccaatttcactttctgcaactttaattatatagaaagcaatacctgcttgggttacgagctcttcgactgtaagtattgaaaatttggtgttctttcttctcccagatgtctaattcgccatcttcttcagaaaccggaggtgggtttgaagatagaattacagaagaagaagaagaagaagaagaagaagaagaagaagaagttttgaaaaaggcactgattttggattgcatttaagctaatttttctgtcttacccaaataacaacctcaggtataataatttcacacatcaaatcaaaacaaagaaaaattgattaaccaagaatcatagagcaacagacaaagaaaaagaagcttaaatcaaaacccaaacttcataaagctgaatttggataatacataatcaaaaatcttaaaaaataaaatctttatcaatcattcattgaatatagaatcaaaagaaggccatagggaaatgaactattcatttttaccagatgtttcaaactttggagagattgactaacaatggaataagattgagatacattgttttgattaaatttggcgggaagcaaagaaaaagcattcccgcttatttttgtacagaagtttttcgtatcctatatagcctctcagctgggctgggcctcttcataatcatatttacaagattatgatttacaatatttttttaaaaaaaa

SEQ ID NO: 194590 - DNA, 1266 bp, Cannabis indica
tttgcttgtgtaactgtaaactattctgcctggtttacatttgatgtaatatgctgtatgcacatttgtttcttatatatttcatataaactgcaggttatcaacaccactgttaatgccaaaagcctctaaaagtgcttctccattgcgtatgtctccgccatataagcgtcagtggaagacgacagcaaagttggtgtctactctttcttgttagtttattttgtttagtgtaatgtagtaagaaaatttcatgttttctatcaaattaattgaagtcctcatatattgtggcacgaccttgtaaattggcttgatagaattttaaaggtgatgaacgttgcatatcttgtttatatatttatttttgatctgtgtttaggtcatcgaaatcagttttactttcaagttcaaagtcccaaaaaattacctcagctagtgtctcttcaaccaaaaaaaattcattggaagatcacaacaaagtcagtatttttttttcactcaagtatttatttttgtattggcgaaatttatttttactgaaataattactttctatttgtgatgattaaaatttttatcaatcgtgtttgggtgcatattttccaaagagatcaacggctgcataaattggttttcgagaatggtggactgcctgatggaagtgaagtagcttattatgcacgtggacaggttgttcaagttctgatttaatatgcttaaattcagtattgtatgttatggaaaagtaaatggtgcattttgtggacagaaattgcttgtgggttataagaagggctttggaattttttgtcgatgctgcaactctgtggtatcattctacatctctgaagtttcacagatctcaaatccttttatttcagattctgatgttgcattcatcgatttcgcaggtcagtccttcacagtttgaagctcatgcaggttgggcttcaagaagaaaaccgtaagtttattcttgccccttagatgtatcatatatttctttatctttgttctgtttgattacttaaagaaatattttttaaaatttaggacaatcatctagagcaaaaggaagtattcagaacaattcttgacacttagattgtgcttataacaaaacatgaaaataatatataaatgtatttttgaaaaatagcagctagatgagctcaaatttaatttatcattcatttttttgtcctctggcagttatgcatatatttacacatcgaatggcgtatctctccacgaattggcggt

SEQ ID NO: 194591 - DNA, 2343 bp, Cannabis indica
ggtttttcgggtttgcaggtctacatgttcagccctagtagcagtggcgaatcaagaactaaagttaagggtatgtctttttgttaggatttgaattcgtaatctctataatatttataagataacttaatcacgccaaaattaatattatatttattttattacttttaattacaaatatatgttataattgaccaaaatacatatacaatttttttcaatattgtttaagctagagttgaacatcagacagatttgtcgggttttaggttcataaaattatactcgaacccgactagtgaaatgctcgagttggtctggttgggtgacccgattgacttggtcaactctattaactttttttttagaaaaaaaaaaaactcaaaatctatttagtttttttctatatattaaattaagtaaagttataacactataatttatattcattagattaaaaattaaaaaaaaagtataaatttgaaatctaaaatacaaaatcaattttcaaactatatataatatattatatttataataaaaataaaaacaaaattaatttttttttatttttaatatattatatatgtaaaacaaaataaaaaaataaaaatttaattttctcttggtttgcgggcgggttcgagtctaacctaataactgatgtatataaaatgatgaaaaaggtaatactcaagtcaatacaaactctgttattttcttaaacatacctcatataaggtccagattttttattattcggtctagacagaaacatgtagtatcagttacttccaaatgttcatttaataaatccaaaacggagtttatactgacaaaactagaggaaaattacagttttacaaatattgggtacttatgccgctaaaaataaacattgggtttatgccgcttacaaacttaaaactttgggtacttatgccgctatttaccctaaaaaaaatcaacttacgaatcaatctgtgtatcgggttacacgcctaaacagagcaatatttttaaattttatgagttggctgggtcagatccgagtggattaatcgagtccgaatcaaccccgaccaaaatgttcaattctaatctaagccaccaaaagagtggaaacaacatgatctttttttcttcacaaactaaaaaataaaacctagctaaccaaccgtttttcttaccgttatagtgtgtctctttgtctctctgtgtataaatatacagattttggcgccaaaaagaaagcaaagaaacatgctcgaagcgaagagcttgagaaaggcggtggttccatccactcttatccccaatccatctcccgctaatctccaatcctctcgtctcgccctccatgtattcccctaaccctaaccctaaccctaaccctaacatcgtatctcactcccccctgctttaatgcttttcattccttcctcaggtctcccatgacgtttcctcatgtttcgtttacatcgcttccgattgccatatttacaagctccaggtactttaacctttcaattttcttgctttttctactttctatactctggaaatttgatttcaagatactcagattgtcaattgttgtttatttcattgggttcagattccactggacgattctttgctcagtaaaggaaaagaaagccttcttattcctatatacaccgaggtattgtatcatgatttagtgtttgagggttcatttttctcaatctacgtgtagtcttgatataggtgttgtactgcttatatgaactctttaaggttacgaactcttcgttggttaatcgctgcccacatcgttcagaaattcagagtatagtgcttgcagaaagtgagagtaagtcatgtttgaaaaatcgagttagtgacataatgtatgacttttagcgatttaactgaaatgaaatagaagctgttttcctgaatttgtaggcactggatatttacttttgggaagtgtggattcccatggggacctcattgtgtctaaattaggtgttaatggtgaaggtaagaattttcatttatcttatttaatgtaatgatattcttattcttctaattaagagctataagtactcaatagaatgtcaaatatttcttggtggttcttaatgaggtcttccgtgatgattatttttaaattgatcgaccttttctccaatgcctcatctttcaggaattgtctttgcaaaatttacgtttaataacaatctatatctagctccactcaaatgcaaaagcaaatgggtcaaaatatcacaataaagtttacgtcaattgataagaaaagagttgttaaaaaaacgacaagaaaagagaact

SEQ ID NO: 194592 - DNA, 1447 bp, Cannabis indica
gtatttttcaacttatcccctttctctttaatgaatcgcaaggcccatctcttgataaagcccacaaaaacaataatattgccacgtgtactctaaaatcccactataatttctcattatgagaaggcaaatccgagaaacatatttatttcttctcttcactccttaatttcaatacccctataatcctttctagtatcataaaggatagttgtaataggtgtgtttcgtgctagttcgattcatatttttagtactttttaaaatctgggtcgtatcgtgctggactgtaaaaaaaatatgtgtcgtgccgtgccatacaacaattttacagaataagctcgacgcaacccgtaagtggtaatttcgtaatgtgctcggatttgtatagtgttttattcgggcatactcgtttttcttaaatagaccaacctatttttttatatatgctcaaatttatgttttatatttttgcatttttattataattgagttaaatactaaaataagtgtatttaatagttttagttacttttatatctttttttaataatatttacacaccaacaaataaaaaataattataattgataaataaatatttataattattattattattaaattattgaacattttaatgtgttaagcttttgaactaatttattcgtgcttacgtgtcgtgtcgactgtggtgtctaaatctatatttttttgagtcgtgctgtatcgtgcctaaacacatattttttcatacccaatcgtactcgtactgtgtcaaaaaatttagcccatatttataattgggcctttaagcccatcacttgataaagcccacaaaaactaaatgtagccacgtgtagaataatgagtggtttgtaagctctgcaatctgcatggtcatgagtaccataatgtagccagtggcaagcaaattgcaatctcatggcaacaccaaaccaatcctttgggaaagctaagaatgtgtttgtacaacaacaaagtgtggctgtccttgttccacaccatgccttttcaaaaacccatatttgttccacaacaacaacaactctcctctcctcttcttcactgtaaatcactcatctttctcttttctctttccttagtttctctgggcaatggctactttacaatctcttgctttctcttctccactctctcactacattcatcatcttcaaccaccttcttattcaggtcagtcttttctcagtacattgtcttgtggtttttgctgatttcttttttagctcaatcatgattattttttcaaagtttaattctttttgtgcaaatatgagtataggagtcaaaagggtaacatgagtacttgtaatttggtttagattgtaaaaggtttaaactttaatgttttcttggttgtgggcaactgagaatgattgaatggtttctttttaagcaactt

SEQ ID NO: 194593 - DNA, 517 bp, Cannabis indica
ggggggtgaggggtggggggcaccataacatgggttgatattattttatatgggttgatattacaaatgtactccattttatttttgaaagggataatgtattccatttgtgttagtctttcaattgacttatactaattaataaactatgtggtgttaattttattggaccacatatatttattgttgatttcaatgtaaagatggagacaaataatttctagatccgttgtttaaattctagccatatttcctaattttgcttttgtttatgacatgaaacaaccaaattctatctacttatcttcctactagctagctacttgatatatatatcaaacataaaattaattaggaggaatatggtttgtaaattctcattcacttatttttaatcaatcaattaattcattacattatttaatattgttattattattagtttgaaaaactgacctcattaaaatttgttgagtgaattcccatcttagaattatatttgaccattaataatggt

SEQ ID NO: 194594 - DNA, 2272 bp, Cannabis indica
ttttttaaaaaatacaaattttacatgttagtaatttattataataggtcatagaaaaatataattgctataatataaccattaaatagtgacttattatatactaatttttctaattatttcaattattcttgtcctttctattgatatataatatgtttggtgaacttaaaccaacttgcatataatgtcccaaagaacacatgagttgatcaatttcatatttgaacttggagtgtttgttgttattttttgcaatctttatataaagtcaacttttttttgctgtaaagtcagcatttttagttactttggcaatttagttggagtagtaaagtcaaattaagtcaccaaaatggtaaaaattcaatattgattccttaaatatgttgttcccattaacatatgaaactaatttaagtaaatgaaattttagaggagtacacaatgtaatcctttatataaaaaacaaacaattgatggtttgtaaaagttgttcaacagtcaattttaaagtttgaatcattttaactctgatgtacatttttttaagaaattaccccgcaataaatagacaggaattctctgtctaaatgagaaatgagagaaaaattattttttatccctaaatattaaacaaagcgacaggaccgaccctaaaatataatagatcataagaaaaaaaaataggcatttatttagaaaaaaaaaaatatagtactttttaaaatcaataaaaaaaatatgtaactttaaaaggggaaatttttttgtgggtcctaagcacatgcctagcacgtatatgcccagggccagatctgcgggatagggacggggatgacactcctcgtccatcgggggactcgcttaatattataagtattagtttattaatattttatattttacaatatgtgtttgtattttttagtatattagtgctttttttttaatttttaagttgtattttgtataataattaatatattgaataacaaataatgtgtaatattttaatttttatgtaatttaatattcttatacatgtaaaattttaaaataaattttatttttacattaaagacttcctcaccctgtctccaccccattaggggattccttgcctcatcttcgataagaaataaacggggataggaattaaaattcttaacaggaatgggaacgggaagcatttccaaccaatttctcaccccgtgtgcatccctatcctctataatagagattcttcaaaaatttgaagaacaaatgagcaaatggtcatccaaatagatatatctccattttagagtaattttattttctctaaatacgtattattcctcctttaaacatattttaataatatttaaattatactttatttatttttattatcatgtattatatattaaaaaaatacaaaaaaaatctacaatgcacttcctaaacaaggtctattgatacatcgcttatctgtttcgacatctgagagaatattttagtctaattttttatggtcgtctacgttgtacttatttagaatttcttgaaaaattttgagaaattaaaaaaaaattaaaatggtaaaaatagggttcaaagagtctatttcacacgcgtataaaataaaagagtctcatgtgcaacagatcgtttgaaccttattttcggcgtgttaaattttttccgaatctctcaaatgtcgaaataagtgcattgatggacttcttttaaggatatgcattccttatagaaaccgatagatggtgtgctgtaagagtgagatgtaaactaaaaataaataatattttggtcatgtattttaaagatagggtaaagaaattgttggatgtgatttgaaaatttcctaagaattaaagttgttaataatatatttaatgtattagaaataaaaagattttatgacatttctttaggtgaaattgaagagattcaaggtgtttgcatataaaaagacctaataaataagaaaatttacactaaaaactatattctaaataaaataacaataatatggtcggccgaaacattttttatttttatttaaaaagaaaagaaaattttcttaattttatttatttttcgtaatatatgcatgtgtaattatcattactggttttttttttaaaaaaaaaacaaaaaatttaaaattaaatgcatttttagttagcatttgggttagttatatttttttttttaaaaaaaaaacgttaaaaaaaaagtaaaagaagatttacttttaatttttaac

SEQ ID NO: 194595 - DNA, 1969 bp, Cannabis indica
aaattggataaatgctgtaagagcatcagacttggattttaggggatatatccatgtgtatcgactaaaatcatcgataaaatggatataataccttaaggttgtattggacatgactggggctggaccccagagatctgtatgcaccaaatctaaagcatgcttggctctgataccaagtgaagaatgcagagaaatagaatgcactgaaatctcagctcaagtggaggctgagtactaatcattgtatttataatgagggaatgaaaccatgatgattacagcagatggtaaaaagagaggacagctggtacatgaaataacagaatgaataagacaaaatagtacaccagaaacgtggggaaaatagatgcaagggcagagtaagagtaagagcagtaaacacactaatcctagattagctattctaaacatgtgttaacaagtgtaactaaattgtccctaatatcccaatataatataatataataaatacagcccttcaattgttctaagcatacaaaaaaataataataatattaaatttttttttttgaaaaaaaaaagaaacaaacggatgaaaaaatttagtaaattaatgctgaaaggaggaattattttcaacgaactatctacgagttgttaaaatggaattcgaaagaaagatcatatataatataataattaattaattaattaatcatcatcatcatcatcgatggaaacttatattaagttgactaaatcacttattaaacaataatatataatagcatatgtatgaaacgaagcatcactttcaaacctacaacaagtactaatatagaattcgaaatatatattcatcaccacacatcagatctgtcagttctgtaatcttggaagcaaattaagcttcttccaagtacttaggccctatagctaattaacagatatactcaatcaactattaatttaattatgttttaatttataaataataatatatataagtggacattaatagtactattaattaattgctaattaaagacgatatacataacaataattccctcacaaaatgctatacatatatactgcaatatgtacgtatacagtctggtttttgtgatcttttcttggagctaccaagacctagatcttgattttatatccataacaaaattaattaaggttaattaattagttatagatatatgcaatcggagggaagtttagagattatataaaaatatgattatcaaatgtaaaattgaggccaattaagaggaaattgagttaattataattacgagctacaaagatctgaacgaaaagaagagtaattatatatatatatatcaatataaattaatgcagttaattagcgaattattcagttggaagagatgaattgtacatgtgtgtatatatgaatatttatatatggtgtttttttaatatttaattagaattatataatataataaagattgaggaataattaaacctggtgatgatatagaagtagctaaaaagtgggatttaagtaatcaatttatatataaactcagctcatgcaatcttgatcttcttgtttggttgatgaaagaaatctagaaattgatgatgatgatgacgacgacgatgtctctcagtaatttttcacagttttcttgaactgtgtaagaaattccggctaggcgaggccctttaatttttacagttcaagaaagctgtggaagatcacaaagagaaatctttactaaatatctctcaagatatataatgaaaaataattctcaaccatcaaagtatacatcaattgtcttcatcacgtgtgtctatatatacacaagtgagagtagtcagatttttaaattttcaaaaaataaaaataaaaataataaaggtagagttaatttttaatttacaagttaaaatttggtttttttttaatgtagtgggccgtgctgatatttttgag

SEQ ID NO: 194596 - DNA, 2049 bp, Cannabis indica
atcgtttaccatttttcattgaattttcttcctgggtttgtttgatttttttttctttctgggtgtatttttcaggtctctctttgacagaattttgttgaatttgatccagtagaagaggtgagtctcataaaaatatatatttttttttctgggtgtaaaatacccgtttttaatagctcactgttgcatgtatttttcggtgaattggcttgtaaaggttttgtctttgtgaaaatacagctgattccagatatattaaacacttgtttaaggatttccgcttgtgggtttttatatttatatatatagaggttttaagatgataacatggtccaatgtggcatcttcattgttgtttatcttcattctttctcactcatttattgttttatgtttttgcaaattctgggttggtagaagattgtttcaaaatgcatataactcctaaacttgattagtatgagactgatttggttttgtttttgtaggtgtttatattggctttggtggtgaagatgataaactaatttatatagaattcattgaaggggctttttggaaaccatgttatctattcataagtgtagattctcatggtctctgattgcaacaattgcctcaattgtcacattggtttcaattgtccatctcttcttgtttccattggttcctacattggattactttaggcaagctcagatttcttgtatcccagttaatgaatcggttgaccatgtcaaggaaagttttattaatttagatcatcaatttcctactgacttgcataatgctgttgtttatcgcggtgtcccatggaaggcggagattggacggtggctttctggttgtgattcaattgctaaagaagtcaacatttctgaggtgggtgactaaaagttctttaatggtacttattgcatgaaagagcattagttccattagttcttctgtgaaatataacccctttaaggttggattgaacttggcttcccttaacagtttgtctatttggtagattataggtggcaatgcctgcaaaaatgattgctcaggtcaaggagtatgcaaccatgaattgggaaagtgccggtgcttccatggatttggtggtcagtaattcatttttttcgttctaaagtgtatatatacataatagaaaacttttcattaaacagactagcattgattgctcaactgtaatttctatgttcagaaatgtaaattcaattgaaggaattaattcaggatataatctttattcactttctgaaagactactaataatgcaggagaaggatgctctaagaaatttaagctggcctgcaactatccggcgataccagattttccatatgggagatgggttgtctcaatctgccctgctcattgtgacacaacaagagctatgtgcttctgtggagaaggcacgaaatatcccaatcgtcctttagcagaggcatgtggctttcagcttaagtaagcatgtcagatccttatcactattagctttcattattattggttacagtacataatatgagtaagaagaaacgattgatatctccctcagatcaccttctgaaccggatggtcccaaactgactgattggtcaagacctgatgaggatgtgttcacaacaaatggtagcaaaatagggtggtgcaatgtggatccagctgaagcatatgctaacaaggtgaaattcaaagaggaatgtgactgcaaatatgatggtcttttgggcaggttctgtgaagttcctgttctaagtacttgtatcaatcaatgttccggtaatggacattgccgaggtggcttttgtcaggtaactttcttcttgtttttgcagtgcacatattttcattgtgctcttgttttagtggataaaaaactttgacataaagaatagtgatttatataaatgtgtggtcatgaacaatgagaccaagataccaagacaaacaatttagaatgagtattgttagcttcgatcttcttgtataattggggtttttctttattcttttttgttatgttccagtgcc

SEQ ID NO: 194597 - DNA, 748 bp, Cannabis indica
aattttcattttggttaaatcaaagagtttttcatgaaaagttcaaagataagaatttaaaaaatttaaggcaatcttcatttctacaattgaaagaaagaaaaaacagagtaatcttaagtatcaattgactcttaaccaaaaaagactaagagagctttcaatggaaacttaccctgttatatgcattgatatcaaggccgctcttaagaagatcagaaatatcattctttaagaatttctgaacagcatttctcttcttctttatggtctccagacgtgtcttaatgagctttgtattcgttttgctacaattcaaaagacccagaaattgaattatcaatatatattctacaaaaacagagagcacatatatttatatatatggggttcgaggccaaaccatttggtgtaaaacttgggcttcaataacccgtcaagcattttgttctctgcaaaattctgactttaccagaaaacttaattgaaatatgttttagaaagaaagatggcgcctttactttatgcagaatagtaaagagaataaagattgaacatttgtataaataaatttctttaaactactatggtaacgaaaagaatgactgtaagagcaaaaacaggaattgggtcacgtcaagaatcagcattgaagaaaacccagaacgaaagaaaaatttacttctcttggagagaaccaattaagaagttggaatgggaaaaaaaaatgggtgaagcttctcaatat

SEQ ID NO: 194598 - DNA, 1972 bp, Cannabis indica
actcattaattggttaagcttatttttaattaggatgtagatattaatatagttttatttcctaattaaataaagtgatttggcaaaaataaaataataataataacatataatacaagcttaagcaatagcatgtggtgcataatatatatttatatagattagttacacgtgttagtgttaatataattttattaatataataataatgtgccctagatcgataatgtacaatattatgtatatataaggatgatattggagatgttattgtatattattacactaattaagtagctcgagatcttcaaaatcatacgtacatctagagctaattaagatttgaattattagttaattaattaataatggaatttaacagctctcgtttggttgtgccaagtgttcaagaactggcaaaggatccaaacatggtgagcatcccatcaagatacattcaacatcatcaaaatagtcaatcaaataatgttatcaccaattctgtttctcttgatgatcaaatcccagttatcaatttccaaaatctgtttcttgctgatgatcaatctgaactctctaacctccactcagcttgcaaggactggggcttcttccaggtaattatctatctagtttattttgttgcacgtacttaaatctttaagtaaatttttagtagcaaaaattcatatgtatagttcatttctcaaataattaatatattttgcatgcatgcatgcagttggtaaaccatggaataagtgattctttgatagagaaagtaaagaaaggaattgaagagctgttcaatttgccagtagaagaaaagaaaaagctatgccagcttccgggagacatagaaggctttggacaatctttcgttttcaccgaagaacaaaagcttgattggaatgattacttattgattttcaccttaccacttgctttgaggaagcctcacttgtttccaaaccttcctaccactttgaaggaaagtttggaaatttattcattagaactggcaaagcttgccagagatctaatttgccagatggagaagattcttggaatcaaaaacaacgaaatttcaaatttatttgaagatggaatgcagttttatagtatcaattgttaccctcgatgtcccgagccagagaaagttattggcctcacccatcactcagatgggggatgccttacctttctccttcatgtcaaccaagtacaaggcctccaagtcaagaaagatggcatgtggctccctatcaaccctctcccaaatgcttttgttgtcaatattggagatatactagaggtaatctaattaataatatatattattattcatttattgtctaattaataataattttatttatttctttattttttcagattttaacaaatggaatatatcgtagtattgagcatagagcaacagtaaactctacacatgaaagactctctgttgccacattccataatataagtgtagattcaatgataggcccagccaaaagcttgatcaacgaaaaaaatcctgccctatacagaacactgccaaataaagaatatttcaagggtttattttcacgtgagcttgatggaaaaaattacattgattctatgaagctataaaatctactcaagtactgatgatcaagctaggagtacttatatgtgtgcattgtggggtttattaagatatttgctttcataacttaaataaatcttcaaccccccatcatgaatttattttatttaattttattttttctttggctataagaaccatgtatgaaataattatcgaggatacattacaatatggtatgctaccaaaagtaatgtctatgcccttgaaatcccttatgtaatatgttattgtttctcattaataatatgctttgctactagaaaatacctatgtctttagttttttcgttagtaatgttctattttttttataaat

SEQ ID NO: 194599 - DNA, 2495 bp, Cannabis indica
ttttttaaaaaaagaaaaaatctataagtctacatagttttgaacaaaaggacgctttaacaaatttgtgatgtttaacgacgatgtcataaaaacattatttttaagcgaaaatatcttattgtaatacttaacgatagttctatgaaatgttgacatagaaatgataacgatagtttgcaatagtctaggataaaatttgatgaaaattgtggcgacataatttttcacttgaatgtcagttttatggcttttttttgtttaaattttgattttttataatgatctaaaactttagaatgtgtaaaaccttaatttggagtaagcataataacaaatttcaattattgcctcaaacaatatattttttgttctacacactctaatttaagcatctaatacattctaaacgcgtaaatttagaaaaaaaaaaaacttaacaaagatagaagttcaagagaaaagttttttttttttaaacaaacgtccaacttatatatataaaaaaacaaacacaaagttaaaccatatggtcattacaaataatatcgcctggaattgaagaaaacctcaataaatctagtaatgttccttgttaacacccatttagcaatattatgagcaacaaaattaaatttacgaggactcttacaaaagttacgagccaaaagtaaattaaagtatctcttacaatttgtgacatagttactgatttcccatctaaaaatcacctcattgatagcattgatcacaacttcacaatcactttcaataataacaaaagagtaagccttttgaagcgacaatcctcaaagccaactcacaagttgttaactccccaatgagaggctctttgaactctatgatctcggtgacaacccacccaatctgtgtacaattgttcctagcaatagcagcgatcatcatcttgcctcagcctaccgcagcatcacaattaatcttaacccaatataaaggtggggctgtccaatcatcaacataagcagaagttggttgatgctagccattgttaggaaacaaattatcaaatttcattgcaaaatattgttaaccattatttttgcgtcaaaaactaaattttcatgacattatggctagacatcgcataatcatcgacaaagcattataaaagcatcattttgctcaaaaactgtacaaatgtttctgaattttttatatatgaaaaagcaccactaaatcaataaattattatacataaatatattagaaatatttaaattaagaataattagtaattttgtccccttaaattttcgacactacatgattttacactctaaagtatacggtttgttaaaaattttccctaaaatataacagttatatatttatgcccattctattaggttccgttttttcaaccgttaaaaattagtatttttaccccttgaactttgactaatacaaaattttgtcccattacttttaaaaaaaattaatttaaaaattataatattatattaattttgaaaaattattaaaattattaaaaaaaattgataaaaatattaaattaattaaaaatatattaattttacttaaaaaaaacttaaattatttctaaaaaaataattttaaactttattttatttctaaacacgtatctcaaaaaattaaactaaaattatcgagaatccaataaataatttaaacaaactaagattttttgaaggaaaaatcaagcttatttatatttataaatgcatatattaacaaataaagaaaaataattaaaaattcaatgaaaatataaaattactttgaaaaaagttaaaaattaaactatttttttttttatgtttacttaaacaaatgtacatttttttgagaaaaataaatagactcaagtttgtttccgtaatttttttttacaaaaattgagttttaatatatatttttaatatctaaatgatttttaaatcgctttattacttttaaaattttaatttcttttttaattttcttaatcattcaaaataatttttttttttttcaagatctaaattaatttgttaagatttatttaaaaaatattgaatcttttttatttttattttggagcgggtacgatttgatagttgtcaaagtttagggaaaaaagttgctaattttcaaagatacgccagtatttaaacagaataatgagacaaaacctaacaaaaggactaaatttctgtaaatgtaaaagttcagggagaattcttaacaagccgtatattttaatgggcaaaattagtattgtcaaaagtttagggggcaaaattactaattattcttaaattaatattttaaatatgggacaggattggtagacacattcttttaacgtaactttttacattattttttgaccatcagatcaaactaaatctaagcactataattaaagcataaaagtcggcctagtttgcacgacttcctccctcattgatatttggctaattagtaatttt

SEQ ID NO: 194600 - DNA, 961 bp, Cannabis indica
ctctctctctctctctcttgtgcaaataagtcagcatcatatcactataaatgaatgaattaatgttgcttacactagctaattggctgcgtcgtatttttgatgtcctcaactgcttggaagcaatcttcatgtcccttcaatcactctcaattttcttttcatgagccatatatcctactttttttactttttattttttttatttaaaattaatttcttttctggtgagggtcattttgttttccgttgcatgtcatttctatgtgtttccctttctttcattgtcaagtgaaaattcttaagtggtttgaatatatatgtgatttgtgactcacctgacaccactaacaatgactttggaagcaacaattaatctctttgtttattattatgcctctttatgctctgcttttatcacgttttgtattgtgcatatgctattgcatgtgtgtgtatgtaatgttcacatttgtgtacatgtatgtaataattactccaggagagtaaagaaataaaaagagagagagagagagcgagagagacagaagtttatagcttataaagaacatttttactacttactaagtatgttgatgcttgtgtttgtactactaacctagcttgtgaatatttgagaattttacttaccttaagatagttgaaaaattgtcaacattaccatagagtgaccaaaaaagagaaaagttataaatcgtatagtctaacgatatacttagtgaatccataaatgaaaagggatgccgtcagaagattataatggcaattaactcattattatactattttatcaatatgacaagcaatatactgttgattattattattgtatagcatattttcagtgaatggttatgtggtctacaatatatcaatgacatatctgttattatattgtctattagagtagatagcaattgagattgagtagtaacttatg

SEQ ID NO: 194601 - DNA, 1161 bp, Cannabis indica
atagtatttaccctatttataaaaatatgagaaagaaaagataagttggagtactatagttacaattgaatattttggtttggactgagtttaaagtccaaatatgtaaaaaattatgttatggcaactaatttgaactgagtttagagtccaaatatgtaaaaaattatgttatggcaactaattaatatatgtaattatgtatgtgtgtaattgtggttataatgaattgcgaagttattgatcctcttaattttatttgaagtcatttgttttaggaaaacttatacaaataataaaaaatggttgaactttacataaatactgagacacggtatattttacatttatactgttcaagtttgatttattaatttttattactgtgttttagtccaaacaaaaccaaaatctcttaaaactcagcaatcacaatcagcaagcactaatcaaccaaggaatagctacaaacaatcatatttttcggtgatacaaactagaagccttcgaagttgatgtgaatcagcaacaaaggaaatcgagaatactcagaaatcaaagaaaagaaatgagtaactgaaactcacaaaaatctatctaaatagatgaacgattaagcatgatatccaattgatatatgaaattaattttaaaaacaaagtgaatcaatgaaaatatgatatatatatacatatattcatatatcgattacaattttaaaattgggttttactaaaatcatgcacaaattgtatttgtagctattataattcttctattaaaatttcttaagatcaatgttattttagtgttgtttggggttaataaatagattttcacgataaatacataacaacaatgaaaatgaggcattctagctgatgattttttttaaaaaaataacactatatatggttgttttgtagtagttctactgttgtttttatttaaattgagtcattgaattgttactgtattaaaaaattgttatagaacacgaaatctataccagttctcataaagagcaacgagcactgggaagaagaaaagaattatgttgattatgaagcgaatggagaattcataccaacagactgtaagtattaacaattggtgtaaatgctactagtatcgttgggatgcgaacccacaacaacaacc

SEQ ID NO: 194602 - DNA, 1110 bp, Cannabis indica
gaacaaaaaatcagttcagggttcttatttgtactattttgaaaaatacaaggtcccttttatcatttaataaatagatggtccaattaataatttttgtaaaacacagggtctaaaatggtattataaattcatatcttactattattattaataaattatagtctcttttaatatgtcgtgccgaattttttggcttgttgtgtgtcgtgtttttcgggctagtctattcgtgctttaatgtcgtacatttcgtgcttctcgtaccgtgtcatgcttaaagacatattttttgcatcgtatcatgccaatttgtggcatcgtgttgtgtcgtgaccaaactcgtatcttttgtacctaatcgtgctcgtgccagtttcatgtcgtggcaaaaaatctgactcatatttacaacactattttatggctaaacatcaacattatttttggtagatttatttgcttttatcatataaatattgaataaaactaaaactaaattgttctgagtatttaatttaattattttaaaatagtattatttcctaatagttttagtagtagatattaattgaacacataaactaatttagctagattttatgcttgaattttgaggatataatgaaattacattgctagattactattggtaacttactactaataagtatcatctcaaaagaaaagaagaagaataaactaaaaatagtttggataccaacaataaattatttatgatattagttttttttttattcaatatttatgatattagttgaaaacaaaatcacagtatttttgattttttttttttttgggttaaagatttctaaattaaaattatatatgcttagaacagaaaaaacattgttttttcaaactatataactttatttttagatgattaagactatttttgactgagaagaaaagaaattttgttaaaacaaagtgagtagaaaataaaaagaaaatacacgttttataagtgtgaaaatatgataggagattaagacaaattactcatgatgttgaaaattagtttaacaataaaattgtaattgaacatagattttttatactaaaattgttctagtaaaaaattac

SEQ ID NO: 194603 - DNA, 946 bp, Cannabis indica
acttttaatatataaagataagagtgtgtttcgatgagagtaatgaaaataaaaataaatgatgtttcattcattttttattttttttatttattgtattttaatagaatatttttttactattttggggaataattttttcatttgaaaataagaagaaagattatttcaattcattgcaaggtgaagaaatatacatatttttatccatattatattttacattgttatttttcttttgaaaaaaattaaaaaaataaaatatcaactatatttatatggcaggttagactagagtgaacgaaaagaataagataaaaaaaaaatacatttttaaaattatttttaattaaattataatttagaccaattaaaaaactaacaattaataaatcaattaaaattacgactaacgaacttaagtatcgttgatgctatttttcgaatggtaatgctgcaaatttctcatattattataccctaacacaatatagtataagattatattttgttggatggaaaggagaccatatgatgagaagaaagggtccaaatactccaatgctaatggagtggaaaaggtgcaaaacaaccactttcttctattgttttgtgctttcacttgtattttaactaaactacataaaagcctcactttatatactgaactcgagtattaaccggtggacctacttcttctcttctgttccacaatatgattggaatgaactgaatccaatgtaaagaaaagttgaaagacttgattcttttttctattaacaaacaaaattttaacatatttgatagaaaaacacaattaatttatatatctaatattatttgagattttcaagatattgaaaagacctctgcacaatattagaatctcacgaaactataaccattgttatttaagtacaaggagattaccccaacgtaagatttt

SEQ ID NO: 194604 - DNA, 712 bp, Cannabis indica
acttctagccttctttgagaaggtgaaaggcatcctacacccccatctagtcttaaacgtaataaagggtgtttgctgttctcgacatatgcccttgttggctttggcgattgatagggatcataatcataggtttgatcaacacatcccttaccgattctcgtgtttcaataggatttggtgagggtgatgttgatgttctcttcctacctcccattgccttcctacctctcagagtttgagaaattggtgttacctcggtttcttttgcggaaataaccatcactgaagaaatagtagataagaaactcaggatggactcaatcagacacactcttggccccattccttctgggtaattatgggataaccatttgttgttagcttccattttgccttaacaacctttacaatggacctttttattcccgagcttgcctctttttgaagtcttttgcagccttgcctctcaaggcttgcgcaatcttagggacatctttcacactttttccttttccagtctttttagctggtgtagggttcttcacattctccacaaatttgggtaccctgcatgaaatgggtgcccgatcgatagagaatactgccaggaaactattctttttctctccttggcaagaagaggtcattggtagtttgtggaagtagactgtgacttgcgatgccatttttcctgacaaatgtaaacaaa

SEQ ID NO: 194605 - DNA, 1490 bp, Cannabis indica
attttgttctaaaacttttaagcactcaaaattatccagggagcttttgaaactggggttccaagtcagagctggtgtgaggagtcctgaaagagcaaaacctctagtagaagtacatgtttgattggtgacatgagtatttttctactttcaaatttaaaagtatggttttgttcttttgtttcttgttatgctgagacaatatcttatctgcagagtgtaaaacaaatgaagatggaaaatgcaggtggagaaactcaatgtaagcaaagttgaaattactagtttattatcctgtacttgtagtatgctcctgtagcaaataacagctactttttggtctgtagcccagttgtagaaaagcttgaaatcgtacaatgtgacttggagaaaaaagatcagattgtaggagcattaggcaatgcatctgtggttatctgctgcattggtgcaagtgagaaagaagtttttgatatttctggaccgtatcgtattgattatctggctaccaaaaatcttgttgaggctggtaagggatattatttttttccctttttcttgaaagaagcatgagttggtcaccccagcatgggcaaccatagtttatttctagtattcttagcagctatatatagcttgatagtgttcaggaaacgaatagtctcttatataagttaacttgtatgaaatttgagcaagccttgatgtgcagcaactgttgccaaagtggaccacttcattttgctaacatctctgggaacaaacaaggttggatttcccgcggcaattctgaagtaagcaaagaagtttccttttctccttacttctcatacctacatagcatttttgaagaaactttaatttaacaatatagaatctgccaaattttgattgatttactgaatgtcttttgcttataaagtttattttggggagtgctactatggaaaaggaaggcagaggaagcactgatagccagtggaattccctacacggttagtaacttaaggtctcagtagcagaagacttaattgtaagcaaggtactgataaaatggtaatctctcagatagtgagacctggtggaatggaaaggcctaccgatactttcaaggaaacacataatacaacactctcgcagcaagatacgctgtttggtgggcttgtgtcgaatctgcaggtgttcttactgtctgtgctattgtattttaggcttgagcatcactatttacttttggttgagaaacttgaagttcatcctctaacatctacatatatgatgttcaattacttaaacttaggtggcagagcttatggcaagtatggctaaaaatcgtgatctgtcatactgcaaagtagtggaagtcgttgcagagacaactgctccattgactcccgtggaagaacttctgaaaacgataccatctgatcgacctggctcattcccaccgaaggtatctatactcttttcttgtatggagatgatgacat

SEQ ID NO: 194606 - DNA, 993 bp, Cannabis indica
aattaattaatattataatctattttggtatcatccaaacagctctttaaatttctcgttgacgcgatgactttctatgtatcatattctctccttttcggtacctaacaacaggatatccgaataaatcagtgtagtttcaattccagtagcatataataaggcataataataaatatttcaagtagtttcatatcaaccactgattacatagtggaagtttcagagaaagtttaatagtatttgagtaataaattaagaacttacatagtaaattagaaagctttgagatttcaagtttactttcatttggtgaaattgaggaggtgaatgtagacccagatttatccagaaagttaaggttcggtagggtctaggaaccaaatgggtcaaataggcagcgtatgggattatatggttatgtgccccaccaacggagcaatgtggtccacatgttggcccagggcaaggtcacctcatcaccatatactggaattggaattggaaatggtatcagcatgactaggcaaacgcattagtacaaaaatttaatgacgacacttgcttattacctaacgcttttgggagtttttgaaaattgtgagcctattatataagtaaaagggtccttatgaaggttagattagacctaattactataattcattgatagataattggagttcatagttgtcttttattgcaagccaaaaaggccataatatgattgccagctattgatattatttaaatgctatataattagaaggattatcatattttatgtaagaaaaattacacaaaaattttttaaaaaaattatttttatgttttaaatttttacttacaatttttttttaggtaaaataataaattattttttatataatttatttatagttatcataaaattattttttaattaatttataattattatgacgttaatttcttattttttacgaataaaatataattttaaaactttaaaat

SEQ ID NO: 194607 - DNA, 1532 bp, Cannabis indica
ataaggaccccaaaactaaaactggcacacattagttgaaaggtctgaaatagaggttaaaggggagataagagaagtttggctcgcctttttggattgacgacactttgggctcacaacggatcacaaacggttctttttatggctcatatttttgaaccagcggctttttaggctcataacggatcacaagtggctctgataccatgttagaatttaggataagataaatgagattctatctcaaaactaattggtaatgggaggagtagcccattcatcttatatatgacaatttatttccacacattagcaatgtggaactaacactaatagtttctccacgtgaacttttgaagtttggtaaaaggatacatgttgttaatcataataactaatcaagaataaaccatgattcttcaattaccttgcataaattatgagaaaaaatatgaactacaaacaggaaaataaaactaatactatgtttttaactaataaataaatctaaaataatttctaagaaaaaaaaataataattatttcaatttctttacataaattcagagaacaaaaaatataatttaaataagaaataaaatttaaaatcgagaattctcacaaatagtttaaatctcatcatacttatcttcaacgttgaagccactccccctacccaattcaatctacttctctctcaaatcatcatcatcaacaaaatcaactctagtctagaatctcctgctcctattcctttgcctcaatattggatttggggttttcagcttgaaccgagctcagatggattttgagtattgagttagaccaaaaacggcataaataacattgcttactgttgagcttgagattgaactgtaactggggaattagagaactgctagtgcttcccatctcaatctctcattcaattgatttctttagcaatgaaaaaatttaagcatgtcaatagagcccatagcacagagaaaacaataatcttacaatgagaaaaagaacaaataccttagtctcgcactcttccaagaagaagaagagatctgacctttcccaccaccagagtcctagccacgagagcttcgttcgtgcccatcatcgtagaactagaaaggttttttttttttagatgggtgctttcattttgtctatagaataatttttatgtagaggagtgatgatattcgagttttggggtagtttatgatggctaaaggcaaagaaggtgagagagactaggtgagattgaagaagaaaatggttaaatgagtggagaagaagaaagcttttaggatttattaggtgtgcatagttggcacgacattgacgtgcctaattttctgcatattttgtgcaaatagaaaaaaaatatacacaacgtgatagatcatcggggccgacatttatcgtgtcgaacttgttgactgggaaaattcccgccacttccaacgtcatttttgataaattgagaaaaaaacataggcacaacagtgacagtgacaagagaccccttctca

SEQ ID NO: 194608 - DNA, 1143 bp, Cannabis indica
gaaaaacaacaacaaaaaaaaactaaatgaaaaataataatgaaaataatatctaaataacatcaaaacaacaacaaaaaataacaaacatacaaataacaaaaaaaatcaatactaaattaataaaagtacaacataaaataaccgtaaataaaattaaaaaaatcgtaaaattattaaaaattccataaaatcttatttttataatttttttgttacttttgtgtatttgtgaaataattccaaaaaaaaaaaccctaagctcataaaatccaacagcaaagatcaaaaaaccacgaaacaattaattaataaaatacacacaacgagaatttagaattctaatgcaattaaaaaaaaacattaaacaacaataaaaataataaaacaaacatcaaatagacaaacaaatccccataaatagtctaattaattaactaatattaagagaaaagaacacaataaaataaaaatgaataattaaaaaatcagataggaaaatagaaataaaggatattgttaattttgtatactcgaccgacacatcaactaaaaaaaattaaataagtgagaaattgcaaaattcaatttcttggtcaaatgtgatattttttaaaacgtaagagatcctataatttttcataacaacaaccaaaaaccaaaaaggaaaaaaaaaaaacatatgcataataaatgatgtgttgtatgtaccatttatttcaattaataattatgtgtcacatgtctaataaattttcaactgaaattatgaagataatttaaaatatataatagaaaaatgtatgaatatgtgaaatgtcaatggccatatctttaagaaaacttttgacgcaaaagaaagaaaacgttttggtttatttactagttcatgtatcatgcacttcatcattaattaaaagtctttccctcttttataaaataaaaattatatatatatatatatattaaaaataaaattcctatacaccgcatcacacatggataatttaaattaagattataaatttatttatttatttatttattttatatatgtttaatcataccaaaataaagaataaacagaaaatagtcaattaattttttttttcttaaaaaataaaaatcaaataattagtttcc

SEQ ID NO: 194609 - DNA, 1560 bp, Cannabis indica
  modified_base (5)..(5): a, c, t, g, unknown or other
agggngggggggaatttgatgagaacatagtactccaagctcaagaaaaccaataacacaatggcctaacagtagccaaatattgaatatatgagaataacaattatagacttatgagagctcttaggccccccttagatgcaaagagttttactcaatacattgcatacctcctttctaaccatactctcctacatatagtaatttctcattcaaaactactctcctaaacaaaaactcaaatactttttttatttattatatgctagcacaccatactaatccatagtgcctaacagaattcgaagtagctatgggatttaatactctgttagtattatttggtcactttagtttaagtttcgtgtctcatttcctctcctttattggactggcctctctcttttcagttcaccttttagagtgattacaacagcgggtaatatgctcgttttgtttataagcccagctctttttgcacagctttgatcatttttcaggctgctatttattgtgtgtttttgtggtgtgctgtgttgtgggggaaatataacgttttggtggttgcttctggttgtaggcacaatttcaaaaggtgcagcccttttacaccaagagggggctcgggaagtgtacgcatgctgcacccatgcagtgttcaggtatctacattttcctttttatagcttttaacctttgcattgactcttggtggttaaggaaacactgaaaatttaacttgtgcacactcgttaatcttcattttttttttggagtgacagcccgccagcaattgagaggctttcaggtgggttgtttcaggaggtgattgtgacaaacaccattcctgtcccagagaagaattactttcctcagttaactgttcttacagtggctaacttgttgggcgaaactatttggcgcgttcatgatgatagttctgtgagtagcatttttcagtgaaatcatataaagaaagacttgaaggcattgatagcgataggccactccttttatatttaatccctcagtgaattcattctctcttggtccctcccaattatcttgtcccctcttttcttttttaatactagagaatagagatattttaataaccacatttgcacacacagcaaaatattaggctatgtgttggtcagattgataagagtttaaatccattgttttggtaagaaagaaccaagagagatagttggtgagacgaaaggtgttgggttgggatctttgtctaccatatttaattcttttctgattttttctccatataatgaaattttagagttaaatcaactttagtttttatttttgtttttcattttcttttattttaatttacagttatgtatatattttgataataagccactaaaatttacaaagagaggaacttaaaaaaattaagagaaaagttaagaacactctaagcatctctaatagaagcaacacttatagttgtcaaaatatatatcattctaaaatatatataaatcaactttagttttacatcatattgaattaattacttttaaggtgaaaaaa

SEQ ID NO: 194610 - DNA, 1170 bp, Cannabis indica
aaaaaaaaaaattaaaattattgacatggctgattatatgttgtttgaactttgaaaagaataaatagaccttttaataataataataataataataataataataataataataataataataataataagagaatatacataaattacatatattttatttgggtatgagagatttaaatttatgagctttctttgtgaggaaaagtgaggaattattaggctatggttatgattaaggatgcagccagactatccattgtaattaaaggttatgttatgagtaaatcatgagtcattcaaaagtgagaagtggtataattatataattatggatttattacatgttagattactcaaactgaataagatctcctgttaaactaatctaatttttattaaatatgttaattaatgttgtttactttattattagaggtttaattttttataaataaaaaattaattgatgacctgttaaattttaattggtttaacataatgtaataggagatgttgattcactcaaactctacgaccaagagaataattagagatagggatgtcgtttcgtcatttcattgtcgtatatgaaaaataccgtacgtggtttcatttctccatctctctcacgcagcactaaccctaatcctcattcctcgtcactctgttcattgttttccttcaactgctttctgcatacaacccatcaacccccactgtctcaccactgaccaagctctcagagatttctaaaatggaggacagagaaactgaggaccaattccagccgcttgcgtgacccgcaagcaagtttcattctggattatttgaattctggatttcattattttcgagaattagggtttcgaattttcgtttttgtttattattggttgcagatattaatatataaaactaaaaggcttctgaatcgattgggggtatcgtatcgtctttcaatgatgaatggaaatggcagcacggttcgttaaagtaggaagttcaaacggtctttgtttctagctattgatatatagaatagctatagaaagaagaagatgaaggattccataataatgattgaattacacacttatcgaaatattgatgtttttacttatcattacatttttttttattaagtcagattactctgatgaatgtgat

SEQ ID NO: 194611 - DNA, 1568 bp, Cannabis indica
ggttagtttttcaatgatggtttacgtatcttcgtcctaatcgcttttgcattttaattttaaatctttatggattatttatttttcattactattaatcccagtgcattatattttggtctctgatctaaactgcaattattaatttttttatgctcgtcttctactcgaaattctttctcacattagatttggttctttcaaggttttatataatctcatctctttgaactttaaatggtaagcgttagatttgcaacaaacattttttttttgttcttgctatatatttggtaggacatgtttgtttattagttattactgtcttaattcttattaactgagtagtttagttaataaacaaagatgattgatttgttgtttttatttggtgcacagattccaaatacctgaattaatgggaattattttttttaaaaatatatttatatattataaaaaggtgaaaaattgaatgctatttataccatctagttgggaagataaacctaggagacaagcctatctatttgtttatttgtttattttttttttctctttatcctttggtaaaaatctctagagaaatagggtatcgctcaaagataaccacaaaaattagaaataattatttggatttatatgtttttctttttctttttctcctctcaatttcttaaatctagtctaatttagttaatccatgttttagtttctgatgagaattactttctgtttgcaggttgtatgagcttttcatcaaatcattgactgttattattgttattattaacacttgtcaagtctagcagtggaagctcagttttttgtctctggttactgccactaatttggacgggcatggcgagtgagtgtaccaccaaagttcggctagttagatgtcctaagtgtcgattggtccttcctgagttgcctgaatttaatgtatacaagtgtggtggatgtggtgccactctccaaggtactctctcctatgaaaatctaagcaagcatatatatatatacatagtacttgaaattgcatagtttttggaacaaaaagtagttttgcaatgtgttttgttactttgaaacagcatggaccttactatgctgcttggttctttttctttttccaacaagtcctgatgttgttttgtttatggtgtgaggaatctaaattgttggactgcattgattaatttttacttgtaatattatgcttgcagcaaaaagtcgagttaccagaagcacggcaaccagtttaaatgttgctgatgctgttcagggaaatcaaacaggccgtgtttttgaagataaagaacccgaatcaggtaagaaagaggttcttcgtggcccgggagaatgctcttcatcccaaaacaatgagtgggatcaaagtagatctaaggagtttgatggtgagcagggtggggttgtgaatctacctagtgaaaaacagaacaatgggactcatcaattcagcgagtcttcagattgtgatgtggatggatctgaagcttccaatgaagtcgtttcaccaatggagtttgttgatagtaagaatg

SEQ ID NO: 194612 - DNA, 1048 bp, Cannabis indica
atcacggttatatattttgtttaattggggttttattatcattatttcattgttaaatttccatagtctttttattttttgggttgagaactcttgtactaattaacaaatatatatatatttcttttggttttcttttgttctgtattaaaattaaaatgtacaatagacaaaaagaaaaaattaaaaaaaaaaaagctggtactatagtagaagtagtagtggttttactattgcaacatttgaatgttcaaaaaggacagagtaaaggtgtatatagagctagtgaaaaacccaatggttaaaacgatgtaaaaaccccagtaaatgtacgttagtctcgtttctactattgtctatatttagggctgtcattttccccaaaccctgtttgcttctctgtttacagtcaatatttttgcgttttgccaacattttggcttcatttttagccattctttttcactttcgtatcactattttgttttgaagtataataattataaggctttttgattaggaacatgtttatcatatattatatattttaatataaagtagtgagttactgttcgtaacatattataaaaatagaatgttttcacgtgtcatatgtataatataaaaatgtttgtatatatatgtatatatggttgaggaagccaagcattgaaggtgacagagacaacatgcaaggctgaccaaagaatatgtgaggaagtgacttttggattttagaaagaattaaatttgtgtggagaaaaagggtttttattttgtgggatatgaagctaggctcatgtatcaaggccaataataataatcataaggatttatctaaatatatattattatttttgggttgtagtaaagtcactttactgtgtgaataaattgttgggtatgtatatatacatatataaatatggtactaaaaaaaccgtatagtattttcagcctaagaaaaacagcatttatggattggtgggttgtgtagcctgtgacagtggcctcaataatgttcaggttttttttttctttctttatt

SEQ ID NO: 194613 - DNA, 1805 bp, Cannabis indica
ctaccaaatgagtgtaatagaaattatactgacttggccaactcatttattcctcaatttaattttggtatccctaaggctctcaaagataccaacatttatccatcgtacatatcacatagattacgagagtggagaccacacctaagctcatcgagacactgtgttatcatgcgtatccacctcaatcttacatgagcatgatcaccccctagaagcattattaattcctatgttttttcgacgtgatcagcttgaacaagaatatcccctagggtcattaagaatcctaggcttggaaatatttctgtttactgagattttctaaaaaaaactaaataaattaagaaattaaatggttgttaaaacaaaagagatgaagacttttacgtggttcagatactaatgaaccctagtccatgagtcaatgtattggcctaagaatgcttgatgtattacaaataggtcttactaattcttgctataattttttcccttctaggtttttcttaaaagaaaaaagcttagagagaacctgaaagtttttttggttccccttacatgaatgggtaaaggggtttttataggcttagattcggattcgggcatactcgtgatctatttagcattttgtgcaaaataggtccactattagggtaaatacatggaatacatgacttttaggctcattgcaagattttgtctcatgggacgaaggtgtccgtacaaaatggggcccacatggtctggacaggtatcatgcacgggcgctgctttagtagacgagaatgtcagataggcaccgttaggaaaagaggatatactcccttttgtggtgcgcacaatatcatgttctgacataggagacaatatctgatttggtgggaccaggcattaaagggcagccacgtcacacaagatgctttcagaggtgcctcttggacttcctctctggatgtgtctcatcgattgtctggagggctttgtttgttccatctcctgaaagttggatgggctttccgaagaggaggggcctagctcgtctttggaggcgagacttctagagtttagatgctcgggcccatctctgatatggactatgctgttatatgcgggaaggcttgggcctagatttatgtggaccaattatttgaaaatgccacttgttgcccatctagaaacataaataacatttacctctaagctttcaggacttgagagtggcagaagcttacagtctttttcgtgtgactttggacactttggacatgtggaccattttgaaataagggcatgttcatcttccatatcacaaaatgtgaaggttgaggacttttggggctacaacttacaatctttcttccgtatgactttggacactttggacatgtggaccatttcgaaacaggggcatgttcatcttccatatcatagaatgtgaaaggttgaggacttttggggctacaacttgcaatgcacacatgtccttattttcttggtccacgaaattcatgcgcccttggaaaacatgtggtgtctggggtattacaatgacgacaatatgacgttagcttgaacatcagagaatattgatgatggaaaatacctcaagtccagcaaggaatattaaatgttgcctttctggctcctcaattattggatcgatattgtgcttttctaggtaaaatctaggaccttgattgatgagcatgcatattgccaactttaagtataaataggacgagggagggccttctaccatattcaaatctttgagcttttgaattcgaatttgagagagagag

SEQ ID NO: 194614 - DNA, 2294 bp, Cannabis indica
ttacttccaggtaactctctcttatacttttcctttcttatattcatttcgtctattcttcttcttcttcttccttttcattatattggtctcttcttcttcttcttcttcctcgtgagttcatcatttagttcacttgtgtaagtttttgttatgatttaatgtcttattatggtttgtttgttgcgaatctgtgataaatattgtagcttgatgaaaatttctatgaccagagaatgaaatctactaccttttaattagtttcatacaaattgactgttttttttttttaagtttcagtgtaaatttttgaactttgtagtggaaattttctgggaataattagattttttaattcttatgagtttctcagtacaatttgttgattggtttcatttatttatcacaatctttcattgttctctctaatatcttttttaggtatgtctttactctttagtggttattatgcaaaaattggatctttatccaatgtaagaaaaaacccatcacgaatttagttcctgaagaatcaaatgcctaaaatatctgatcttggaattcatttcactgtttggggatagattagtttgtctttgtcattagttataggttttcagagtttcttcctattcctaatgctgcattttctttttttctttgtagttgaaagttgaaacttgaaagcaaattgtccttgtgatgataatagctcccatgaatctatcaatatttcatggttctagatgtagagtcaataatactttagctcatttgtggagtggaagcctccatagttggactaggaggcacatcactacctcaaagcttcatgatcccaaagtcccggggattggaggaggaaatactaagaaatggacaagaaggcctataacaacaaaacagaaggaagtataatacccctcaaaccagtaaacttagcagcattaggcatgaagttttagatgaaaccatttcagcaacaagtagttctttgagtattggtaaaactgagattactcaattccaaaagcttcaatattgtgaagttcagcaagaagagagttatcagagtttggccaatctattgacaattatttgttttgacattgaaacaactggatttagcagagacagtgattgtgtcattgagattgcacttcaagttcttcgtggcggtaagaatagtactttccagacattggtaaacccgaataagtttgtgccaaatactaaagttcatggcattacctcaagcatggtcaacagacgcgatgttccaaggtatcattatgttctgtttcaactgttaatttagaacatggaatagatattcagtgtcttaattctgcattgttgagtagttttataggaccccatgtgagctagttcattaaaaaggggtttaggaaactgctgctgttgggttggaacaagaaatttatcttcattgtgttgcatttcttagcttgtatttaataaatgatagctaataaatattctgtttacatggaggatgaaggacttgataccaatcttacttcagtatgtcagtagccatcaaatgcctggaggcaaggtattgttggtggcacacaatgctcgaacctttgatgtaccgtttctgattagcgaattcaatcgctgctcaatagaagttccttcagattggttattccttgacacccttcctttggcacgcgaactaatgaaaattgaaggtgtgttctgttctgtgtttgttttgttatgtgtccaacatttttggttgaatattaaatatctaaaagcttttgaattatgaaaatattgtcaacaggatcaaagaaggcatcacagaaagatttgatggaacactttcaaatcaaaagggaaggtgatgctcatagagctgagtcagatgtgaaaggtttgacattaattcttcgaaggcttaccttcgacttgaagctttcaacattggaccttcttgaaaggtctttcagtgcctcggacttgatcaatcaaaagaagaagaagaaacccagctagtcaggcttgtgcagccatttgctgttgaactaacttgtgttgttgttattgttattgttgaatttattcaaactcagaatgagagataggtgatacccttttacacacctagtaatttacttcaattgtctaaggtgttggaatccactggctgagtgggagcctttggcttttgttagagcattaagaaagccattaattgtaattgtttacatttattaataaaaaagttactaaattgtgacttacataattttaaggta

SEQ ID NO: 194615 - DNA, 1162 bp, Cannabis indica
ttttttttttttttgcaagagtgcaaaaaatagctaaagatagttgattgatattataggaagacctttcatgtcaatgctgttactattttgtttttggatgtatttttcatattaaatagagcagtgactaagaagcattttgattttcttcattggacatctcaatcatttttttttttgaataatgaactcgttattaaaataataatgagagaaaacaaagataaaaaaagttcatccaagcaagtttcttattcaccatgaatgtatgcgaaaggttatggaataaggacatctaaatcatctttagatactaattgtttgtttaattttttatgggtaaaatgtagtgcttgtgctctccttttgtcttatgatactgaaagcttgttaatgaggcttggtattctacccaagaggagtagctcaaatggatagacatgtggtttgctcccccaaatgtctaaggttcgagcccctcctcatgggtacctatatagcaattacagtagttttttgatctcctattattgtaggggttaggcggggatcctagtttttttgtttttgtttttattttttaagaaaatgaggcttggtattttaaaagctcgtgtgttttatactaagctttctaatttggcgttcccaggtgttgaccatccgagaattttcatttcaccaactgaatgccaatcttctctggcctggtacctttgcttttgtggaatggctagttgaacatcggtcatggatagaggacggcgttgcttggaacttggcaggtatgtttatctcaagggaatgcatgcttcacattgacaatatttagatggcactataatcaatatttactttcaggacatgcttactaatctataatgagaagaatagtaaagggaaaagatttgaaggaatgggaaggaattgaaatttagtcatttcttatcaatttaactaatagtttatggcattctcccaattttgtgtatcaaataggtaagtagacaattgattgatcaggaaggagacacatttctccattgcttactccccctgctgtccactactcatcagtaaacattgccttagtgttccggtttacgggttttggttataactagccttgtctgttatctagattactttatctcctaac

SEQ ID NO: 194616 - DNA, 772 bp, Cannabis indica
tattattattgacctgttctggtgtgacagatacgcataatcgatcgaaagcaagaagtacctcatgatggtgcaatgtgtgacctgttatggtcagatcccgaagatattgtcgatggttggggtttgagtcctcgtggtgctggtttcctctttggtggcagtgtcgttacttcatttaaccacacaaataatattgattatatatgtcgtgctcatcagttggttatggaaggatataaatggatgttcaatagccagatagtgacagtgtggtcagctccaaattactgttacaggtaagtcattaatttttaaatttgttccagtgttcccaggttcaaaatttcatttgtagcatgtgtatcttgtaggtgtggtaatgtagctgcgattcttgaactggatgaaaatcttaataagcagtttcgagtgtttgaagctgctcctcaggtttgtgcacttgaaactttacttgcaacacatcaaaattattgtttgaaatacttttaggagcgttgagtagttgggcctgtgttttcctactaatgataagggtttgagttctagaataggatctatctagaaatctgttaagagtttcctttcacctcaacagttgtaggtttagaaggacaaggttttgaaaaagaggttaccaaaattataagtatctagaactctggatgactttgtatctccaactttgaaggccatcatgtttaaaattgtgttctattaataggagactaaaaataatgcttcattgact

SEQ ID NO: 194617 - DNA, 1340 bp, Cannabis indica
agcgagctgctctttcatcgtcacctgctctgtacactcatctctaaaaggcaaaagagatgccatgagcaagagatcaggtaagctttgtaatagaattgttaagcaaatttgtattgacattttacattttctattttcgtgttatttatttcatgcagaggccacaggttttagagattggtgtgagagtgagtatcttcgccttatgggtaatagaggtacgttcaatcttgcatccaataatttacttgcaattcagaagttcatttagtacaatttttagctcactcaaattacatgctaattatatcctgggccttttctgtccatattgtggcttcttgcttaatgttgaagccatttgaccaaatttatgatgtgcaagctgcaggtcaatattgcttaattagttttaatggtgtttttttttctttttccacacttgatagatacaagtttcctcgaattttgcttgaaacaatcaagatcagaggctgaggttcttttgatagagaaccttggatcatttgatcctgatcacaagttcattgacaaatttctcaattacaaagagttgttacctgcggatgttcttgaaattgccttccaaagtcgaaatgatcaaaatgtcactgggttcagtgctggagacatgagttccgactttgccagtgttggagatgttgatcgagatgccaatgcaggtgacgggtccttgaaaggagggaagaagaaggggaagaaaggaaagaaggttagccctgctgttttgggatttaatgttgtcagtaaccggatcatgatgggtgagattcagactgtggaagattaggaaaagttaagaggctgttgtaaatacattttggttttgaactgttgtatatggtttttcttctaggacttttgttttccttcatagagccagccacagcaaagcagcagctattttaatctgctttaagcgattttgtgtacttttttcggtgttaagagtactgtttattttgttcactagaaaacctgagcggggttacaataggttgatgttttaatttaattcatttgctttattattcgatatctttttttttttttattttttttcggtaataacattagcctatatttatatggggaattagggtttctaaaatgtttttgtcactttgctgcttgtctgggtcttctttgtgcttgtgatactttctcacaagccgaaaggaatgataatattttaaggattaatcgatgtatattttagggaattagtggattaaacttagcttttccagtaaatattttagtggatgtcaaaattctttacgaagttttggcta

SEQ ID NO: 194618 - DNA, 3586 bp, Cannabis indica
cagtttaatattaccgttaaatactataattgaattattattgtatcggttttaagttttattttcaagtatatataaatgtatacaatagtcattcaaaattgaggtttaaaatttataaaattaaaataaaaaagttttgcgactaaaaaaattaaatgtatagaaattaaaatattacaaaatttcactatttattttataaacaagaaataaatatttattttaatcctgctttatatattataaattattttaatattttaaaaattttgtaggatatatattctcaataatattctcgtccacgaatatcattttcaaattattgatattattttcttttcttacatccccacaattattttatatttatttttagatatgtagtattatggacatatgtttttgtttaaaatcccaaaatataaactattgaaagtataagttgtgacttggtagggctgaagccagtacaacttactgtcacataaacagattgaaaatctgaatgactagtcagtgttacatcaacaaggtccaatcaaatcacaactcaatttaatatttttaaaaatatatatatgtgatatatatatatatatatactaccataccatgccattaccatccttagaaaatcttaaaacaaaatagagcccaccctttctagccagctctacaattcactcaaaataaatatatatgttgagaagaatagtactatagcaaaatagatggtcatggtatcatatagtactaaaaatgaactatacagggatatgggatagctagtactactatactatactcagtactatatctatatatatacatatacaatttgtataataattgagaattgtcaagtagacctcgtgaaataaggaatttaagtgtacactcactataaattttgtgcatataaataataaaattctcaattgtttcatattggttataatatgtatatggatgcaataaaatatttagaaaaaaaaaatatgtaagagtttggactctttatctgtttatgtatttagaagtattttttattttaatgatcgcatatatttttaaattttttttaataattatagtaaaaaaataaattataaattatcatacatataaaaaaaataattattcgtgcatcaaaatatatgaatcttaatttcaacacggtaattgaaaactatttaaaaagtttaacaaaaaatcacaaataattacaacataatcacaacataattatgaaaaataataaattaaaataatttttcagagtaaatgtcgaactagacaaagagactattaaaacacccgagtatatagattttccaaatatttagagcattgggataaagttctcatagtgtctagtatcacggtgaagtgtcatcttacaattaaagtaaaataagtaatatcttatattaaattacatcaataataatattatatttttaataaaaaaaaaaaatcctaaataccataattacctttcagcatttcactttaaacttttcaaaatttattaaaacaattgttattaccaactaaactatatagagccaaataaaagaatataattatagagtgttttgatgtagtaataattttggtgtgtgatgaattttgtaaaatggcaggtgtgcagtgaattggtacattgaagcagttaagagattggcatgtgagatattggatctgatggctaatgggcttagtgtgtcagacacaaatttcttcagtagactcatcaaggactctgacaatgactctctattcaggctcaatcactaccccaacactaaggacaacatggacacctcatcacccacacctccacctcctatggacgtggctcactacaaagttggttttggtgagcattctgaccctcagatcttgacccttttgagatccaacgatgtgggtggtcttcagatatctctagaggataaggtgtgggtcccggtcccacctgacccctttgccttttgggttaatgtgggtgacgtcttacaggtacttttcatatactaattactaatactaaattcaaaagaaagaaagaaagagataagggtctttgaagaagaactgactcaaatgaaatcaatctcaatagtgaatagtcacttcttataaccaatgccctttgggaactgggattttcctttttttaaatggataaaatgaatgtgaacccaaaaacattttatctattacttactatatttggttccttgcttttaaatgacttgtatatatttatgtgttgtgtttttttggttttaggtccttgaccaatggaagatttttaagtgtgagacatagagctttggtaacaaataataataacaacaacaagactagaatgtcaatggcttactttgcggctcctccactaaatgcttgggttagtgccccaaaagaagtggtcacacatgagaagcctcgtttatataggccattcacttgggctgaatataaaaggactacttactctttacgacttggtgatagtagcttaatcttttcaaatctaatacataatataatagtaatatttttactaattaccttaatattattatgttataagactctttttatagtagttaaattcatgttttgtgttgtttttagttggagagttaaatcttatgtttgctgatgatattttttcttcttttcttttttctactaaaagactttttatgtgtgtgatgaaacaatcacctaccctcaattctcacttttatgcaactaacaatttagataagatggcatgaactgaaatatgagaagagagtaataaaaccaagaactcgagttgttatggaaaaaatttgaatcaacacatttacaacctgaattaaacctctcaaactttacaattgtagtgattaacaacataacataaaatctcacattgagggaaccttgattaaatacacaaggattctatatacaactctccaaacacttaagaacacttctaactttgaactagagagagatgaacctaaaaagtccctggtttcttctaagtgttgattaccctaaatgtgagctgagctgatatatttatagacttcacaagtaagttggcctgagtaggaagaagcaccaaccaacttaactactttctttgtcatgtaggattagttgtgatgacttgaaccaatgagtaagtgggttgaatttccaagttctagtgaaatccgtatgaagatatgagaaatctttgtttgtacaccaccgaaatagtgatcgagcatttggtaataactgtataattactaagataataattattaggttagtaattatatattagagtaattacactttattttaaaatacaatttgtatttagacgttatgtattaactgcatatgaatttttctttgtttaacaaataaattagtaattacataatttagtaacattaattaattgaaaatagtaatattttataattatgctaaattctcataggatgccatgagaattgaattgtgtaatactcaattaccatcaattacatagttactatataattacctagttgaa

SEQ ID NO: 194619 - DNA, 908 bp, Cannabis indica
tataaataaaaagacaatataattagtagagagaattagaaaaataacacattaattagggaatctgataattaactaaaagggacctctacctaatattatatagtgaggctagaataatgtaacgtatacaatcattactcaaatattgctttatgatatgatatgattattacaaaataatctttactataaatctatattttatttatattcctaaatcatatccaaaataataaaactatattttcacaatattaaacacactttcttaaaatttagttattgcaattaacttaattttttcagcaaaaatattctgtaaacaaaaaatattcacacttgcaattaattaatttaattaatttgatgaaatcttcattttaataaaccgtgtcacttaagtttaattatctaaaaccgcgtctaaaaatactacaaaatcatatttataatgtgttaatcacaacatataatattattaattaattacacaagcaaaatcaaaaccaaacacaaacacacaattaagtaataaaattgtacaataataatattaataatttcaaatcaacacacaattttgtcttttgatccaaaaaaagaaaaacaaattcaatcaattaattacatgagaaatttaataaaaaatcaaaccctaaaacaccaaacatgattatgatggtggtgatgatgatggtgatgatgatggtgttgattgagagaattattttcttgatcaatgatggtttgaacggttctgaattggtccacgtggcaaggaatgacaattggacccttttgatcaaagccatactcttcttcagcctctttaagaagtttaataaagagagggtggtttatgtaaataacaggaataacaaacctttctctttgttcctcttctt

SEQ ID NO: 194620 - DNA, 1587 bp, Cannabis indica
aataaaaaatttgataacagaggttaccatacattctcaatatttgagactcattgcactgtacaccttgccatgcttcaccacaaggatcccctccagacgcaacccacccaggaataacaggagaacccagtgcaatatataagtcattaattgcagcaactagaaacaatgtagacaatttggaatggaaaaaaatgaagatatttacaaaaagtaaaaaaatacaagtcatgctagtggagcagattgaactaatcaccaattctctcataacatacatagtaaaaaaaaaaaaaagtgggttaggccacagttttctgaatcttctgttaactaaaattttgaaccccaacaccaagttaaaaaaaaaaaagtaagaaaccttcagtttaagagagttaaaaaaaaacttttgacgacattatcaaaaagttagaacactcattttgcaaattttctctggacttaaacaacagaacaaactaaaatactaaaagcatagcccaagaaaattcttaccatcattaggatctgtgataccaaccgacacttgggccaagcagatcaatactaacccaagtagcaactgtaaatggatcttcaagttcttgcagttcaagacagatctcctccaacccatttctcccaaacacttttcccacaacaccattcaccaaaacattcttcaatctgaaaatctaaacccaacaaatcctgtgatgttcttacagtacaggtaactacccaaaacaaacagagacccaattgacaatattaaaagagaacacaagatcaactagaactactccataaaaacctatctccgtacgatatatgtaaatgtttgtacgggaaataattataaatatagaaatatatacgaaaatagaaagggacttacagaggaggtgagtagcagtataaggattttagcaaatgtgggaggtagatggagcgaataacaagaccaaaagtgaagacaactttctgaaaaagctgagagatttcagtaaaaagaaaatttgagagaaaagttcttagctataaccattaaacttaagagctaagattcaatgaaaatggaatgaagtagtaaagatacgtaaccattaatattattattacttcaaaaaattgttcataaagttatagttgttattacagcaaattattatagaataattataataatagctcgcatttattatttacaaacattgttataaaatttttaaaaaaaatgtaaccactgtgaaaccctaaccttttagaaagaactggaaaaataaaattcaagagaaggaaataaaattaaaaagacaaaaggcaatggcatttggagtggggtatggtatttatttctgaattaactttgtttttttaaataaataaaaaataatgattattagtttctgttctattttggtttttgtttttttctcttatctatctttctgtttctgtttctctctccaagaaccaagaaccaagctactctactagtctagtcatatgcatatctgttttgcatgtcttttgagaacttctccatacttctccacgctctattatctgcgcgtacat

SEQ ID NO: 194621 - DNA, 1645 bp, Cannabis indica
gtccaaaatggtatttaccttaatttataatattactaaagtcatatatataagaagaaaaaataatattgataatgctctatattacttcaccttgccctatcactgtgggagcaacattttttctgcttctatatgtatacatataatattttaactacatgattttttattgtttggtttagggttatacaagacgtatgaaaaaggttagtatgaacataaacaaagtactagagaagataattactgagcatgaacaagaagcaatgtcattaataaaaggtcaacatgtaaaacaagatggtatccataaggattttgtcgacattttgatctccttaataaaccaacccatgaattattctcaagatgagaaagtccatataattgatcgagttgacattaaagccattttactagatatgattgctgcatcatttgatacgtcttccgcagctatcgaatggacattctctgagcttcttaagaaccctagagtgatgaaaaatcttcaagatgagctaaaaagtgtgatcgggttggatcaaatggtggaagaaaaggatatagggaagttagagtacttagatatggtggtgaaagaaagctttaggttacacccagttgggccattattaattccacgtgaatctatggaggatattactattaaaggatatcatataccaaagaaatcaagaattattgtgaatacttgggcaataggaagagatccaaatgtgtggtctgaaaatgtggaagaattttatcctgagagattcattggtagcaatattaatagagacattacagggcatgactttagcttacttccatttgggtacggtcgtagagggtgccctggaatgcaattgggtcttatcaatgttcgacttgttattgctcaattgatgcattgttttaattgggagcttcttagtggtacaaatcctaaagaccttgatatgcttgagaagtttggtttatccatgggtagagctaatcacatgcttgctaagcccacatatcgtatccatttctaaattgtgtctacaacattgtactaaatccaagctacaactaaaagcttctcatagcatatttattgagtccttctatttatctgtgatgatattattatatgtgtgctagtaattgtgtatgtgtgtgtttgtatatctggctttgaacttcctaaaataaattacaaaattgtccctttttttggttaattactatcaaagtctcatatcatttaatcataaaaaaaaaaaaatcatagctctattttttatttacaatattatgcatacaaatatgcttttttttatttcttttactaatctataattataattttttatatgatttgtttatatgaaaaagactacaaaacatagattaaaattatataaaaagtgtgaataatttaatataaattaaattatttatttaacctttatatttttccattaaaatcttttataatttaatataaattatattattttgataactatatttttaggcttttgcatattaaattatttatttaatctttgtccttttttatttaaaatcttttactaatttaatataaattactattactttctataaccattatacttttactaagtga

SEQ ID NO: 194622 - DNA, 1012 bp, Cannabis indica
agctacgtctactttgagtttttgattctcacaagaattagaagagaattgactaagtatgaaagatctaaatttttagagagatatgttctgacttcatgggcacttttctaaatgtgaaaaatgagctaaatttgaactctctttttatagtgaagtaggttctatgaaaataataattacatattcaaaaaagtgtagaaaaaaatacatttaagcacttttctagtatttgaatcccgtctgtgggtacctttttcgggttgtagttgaaatttgttactcagttgacgatgaaattggacctattatctttagaattgtgattggggtatgagacaccacttgtagaacattgaaatagtttaaaatgcaagcttgaatcgcgtcaatcagatcattattgagtgggttatggttgtactaaaggtttctctaatatcagcgccaagttgacagcccaacgccccaagttaacatatggcgataacctgaacgctgagtaagtagaaaaacatcttaagaatatattttttgatgcctaagcaaaatattacttaatcaatttctgttttgttgctcatcatttttcaaagatattcacatagtttatatatgcctaagtaaaaaaactataatataacgtgaaaacatactatatataaaaacaactacttttagagacaattttttagttacaacattagtcacaacaaaaaattactttgactaaaacatagtatttagacacaagttgtcactaatttactttaagtcacaacaagtattgtgacgaaaagcacatttagtcacaacaaattgtaatttttgtgactaatacatttggtcacgaaccttttagtcacaatataagaatgataattaataattagttacaatttttttacttttagtcacaagttttgttgtgactaaaagtatgattttttttaatgacaaatgatattcacattcaccctatctattctattatattaggctaattagtaat

SEQ ID NO: 194623 - DNA, 899 bp, Cannabis indica
aaatttcatcaaaaaaaaaaagatgtcaccaaacctttaatgcgaggtagaatgatcacattgtctaaagtctgagacaatttttgggtcgaattcagatatgagagactgcctgaatattttatagagtttgggagattaggtcatcctttcaataagtgtataatttttcttaaaaaacttgaaatggagaggaacccgaacttgaatataggtctacaattaaaggttctgcacttccaacctctaactatgattgatatagaactgattttacaaaaggaagtgcttagcccatactcactcgtttggcaagaacatctctcactttggcaatatcattactcaatggaagatctcaactgtaaccaaggcttttgtttcaaaaagaatcttctcaacatcacagcacagaggcaagacaagttaatatttctagttgaaactcaaaccagatggaactgcaacaaatttctaatgagaaaagtcctaccggtatgactacttgtgtccctattattcaaagctcatgtctcgaatgcacctttggacaaaccatggatgtctctgaaaattcaaaaaactagaaagttatgttcacaacagcaacattcaaaccagagaaactttcacaccagttctttgccatgagttccactacaccgaaggtgatcatcctccaactactgctccagaaacatttccaagcatggaacctgatacatttactgatctaacaggtatttatattcctatatcaagacatggaaattgctctaacacaattgcaacttatccacctctacctaaaacattatggcacaaaacatatgtactcagagtatgcctcttaccaatgccactgcctctccatctcttattgtctctactcgtatgga

SEQ ID NO: 194624 - DNA, 1544 bp, Cannabis indica
gaccaatataattggacccgaaagctatagaggagcaactgaagattggtttggagacttcagctgatgaggaagctgagcggaatgaagaagctgaaggaaagagcaggaatgagaaagccatgaagcaaaggaagagagaaagagccaagcctcgttggctcaaggacttcattctggctcattgagtctttgggcatattttgtagctaattttgttagcctttttggcttttgtcaattgagtgtaaataactctgctgtaagaacttaatgaattagcaagaaattactattggagacctcctctcttgtgttgctatcaatttttttgtttgtatttttattttgaaaatgagaattcatttttttcaaaattattagtgggaaagaattgtcgtgtaacaaaagaaacttggacgaaattttgccacacatataaggaggaaaattatttatttctctttaattatttttactgttcaatattgtaggctggccccccaattttaaaattatcgtgggttctatattggacaacggttgcccatttctttaataccatacatttattttttcatatatatacgcatggtttctcttaaaaaaattattaggtattatttgagtggagaagcaatccaaaaatatggctacccaaaagtgcaatcgtgtagtttcgtttgcgttgttcattgcagttgcgttaccagtaactctatttttcctcagtacctctgacatttggtatgttttttttaattgcttaattatttccttttattagaaagcatcacatcacctcttctaaacaatatctatttatttttccctttttaaaattattggtcataattttaaaaagaggatggtcatattcattcattactaaattagttacatgaagtgataaattaaataaaattcttaattaccaaattagtttaatatatacatatatatatatatatattatcaagacgtataatttatggaaggtggtttttaaatcagcatatacgagtcgctttattcacattcatagtcaataatataagtagtaggagcatgaaaattttgaattgtttgctagtttgtttttgttgtgatataagacacggacactagtcaagaacattaaaggaatagagaatgaatttaatacaataaacaaaattaagattgaaaactaaacttgatgctaaaatgagtaaaaacaagaataatgctgttagacgaaaaaacaaaaaaggaaagtttagtgaaattagttgaatcttggcttttatatatagataaaccaatttaaatcatttcaatttaggacaagggataagggacaagaaacaagggtataagatggagtatgaagaaatgagagaacaactaagttttgagtgttttagtattttgtgatctccacatgagttagtgtttttccatgtgtagactttctatatagtgtatttctctatatgtgatcagtttctctgagatagttgtaagtttaagtgagttttgagtttcctccaagagagttgaga

SEQ ID NO: 194625 - DNA, 1288 bp, Cannabis indica
tgtgaaagtgattgtagtgtcctagtccatgatcgtgtctggtccttatcttatactgtactaagcaatagatttgcattgtgctaaaacagtgtacagttccaattaactgactagtttaatgaatacgaaggagtactgatcatgaatttttttgcaatgcagggcagtgattctgagctttgctgcatatgctttgagcaggtttgcacaattgaagtccaaaattgcggtcatcagatgtgtgcgcaatgcaccttagccctctgttgccacaacaagccaaacccaacaactgcatgtctaactccaccagtttgtcctattttgtcgaagcgccattgctcgtctggtagttgcaaagattaaaagtcaagatctagaggccaaccaagaaacgagcgatgtctgttcctccaagctaagaaagtcgaggaggtcaagaaactttagcaacgagggtagcagcagcttcaagaacatatcagcaatggggtcttttggaaagattggtggccgtggttcgggaaggattgctgccgagactgagtggatagacaagccttgattctattctttttttccttgggataatgccaaccgagacaatttcattgggccatccaagaatttggcatgtagttgaatgagaaagtcaaaatagtccaacaaatcaacggtcgtgttggattgatccattagatatatgtgtagatagaaatccatctgtttgtgtagatttgagaaataagcaaagcaagcaagcaagctgcaggctgcaaaggtctagggtggttttttatgtttcatggttcatgttttggtatttgttttctttagattgaaggaaagttgctggttttgtgggtcagctctcttataatatataatcccaatttggcaggtaaaaaggaaaaagagagccaaaaaaaagaaaaaaaaaaaccttgcttctcctaatcaacagtccgacattgttgagaatggtagctttgggttactttaggggacccaaaatcctcaaaaagagcatatgggttagaatgtttctccaaaacaccaatccccatggcctgtaatttgttcgagatgcaatgaattatttttatttaatgaatgaaattttgcaaaaaatacatatgtataatttacataaataccaatataataaaaaatagttgaattaataaaaattatagcacacaagaagttttagactgtctgcatggggggacgagcgttagataggtccaaaatttagaaaattagaacaggtcagatagataca

SEQ ID NO: 194626 - DNA, 1354 bp, Cannabis indica
taatgtgtatatatgtatatataagtaggtagaatacatatcttatattaatattttaattgatcaaggatcttgcttgttgtgatgacgattaaatgatggaactaaatcttgcaataagccaaaatcaggaacctgatgaagctgctgccgatattgatgatgatgatgagtagtattaaggtttgaatataacatggaattattacttggagcctcaccttgatgatgaataatatgatcatgattattaagattatgatgttgttgttgatgttgatgaatgttactaatattattattattattagtaattggaagaaactgagtgaagaagtcatgaggcaagctattaggcgataatgtcccagctgaggccaaaaaagaaggcgataacatggcggccgcgttgccacgcagggtcgccggacagtggtggttgtgttgtccttcgtacgttgtgataacgatcgacggatcttggaatgacctttccacccttttttttactgtgcatctttgagtggtgcatctataatagcttctgaaaaataaatagaaataaaaaaaacaagttcatttaagaaattaataattcaacaaaaattgagcatgcgatcaatcattttgtacttacaaagagaagtaatatatatctatttatttatttttgaaaaaaaattaaatttttgttaaccagacacagtttattatatgcagaatcaacaaaaattaaatacatttataatagggctaagatagatgatcatgatgcatatataaaaacctgtggataattagtaactaagggcttttattacttattattagatagatgagtagagctaggtcttaattatttccttatataaatgtttttataagtatatatagtttatatgcatggtctttcattttatgtacttagcttgaaatttggttaattattgagcattattaacaaataatgctagtacgtttgcaaccccatatatctatagctgcagaacacacaaattggaaattatatatataataataacatctaatagtactactgtcattattatataactaacaataataagtatatatatatatatatatatatatatatatatatactaattgttgtctaaaccatccacacatgaatttagacacaaacattttttgttttttgaaacaaatttagacataaacattaattgaacacatacatatattatatataaataaatattggaaatgatatataatattaattagtaattaagaaaaatatataaccttggatatggactatttttgactgctttctgtccatactttctccatctgtatccatcttcaa

SEQ ID NO: 194627 - DNA, 2073 bp, Cannabis indica
taattaataataacattaattaaaattaattttcgtctgataattaggtttaaagtttgaaaataagaatttactcaaaattttgccaaaatacgaattttattttttcaaaaattgattttttatagttgaaatttgtaaaaattcggacagtcagcattacatactccccaggcacgcagaggctcgatcatgatcgagaaatcatcttcttttagagtgttttgttcgagattcctcacagttggcatggtggtcctgttcgagaaactttgaactcgcatgctgcctgatgcgcatgttattcaagcaagcaagctgagaaacatgacatgggagtcccatccgcgtgcacatgttagggtttcaaccctagtgtgtgcggcagccatagctctaaatttcaaaaattcatataatttttttttaattttaatccaaattgatttctgtaaaagcctaatttaattattttttaaccaactattgaaataaaataatttcaaatcgaaacccgaattattttctatagaaaattttgcattctcacattcataaagcacataaacaattcatgaatcaaccaaaaaacatgcaaaattgttttaattccatattacatgaataataaatgattaccatggctctgataccagttatagaaaaatcttaatgagaattttaatttactaatcatgtatgttggattataactataatctaacatcctaatatgaaaaatcctaaaacaataaagaaacacataaacggatgtgtaaattcttacattgggtgcagcaaaatattatgactccttctgttcaggtctttaacccttgattcctatctgtagcagagtataatgaagatctgaacatggattttccttctattgacaaatagaatacatagtcttccttactatgtatgctaagtattgctttgatttgtgtgggcaaattctcaacactaaggagtatgaaattttgatgaagaagctcagagaattttaaaaatataatgatagaatgaaaactttttctttttgattcaatttttctgacaaaggagagtctagagtttgtgtgtgttgaatcaaaagaccattatgttctatttatagggagatactagggttaggttttaaaaaatgggccgattaaaaaagataaaaattgtgtttaaataaaagccttggccgaattcattagtaggactcatggtttgaattttaatattttttgcttccaaaagtgagacaatcttttttttcttcaaaattatcatttctactaatttaaatgctaactttatctattttataactataattaattattaaataaaattattatttgaatatatttattaactagaccctccaagatcttttaattaacaaataacccctaaattctcttttcttatcaaacatgcccttattaaaattcgtaaataagacatagtcttatttaaaatcctaattgattaaataaatcaattaattgagactacaaaacaatgttatctcagttagtatggtatgaggaccatgggcctatgtaaccaagctcataataagtaaatctttaaatttatcgagtaaattgcttaacttattaattccacacgactccactatagatttagaattgcactcttaactacatagaacactctatatgccaaatatatatacgctataaattatccattatttcaatcacaataatcattgatcctttatagacagtttacatcagaagggatacaaatattattttacccttcaatgtattttatcattaaaacacttagctacttgtaaatgatattttgggaaactaatataattacctaaatgagcgctctatcatttatcgcgttaagtcaagctctaagaaaactatcattttacttttaatagacatggaagctatagatgtctatatctatgattaacactcccactcaattgcactacctagttctcaagatgtaagtattatccctacgagtaagttgtaacaaacaagcaaaagagctcatacaatacatttaagctagagctta

SEQ ID NO: 194628 - DNA, 1618 bp, Cannabis indica
gtatagaaaatcaaatttcctatagtatatttatgtatctactgtcacttgtttggtatcatatatagtggtttgtcatatacataatggtttgtgtcactgatgcaaggttgacccactcaacttgacaccactttttttcgtaatttttcactttttgttcaattttttgtaccattaattttgttgtccattagttagtacacgaaaatactacttaatagttacgagagtcatttgatttggtacatgttaaagttcaagaatataatataatatatgttaaaattcaagggcatgatttactatatgccaaatttcaggaacaaaaatactaattagcctaatctatttacaagaatattaacacatcaaaatatttgtttagagctctctcattttcctttcccaaaaccaattaggcaaagattagaattaattttgcataaataaactgtataactaggtacttattggaagacactacgagattaacttttaagaatcttggaattttgaaatgatattagttgcttaaaataataataataataataataataataataataataataataatgaatcaaagtatgaaaacaaattttaaattgtgtttaaaatcattccttcactatcaaaaaatctttggttcaatttttagtgctcttatttgttaactacaattattaaaaacaaggtttctatggaggcaattgctacatcaaaattttcaagtttcttaatttttagtatatttaattatttgtttgacattgattattgttcattatttttgacttagatgatcgagataatcttgatagtaattcaagattttaaaagaaactttagcacttgaaagttcccccaaaattaaataatctgctatagagattacttgcacttaccaataaaatcttagcttaattaaaacaaaaatgttcaagtggattttttgtgctcattttgtggattacactaaggtggtgtttggttaaagataatgaaatggaatgagcatttgtgttctatttgtagattatattaaagagtgtcatttaattgtagataatgaaatagaatggaaatgaattaatttttattacatttcattgtttggttgcattttaaagtattggaatatcatttcaatgaaatgactttcccaccatttgggtggaatgatattgtagcgctcccgcttcaagcctccattaggtcttctcctacgaatttatgactcttatacacgagtacatcactttagctgcttcctagattgataaatggtcctacaaaccaacaccagtgttcccagcatgctttgtcactcgcaagcttcttaagaagactttccatgaggttactcatcctgaaattagggctgcacacgggtagggttgggctgaccaacccgaaactgggctgaaaatgttttaaaaatattaggtcgaatagagatgggttaaaaaactgtgagtcgacttatatgggtcgaaattgggttgggccttatgtggcccatgtaactcaacccaacccgaattcttatgatcaataataaaaaaatataatacatatattacaattcttttccatcataaggaacatttta

SEQ ID NO: 194629 - DNA, 2328 bp, Cannabis indica
tcctaatttagattttcttctcttaattccatatattaagattaaaaaaattgtaacacaccactttttgtgtgaacattattataaattgtataagtaaaatacttttttaatgtaaaacttaatgatctcaatgttatcgaatgaatacataagcagtgcaactttataagctgaatgatccaattattaattcacctcatcacatcatgaaaccataatttcaataatgaaattaattataaaatctttaagtacgtacatgcaaaaaatattacaattaaaaccatgcatgcatgtggtgaagtaattaattaaactctctcacatctacatctttctctctattaatatttctcccttaactccagctgaaaccattcaaatcaaactgtttgcaattagaagaggagtcgttttgatcattgtgatgagtattcagatcaagtacttttgttgcaaagaaattagcaggaacaatagatgatgatcgagacaccttctcattattattctcatcatcatcatgatcatcttcatcattattatctaatttgacaaatcttttgtgacgatcttgatcacgagtagtgtcgtcccatctaatatcgcgatgatgatgattattattattacttcctccaatgctcatcgataacccatttctttcgatcgaaaacaatcttctttcttgcttaagaaacatgttgttttgatctagtaattctggagtagtaatagtagtagtgttattattaccttctttggactcgaaaaatgtagtagttgtagcactattattgttgttgttgttgttataagctctcaaaacaatcccatgtgctatttcttgatccttttgggatccatgctcaaatgtcaaacaactatctaccgagcaatcaccacggccgcgaccagggctagggttagggttagggttagggcacgaggctaattctggtggtggggttgcttcaaaagccgagttgaggcattgagtggataccttggaaacaagttcggagagttgaactttggcggcttcaagccccacgacagttcccacgttttgtcttccgagtgtttcttgagctttctctagcactgcctgcaggtattttccctgagcctctattcgaagctgcaagtgtcgttgaacctgatttagttcatcatcatccccaaaaaaaagacaacaaaaagagaaaaaaaaaattgatcagattaatgcttctaaacattaatccaattctcacatgtaccaaaccaaaaattaaaaaaaaaaaatcttatgtagatttattacctctagttgttcatggagccttctttgtacttcaatttgcatttgtagtagtttcatttatgtgaaaacctctgctataataaattaacatagtatagtttagttaatttatattgataattaaattataattataattataagcaataaatagtattaattaaagctatattaataagtaattacttgttatttgtttgaggcccatttatgcttaaattgttcatatgatttccactcattgcttctgatattctttcagctactggcccccccaccaaccgtacctatacataattaataattaataacaaaagaacactactttagtaatttaatttaattaatgtaatatatataagaaataataagtatgtatgttttacataataattaaaacaaaacatgaatgagaatgatatggttaattaatattaattacttactaattttggttgggctactaacttgtccatgtagattcttactgagtctatacttctgcccagagaaaaaaaatagatacaaatcaataataataataatatatgcatgtaatagaaaaatatatattggaatgtatattagtttatttatctaattaacatagtaaaaatctcaaaatttatgtgtccaatatttcttataattagataatttaataaagttaaatacatcataaaataatattaattattttgaatttttataacatgacacctaataatcaacaattttttttttttgaatttgtatcatttatattatatatataatataaatatcatatacatacctgaagatggctcttgagatggtacaatgtgagtccaggaattcccatgagtttcattacagttttgggagtagcctctataacaaatacaatatcatgtcatataaatatatatatagatacaaaaatacacatacatatatatatatatgtatatatacttactgtcagctcctccaagttgattgacagcttcaacaaaccgctcatggagatcagaagt

SEQ ID NO: 194630 - DNA, 975 bp, Cannabis indica
attgatgagtagtacgtacgtaccttttcattcatggtgtaacatttagaggtaatgtaagcatcaggatcgaaatgagaagttttgaagggcttaagcttatcacttagagttaaatgtgcatcaagttctgaagaatctccaagagaagatcctcttgatattgatgagaatgttgatgagtccatctcttaatcttcttcttcttccttcttcttcacccatgcaaatcaagaatatatatcttaatctcaaaagcctaattctaaatgattaagttatggaattttgattctgattttaccaaataattatattattattccactttaagtggttataaattttctttgatccaaaaatttgggagtttctttaagtgctaaacatttgttatatcccaatgagttttgactttttcaaacttgttaattcgttattagtttttttttaataaatataatatatttgaaaatttatatttcttattaaaacattagtgtatatcattatagtacatattaaatattttttcaataaaaaataaggattcatcataaatataaatatgacattaaatatttatcaaaacatttatatattaaaaaggaaagttccattttatcatcaattaataaaatatatattattgttattaagataaatttttgttaactaataaatgatctccaaatattaattaattaataattaatttttttagtatgaataagatcaattgtattatttaatcaaattttataaacatgaattattactcaaactcaattatatatcattctatacatttattcgcccactattaatttatatttttttttaacttaattttactagtcaaaccaaacgtacttatttcccctaaacttgtacattttgtctaggtagtgttcctattagtctagtcaaagcatcatgttgtatctttttgtattgtatgtccttatttgtcta

SEQ ID NO: 194631 - DNA, 1566 bp, Cannabis indica
ctctctctctctctctccattaagtgcatgatgtaaaagctttccattattgctcaaatatgcatgaaggtgaagtgggtagtttgccttagagaaaattaaaatagacaacttatattattttatatttataatttaaaaagtgggtggttttgcctttgagaaaaatagagaaataataaaatacaaataattttaaaaaatagtcaagaaaaataacataaataatttaagaaaagaaggtattgattaagactgagaaaggttatgaccaatgaaatttcccccctcttccacaactctataattataggtgtaaaacccaaatttcttaagcctacttagacatatattttgtatagtatttttaatattattattttaaacttaatattaatgatgaaatctactggcatgttctataaatttttgtgtttctaatataaattaagctaataaagacttatatatggggacagtgacatgatgcaattaaccattgtatagacaacttgtcccttaagaaaagataacgtttttaatagctaaattttgaatttcatgctttgaaccaataataattaatggatttaattaattttaattttttaaagaaaaaaaaatagaattaacacacggcaataaattaactaaataaattgactttgctcgtgtaatatatagctagctagacatcattatatataacatatatatatatatatattttttttctggtgaatttaactttgttactatttattgattattagtgtaaaaaggtttaatatatgtaattgttaatatatttttatatataattaagcatcaaacactcactttcagtaatgatgttacttgtctcgaattgaaaactacttaactatttaatttacatcatgcattattacaccttttgggatttatattttatttttattattttgaagcacattttgtcttttcttatgtatgtatacaagatttgatggagttttcagatagattttgctgtttatatatatatatatatattgttaaacaaactatataactgttcatatatatgtgtgtctatgcatggtagtttggatatctcacctacaatttaagctataatattttacactattaatttcttgctttatatataaagcaaatttaatatacaatacaaagttattaactgcatgttatttttaattattaattttcttttcttaattcggcttggttaatttgtaaaaattaaattatttaatatatatatttagctttaattattaattgctattttctcacatatgtaacagttaaactcttgaaaatacaaaaagttcatgacaatgacagttataacaaattaattaaatttactatatataatattagagagagagaataagtgatttattagtttgtgattatacttagtaatttttagagagaaagatcccttgatgattattattaaaattattgattgattatatagttacttccagttataaatctctcactagctagaaaaatattcttactcaaagacatcatcaatgatgaatt

SEQ ID NO: 194632 - DNA, 2123 bp, Cannabis indica
acaaagtaaaaagagaaacaatgataccataaatttaaagaaaaaagtacaactccaagaaaatagaattaaaaacccaaacaaacaacttcccaaagacacatatctgaaatgtcatttcattactgctgatcaaaaaggaattggcatttctttctcagagtggtgaaaaggtagtccaacaaccttcaaagaagagaaattgtcaaacattttgtgacaatctttggtcagaaaggtcctacaatcaaaaatattcaaatattgaagttgagtgcaattgttgattattttgagcacaccttcattagtaacaaacatattaaaagaaatttcaaggtgctttagctttggcattgtggaagctatggcaaaagcctcttcatcactagtgacttcatcagttataatgaagttcctatccaatctttgtagattcttgcagttaataccaaatgccctaatacctgaggctcctattcctttgcaaatacttatatccaaatgaatcaaggatgggagtttttcagctacactttcaaatagtgtatttggttgatttgataaatcagttgatggcatcttcaatgtccaagtgattgaccactacaaaataacaaataaattattaataaataaaaaaaggaataattagaaaagaaaatgtatagatatatttatagactaggtaaataaaaatttattttagactcaaattaattaaaattaattataataatggagcaattaaaataaatgtaattaccatattacataatataacaattgaaatctcctcattatatatatattttttgaaagtttgctataatttttaaatgtcaatataaataacttttaatagtaaatatacatatacatatatatatatatatatattatttagaaagtttagaaattaaaaatatatagctcaaattctaacttctaaaaaattatttcattgtatgtataatataagagggcattcattagtaataaaagtaaaaaaacaaagaatatttgaatgaaaatataaccatatatttataagattatatatctaaatatagatagttatacttacaagtgtgcaacaagaagtaaggtgttggagttaagtaaaccacgagcagaaaatgagtgaagtttccctaaagatcttgtaatcaacaatttaagtaacttgaagaactgagaagaccgcctcttaataaagattttgaagtcttgatattcaaagtttggattagtataatcatatttatcaggaaacaagtcattgaatttgtcaaaatctaagtgatgccaacaatcagtgcctttaacaactttgctccatggcttacaaacaagggcaaatgttgggctaagtttgtcttttaatggtaactaatttgtgaagatcaatacaagtgcttctggtatcagctcagcccatgaagggtaatcatattcatcatcttccatcatatatatcactgagacaaaacatattattataacaaattaagttaatataattgatttaaatatatgaatatatatatatatatgtaatagacattcacatatacatacctaaaaaatgaacaaagagaagaataatggtaatatgtatatgtatgtagccctattatttatagtatactacttataacttcaaacaaaggaacctttataagagtcgcaaagcatttatatatataatcttcttggtaatttgataaagatttttttattttttgaaaggagatattgatcttaatttcaattacaaaatttaacgtttaattattggctggctattaattagattaaaaataatcttggaaatgataattaaaaatgcatatatattattttatgtgcatgcatgcctagtataataaatattatttcgatgagatgatattaatttttgacggttgcgaaactcgaagaagaaagattaaacgacatgatcgatatcataaactataaaagcatatcatattatgttatattatattttgttaatattaattaaacgtaagattaataatgcaaccgtctaaatatatttaaaagttgcatgcatgcagctaccatcatatattatcatattttttttttcaattcca

SEQ ID NO: 194633 - DNA, 1603 bp, Cannabis indica
catccctgtattcctgtaaataagagactatagaatcctctatttctttgtcaaagttcttattttttgcaaaaagaaacttgttataataattccaaatagaccatatgattccaaaaaaatatagacagatcctctttttgaaaactttcaaaacctctcagcagaaagtctttgatatcacaatatttattcttgttaaagaagtcactaaatcaggtatatttccagtacttaccttctctggaacagttcactagggaataagtgttataatcaatctgagagaaacacacagagcagaaaggattaccaatgaccttgcgagagtggaggttaagattggaggggataagatggtggaaagccctccaaatgaagtgtttaatcttggggggatagtagaagaccaaactgccttccaccagggtttgaaaatgctaggagaggaggaagaaggatggggagagatggagtttgccaagtaataagctgaattgactgtcaagaaacctgaaggactgttaccccaaatgagacagtcctgactcgtagtgtcaattggcactttaaggatagagtccactttaagggtttgaaagaaggtgttgagcttaagggaatcccaagtgccatcctccttgataaagaaagaaaccttgtcttcaggtagaggagaattattcttaaaagagatgtaggctagagttggggatccaattatggctagtaatagaaatagacttaccatttcccactttccaaattaaatccttggcaagaagatcccttccccataaaagactgcgccaacagtaggaaagagagtgaccaatggaggcatgaaggaaactactgtttttaaagtatttggcttttaagagggaagcgactaaagagttcaggttagagaaaagacgccaagcttgtttagcaagcatagcttgattggtgaacaatatccctgaacccaagacccccatagaatttggaactacatatctgggaccactttttccaatgtatcctatgtgtacctaaagattcccaccaaaaattggacataatcttactaaactgcctaccaatagaaagaggaagcctgtagcaagacatggtataggaagagataactttgatcaccgctttgagtaggatttctgtaccagccttcgagaaaagacattggttccaggccgataatttactactcgctttttggagaaggaagagaaaagaagattttttagattgggataaacactcgggacaccaaggtatttatcaatgaaaggcttatcgctcatttgtaaggaggtcagaaaattgcctttatcattagagctggtataaggagagaaaaggatggatgattttgcaaaaacagtttggcccgtggccttattgtagatagccaggatgtccttaatggtgtaactattgaagttattaacgtgggtgaataggaggctatcatctgcgaagagaagatgggagatggaaggggctgagccacaaatagatgtcccttagaattgatgatcaagagacttgaggtggataatagcagagagtgttgcagttcaagaatcaagaagaaaga

SEQ ID NO: 194634 - DNA, 1176 bp, Cannabis indica
tcaatcaggctgtctttcctggacttcaaggtggtccacacaaccacacaattactggtttggcagtagcattgaaacaggtaaaatttggacagacaaatcctataactgctgctcaatgactttttgtggagttaaaagatttgttttgcatttgcttatcttgggacctgggcaggaattcagccttttttgcataatagtttttttttttggtatatacttctttgtactgtatttttatttgtgctgattaaatgattactatggcttttgtgattagagctcatcacctattctttgattctgataaatagaaaaatcagatgcttgaaagattgaatgattacttatggcttcattcaattttgagaagaaataatttcctctgatctcaattaaaatatcctagtaggcagtagggacattaccctcctgagccatctccgttaactcttccctcccttaagtgacagtccttaagccaagttatcatatttagcttgtgattcctctttggatggtcatttatgtcatatgttgcatgcatgcaggctacaactccagaatacaaggcctatcaagagcaggttctcaacaattgctcaaaatttgcacaggtatcatattaagtatttctatgtagtatattaagaaattttcggaattttttttttttaattctaatgttttctcaagcttttctttatagtaagaaaacaaataaacaagtatttgcagacataaatcatttatctctgatttatttatttaagcgttcccatacctgaagtttgacatggttgcagactctggctgaaaggggctatgagcttgtttctggtggaactgataatcacttggtcttggttaacttgaaaaagaaggtaatagactaatggctgttctttattttttttctcttcaactgataatataaatatgaacccattagtatatgttgtattgatccatcctggtatcctgaaattttataaagagcaatgaatctctcttatccttctctggaattttgtacagggtattgatggctccagagttgagaaggttttggaagctgttcacatcgctgctaacaagaataccgtccctggagatgtttcagccatggttcctggtggtattaggatgggtaatagcctcttctcatttgga

SEQ ID NO: 194635 - DNA, 1781 bp, Cannabis indica
ttttgttttattagtttgtatttttacaaataaataaattgactctacaaaagaccttgaattctgatgggagttaaagagaatgaaaacaggaataataaataagctcgtaactacttttcttttttctttttctcactctctttcccattgatgagataacccaataaaacttttacagaaaaaaaataaagaaaataaaaccctactctctctcccctacacctgagtaatttgcataaagcaacatataattttttctttttaaaacggtcatgccacataaaaattgcagtggaaggattggcccacactacacgttcaagaactctcgattttttatctttcttttcaatatacttgtttttcttttccttttaataaatttccttttgcgatgtaaatatttccaccacaaatttcaacagtaaaagataattaagaagaaattgcataacagtgagaaagaggccaattcaaggctataaatatgcatgtgcactctcttcttaaatacaaaaccaactcatcaagggttgtttaatgccttagccatctctctagtttatatatatatataccttaaattattgtttgctagcttctctaattactcaacacacacaaacacacactagatctctgtgttttgatcttgaaaatgttgagcctagctcaaaatgtcgtttccaaagtggggattgtcgtttcagagcaacaacgcatcgaaggcgaggtcagcttgttctccatgtccgataagaagatcactgaccttatctacgctactcatgtccacgccgatgacacattcgacgaagactcactttttgtcatcgtcgaaaatattctcactcgtgcaactcagtccattgaaaaacttgttcaggtatatatatatattgtttagaaaatctaattaataattttcaaagtaacaaaatttaatatttatgtgccaaatcgagaaagctggatatattatatattaaactaattatgtgaaaagttaaaatgtttttattttattatatttattttttatttattttttttttggttggttttgcagggaagccaagttcatctggagaacatagaagacagagcccctgcaaaagctaacttcaatgttcccttatgcaccctcaagtcgatcaatagcgaggtatattcatacatccatatgttcacatatatatttctttgaataacagactataatagtattgtgtggatttccagctgtgttgcaaggctccgggagaggcaacagcccataaaacaacactgtcgattctgaacaagctatcaaactattcatgggaagcaaaggcagtgttggcactggctgctttggccttagaatttggagatttctggcttttggctcagctataccagtccgatcctttggccaaacaattggccattctcaaaagagtgcctactctcatcaagccatctgagcttccaaaacgccgccaagctattcttgagcttagcaatctcatcaaaaccactatgcgagtcatagcaatctttgatgagtttgagaagctctctgtttatgaccataaagacattcctggcttgactactgctttggaccatttgcctgtcgacgtttattggtctattcttactattacagcttgtgctactaaggtttctattctcatcagtgatgagtaagtagctcaaaaacagataaacaccaattctacattagtaatcactctactttgccaagtttaacattttttgcttttcattattgt

SEQ ID NO: 194636 - DNA, 2200 bp, Cannabis indica
aaaacaaaattacatactcatcctgtacaaaccataaatcactgcaagaacatcataatcaagaatcagtagtctttgtggcaccttcgtatttgtcattaattgacctgttttgacaaaaaggatttgggggcatgtcaagaacttttacaccttctaacatttggactacaattttcattgttggacgactcattgggtgccactggatgcaccaaagtcctacaattgcaagtttgttagcaattctattgtctcccacttctccaatttgtattctgagatcttctcctttttctaagtgattatatatccattcaggatagtaaatttcatctctttcagtggtatttttctttcctccaactatttccaacaacaacattccaaaactataaacatctgatttgtaggacacattaccaaagtttttagagaacacttctggtgccatgtacccaatagtccctctaaccgtagtcattgatactaaactttgatccttagaacataactttgctaaaccaaaatcagaaattttaggtttgaagttactgtccaacaaaacattatgaggtttaatatcgaaatgaaggattcgttggtcacaaccttggtggagatactcaattcccttggcaacacctatggcaatgtcttgcaatttctcccaactcagcaaacggtgtccacagctggctcctaaggaaatgtagttattaagcgaaccattgggtaagaattcataaataagagctcttttaaacccttcagcacaatatccaaccaaacgaaccacattcacatggtgaatttgaccaatagtagctacttcattcaagaactcttctccattccccttggaattatttagaatctttaccgcgaccaaaatctcactagaaagctttcctttaaacaccgttccatacgctccttcacccaacttatccttgaagtgatttgtaatcttcttaatatcggaataagtatatcttgatggcttcatagcaacataatcctctaaaaatgtttcaattctgtcttcatgttctttatcgtttttgtgtgttatgtatagataaaacagaacagctaaaactattgaacataaaacagaactggctaagacaataactgcaaaacacatagcaaagcattaaaaaaatcaaagactactaattagttgaaagaaaatttaatagaaaagtagaaacccaactcacatagagtacttctgatcatttgcaaaatctttgttggttctgttttgaaataattatcattaataaccatattaataagattaaataaagaaacaagtattaggcagttctctttacctttttttgtactggtagatcgaaacactgaacttgttggtcactacgattactgagtctgcaacccattcgattcgcttcgcaagctctacaatcgggttcggaccatgtcaaagttacatagcttcgatcatcattcccagaaatggacgccttgtatatgctatctggaattgctacagtgtcgtacatcttaggacaacgctcgtaaatcaccgtatcaatatcataatcagaaggaaccaacttaatgttacaaactgaagagcaattgaggagagtgtgggttgagtaattggttcgacgatcgtatctggatttgaaaggaaaattgaatggtctagtggtgttattgttgctgttgttttgggaaagcagcagtagtgtgggaaggcattgatgtgggtcgtggtatatttggatttgttgtgaaacatagtttatgtctcttacgtatagctcggcgctgggtcctgtaatggttggaatcaagagtattgttttgttgtgagatttggtgcaggagatgtcgaaaccggtgagtgtgttattgggttgggtttgtttgaatcggaaagggaatctaattggtggttcattcttccgacacctcctctcataatcggttactgttcctaatccttggtctgcaactgcaactgtaactgtgaggaatggtaatatggtgaaaaacaacaaacgaggagaagagactctcatcctcatttcattacttcaataccattttcattttctgtaatcttaaggcatcggtggttgggagatgggagtgtacatactacataccataaatatatcagacatattgaaatatatgtagatatgttgatttgact

SEQ ID NO: 194637 - DNA, 2285 bp, Cannabis indica
gtcttgtcatatgacatggttgtttgtttcctttgtttatgagtggttatgagtattctttttgcctgtttcttattgagttttgttggccctgtctttgaaagtattgaaactgtctgtattatcttgttaagctggttttgctgttgttttttcctaatacgtgaagatgaataacgaacccaatctagaagaccaatatgcagcttttaatattgaggatgaagaggaagaagagttgatctttgaaggagggaatgatgattcggttgacatagacgacaggtggtgtttggttggccgtttcctcacacatcgttcaatagatttccaagcaatgcaaaataaaatggcacagttatggcagccaagaagaggattgtatgtgaaagaattggaacataacctctacctattccaattctaccatgaagtagacattgaaagagtaatggagggtagtccgtggacatttgatagagtcccattgatatttgagaggctgaagcaaggcgaaaaccctcggtctgtggttctgaacaggatcgaattctgggtgcaaattcataacatgactacgggtttcatgtcggaagtggtgattcagagacttgggaattacattggaacatatgtaaaatctgatcctaataacttcataggtgtgtggagagattacctgcgcattcgtgtcaaagtaagcatcgatcaaccgttaaaaagaaagaaaaaagttgttaaacaaggcggtatgtggtgctatgctttattcaaatatgaagacctccctacattttgtttcatatgtggagtgctgggacacactgagagattctgtgatagactctttgacaccccgatagaccaaattgaaaaaccgtatgggttggagatgaaggcagccccaagacggagaaactatgctgctggtgcgaggtggctgaggtcgggaagcacgaacagagccggtaccgatcgtaatttcggtaatccagcagtatctaatcccaccaatcttggaactgggacaactcataatcgcgtgagatcaggaggcagccaatcagggatatcaaatacaataaatgaagaatcaattgcggctatgaatccggtcaaccacatcccaagaaggataatagagatcccttcgaaggaaactgaagtgataaataaggaaggtcaagggggagagcaaattcctgagcttgaaggagaggctgatcacacgggtgttataaatgctgatgaagctctctttttctagaaagtaaaaaagaagaatgggccttgatcaccatcatgggcttttagaagtacaaaacatggaagtttttaaaaatgacacaaacccaagtgggccaggagttttgtttgatgtggaagtaattactgagatgggtggtaatacaaaaaacttgtctggggcgggctctgtttcacaggcccgccgggaattatgaatgtgttgagttggaattgccgggggcttgggaaccaacgggctattcagttccttaaggagattgtatctcaaaagaaacctaatttcatttttctttatgaaactaaaagtgacaataataaaatgcaaagggtgggccgttctttgggttttgaaggccttttcactgtagaggcccgtggaagtgttgggggcctagctttgctttggaggaaccaaaacgatggcagagttctgggttactctcaaagccatatcgacttcctggtgtgctcgactgaaagaggtgattggcatctaacgggggtgtatggagaacccttgcgtaatcgtcggcaactcacttgggacttgctccgatatcttgcaagagattctaatttaccgtggtgcgtaatcggtgacctcaacaacgtggtgagacaagaagataagaagggtggccggcgatatccacaacctttaattgctggtttcctacaggcgctgaatgactctcatcttcatgacctcgagctctcgggttacccttttacctgggagaagggacgtggaacaatcggctggattgaagtgagactagacagagcactcatcaatgaacaattcacccaggtttttccccttgctgctctatttaatttggaaataacatcttctgatcactgtccaattttttttgagcccaaaattaatcaagctttcacacctggtactgcctttaaatttgagaatgcttggttcaaagagcctatttgttgtgaaattatcagagattgttggaacatatcagtgaatagtactttgtctgaaaaattga

SEQ ID NO: 194638 - DNA, 1775 bp, Cannabis indica
aaaagaatgattaatatgagtaaaagaaataaaaagtatctagggcatatttagaaaatgaaaattttgttttgcaaatgccaccctactagttcacaagtcttctgtatataatgcataaaattttgttttgcaaatgccatacaatttataatgcatataaattgttcgatatccccaacgatggccgacattgttatgagaaaccaaatccaagtgtgatctgcttattcacaaacccaaaattttgccttgacaaattgatttggatcatattttttcttcttattttcatccccatggataactatgaattaacataaataaatatgatttttaattgtcttatacattacaacaaatatttatgaatgcaacttttttctttttctttttctttctggaattggaatagttacatttttcatcgtgattttcattttataattgaaataatatacaaactttatttactctgaattctctataaccagaaacagaaaatgtttttttcatttttcatttttcattttttaaaactaaactgtttattgaaaacaatcagagttaatacataaataagaaatgatgaaataaattctatctagcttaccatccacctcaaaggtcatttttattttctttctctttcttcccctgtttcttttgtgaatctttcactctatggacagccacgacatgggatgaggaacttggtggctaaggtttcagaggtgtgacttggactgtattttattgtttcagctaactcttctcacgtcaagtcgtggtgtgaaacaaattcaaccacttttcattctttttcaattctaaattttttatttttgctcaaaattttcaattataaagttatgatggcaataagagcatctgatcatgtacccaagtatgaagtggtggtggataaaatcatttgaagttataaaaattacataaatatcaaccaaaaaatccttcaaaaaaaaaaaaaaactaaagcaatttatggtaataataataatataaatgggtcattaaatgattgtcttcagatgaaaaaacaatataaataaagaagaggtgtagtgtaggtataatgtagaaaaaataagctgtccccatttattttagataaattatctgtatacataacataatattaacaatgatattcttatctcttcttagttaatattaataccctctctaattaatattacttaaaaaaaattgtattatatctgcattaaaagtcctataattttggtaaataaaatattctatttaaaataattacattctttttttttatattggaggaggagatttgaacttaatgtaaaactagaatttgttagtcaaatttacaattaattttaaggggttttctaaggaaaaatattttgttttatattattttatttataattttacaacgtaaaatctttatttataaaaatataatttcaaactttcaaaattataaaaatataattttcttagtaaaaagtaaataacaagaaattaacatcacaacaactatctattaacaatatacactaaaaaaaaatgagaaaattaacaactataaataaactataaaattaaataaaaaataattaaatagtttattgaagtctgtatttttaataaataaaaaaaaacataaaaataaaaatttaatctaatgttaatgtatatctgtaaaaaaatttaaattttaaggtttctaattgaattttttttttaaaatttctaaatctaataatcaatca

SEQ ID NO: 194639 - DNA, 1697 bp, Cannabis indica
ctacttataatttttattcttctaatatatatatttaagaatttataattaatataacattagaataagaagacaatatgtgacaccaatgttgaggagtttcaactggtttttaattaagtctaattactaatatttatttattaataacatttgtaatagtacacacgtagtcctcaactaagtctaaaaataaatgaatgaaacttttttattgagccatttgtatcgattattatatatataaaaatatataaatatatatttaatctgtctccctgttggtatctatacaaacatatcatttttctcccctttcacattatttattgttatgtttatcatgacgaatgcttacatcgatagcatatttcctctattttttttttatttaattttcaaaagaaagaaagatatgagaaaaaagggagaaaaaaagagttgattcgtatatcaacgtccctatgcatttttgtggatatatgttatcaatatatatttccgttgtacagaccttggccatggaaatttatacatatatgtaatagttcgtcaccattaatctatatatgtgtatatatatattataattatataattattattgtatcaactaatttatttcttaatcgtatccatatatatccttacgtagcctaccgattaaatagcaattacttgtcacatatacagagtttgcttgagcatgcttacatagttagtttactctaaagtcatggaaatctctaatgttgactattcctatataaaattaaaatgaaataagtagttacatatagatgttattatgtcgataatatatatgaggcgtctgaaactccaacaatccgttgtttttaaatatcaattatttaatattctcatgcatcatttatagtattataataattgagctcagttcaatatataactaatactttagggtacttttaataaaaattatacgtgacgatcgacttattatctgtggatggaaatgaagccatacaacacaacatatattattctattcacttcatgcaaaatgtttgttaacacgtaaacatacagtatatataattcaacttaaattatacatatccaccaataatatcatatttgtacgtagttgtatacatacatgtatagaaataatatataattaaatttaatgtgtataattgtactaagtccattgcacatatagcagccatgatatattaattaatatatgtttaataatgatggccacgtgttgaagaattacgtgagattaatgcatgggaatgttacacgtagggataggtttgtttgtcgagtcatactttgctggtgttttgatcaaattaatggttctctcttggtcacagtacttccagccttatgaatatgcatggtgaatcaatttgatgacatattactaagatatggatattataataaatatatttatatctatgaagtcatacaaatcaaaacgcggtgacagatatatatatatatatatataatatattatataccatgcatgcataaatatatgtgtgtatatataatatcattactgggttaataatggtgctaatttttaatatgcctccctcaacatgatatggtgatcatgtgaaactgtacatataaggatcaccgagagtgttggccatacaaatattattggatattgttttttttttttt

SEQ ID NO: 194640 - DNA, 1259 bp, Cannabis indica
atatgatgagaaattttgtaaatattggatggttgattttattattagtaataatctcatgtacatgtagttataatattactccatcttcaagctgtgtgactctaaaaacaccaaccaaatcatcatcatcaaattattattattataataataataataagaaggctattttgaaagaagaagaagaaaaggcacagagaggcaaaggaggagtctatggtggaggaaatgctagcaaatcgacctcgtccatacaaaaattcagcttcatcttcaatattactattatcaccaacaactatgcatcttttactattcattattgatcctactactctttatactctgatatataaatatatatatatatatatatattatgcttgtatttttgtgtgcatgtattaattaattgttttacaagtgtttggagcttttgagcttgtaaaatttgtaattgtacatgtttgtcagggttttcctttttcttactaattagtgttttgtgtattgtctatatttctttgatttcattaaaattgataataaattaataatgtttgctgcaaaaaaatttattatgtatgaaaaattgatatatgacactcatttgagagcaaatattgttatcaatactcttaaaggatcttattccacttcgaatgtaatggactctttaattatttgttattagattttgtaaattttttttagacggctgttaaaaaaacttaattaatatgacttatttatcaatattactagaaaaaattatttgtaattgaccaggttgttgaattttattatctatcaaaggttttttcttatttttttttattttaaaaaaagatatatgacagtctcgtagagaaaataaaaaatctagaagaaaaaaaaaattgggaaggaaaggaagaattcatgagagaaaaaagaagaaaaggagtggaaaagcttttggtggcccaagcccaaagaaaatttactaccctccaaaatgagtgattactatcaatttttcaaatcttgaaatcttatcctactaaaatgaaaactaattttataataatatttttttatgcaaaaaaaaaaaaaaaataatcacgtgtcgattgtaagagctttatatattaacttattttaattaggttattaataatcaccttaacgtttctcatcacaacaaaaactaaaatctagtaagtttagggctaatttagcacaacacagctgtgctatggaagaaaaacagatgt

SEQ ID NO: 194641 - DNA, 1293 bp, Cannabis indica
tagttggaccaataacgatattagaaaagtgctaggtaaataatatacaaacattgttataactttcaaagtgagcaaaatggtcaatgcaaataatatatgtgtatttacaacatcatcacaagactttgaattaatgattgatctagtgttaggcatgaaaaggtgaaatgaaaatgttgggttagctattataggttttgccttgacatggctcacctagtaaaattttaatgaacttatcatgaaaatgtttggacatgtcaaataatgataatgagtgatctaatttggtttataccatttcaaagtcaaacaattaattatgacatgactttttcccctaaaataaataaaactcactaaaacattactactcatcatagtccttaaattaagcttaatcttcaaaattcctcttgttattgtgataaagggtaattattaggatgatatgcatgcttaataatattaattagacaagtgattagagtgacaaccttgtctttttgttcaattttgatatttaaatcttttacatattgaaatatcaaagtaaccttagaattgtacatatatatttacattattgtccttcttggcatcctttctttcccaaaaattaaatattaatgttaggttcaagattggttataatgaaagtgttaattatatataggaattctattaatatttcaaaattttataacggttaatttagatttttattatttgaattttgatactaaattatgtctcttaaatttttcgtgtcgttaaaaattatgttttccctaaactttatttaattttactaaaaaaagtgtgatgtagatgaaaattttaaaagcataatttaatacatattaaagtttaaagagcataatttggtagatatcaaaatttagaaattagcatatgaacaattttttttttgaaagcaaatgttttagtatatgaacaatttgatattatgtcattgtctctaataatagttttcaaatatgtcaacattggtcccctcatataaataaaatatccaaataataattatcaagcataaaaaataaccaaaatatttagtctctctgaaacttctcctgtatatatattccatacagtttttcaatacactctaaatataaagaagtttacagagacatcaaatggtaataaattacaaatacacccttttcaactatgagatattatttccaagcaaatctaacctaaacccacccaattcttccaaaaaaaaaaaactaacaaaataccccaaaaaaaactaaaagg

SEQ ID NO: 194642 - DNA, 993 bp, Cannabis indica
aagtaaaatttaaatattaatatttacatttgatgctttggcataacatgacaatgcacacaacaagaagtggaacaaagtagactataacaatatttagaaaccaatttcttatcaagcaacgacatcaaccccagtaagcctaagctagagagttctcttccaataacccaatttaaagttcaattgagccaatacaaccaaagtaaaagctacaaaccaatcaatgatcagtcattctacacattatgaaacataatttatgttgaggaaaataaaaaagttggaactcaaaacagaaaaatgatatttcaaaaggttgaaaaccatatttaacgaatgttgagcacctgcaaacatatgccatttaatataagttccccttctttgaattatttgtgagcaggcacctttataatgtaataatgtaatataaactgtataataaaaatgggttagaactaaatccaataagaagattcagaggagaagcccaaaaaaatgtttgtcgttctgaaaaaattaaaagaaaaatcattcagtcagagctttcataatttaaaaacagaggtacataatattatataattcaaaagaataaccgaaaatagtggcttacttgcaatgtgagcaccaagaaaatcacaatcggcataggttagtactgccaacaatattgaagaagaaaataatcacaatcaaactttgaagccacaacttaacaaccacaatctaaatatgtgcatgtcgtgctagttcgactcttatttttcgagttttttaaaatacgagtcgtgtcgtgctagtccataaaagtttatcgatcatgtcgtgttgtgtcatgcaacaattttgtaaggtagacatgatacgacccgcaaattcagtaatttcgtgtcgtgttcgaattcgtatcttgctttatttgtttcagaccgttttttgaccaacttatttcttttatacgtgatcaaatttgtgctttatattttt

SEQ ID NO: 194643 - DNA, 1111 bp, Cannabis indica
aatttaatgatagtgtgacactacatttgataaagtccttagacatgctctaattaatacccattagtatatacatatatatgatgtgaaggccctataatgtatgcataattacatatactatatattatattataaatgctcaaatattatttttaagtaagtatgtttatatgttaagtcgctataaattatgacgctaacgcattccctacttaatttattatttgataattatttgaattaggtcgatcgataatgttttttaatttcagaatgtctatgattggccctccttgctatgagtgtcaattttcttacacacataatttcgaaagcaactatatataataatatatatgcaaaaaaaaccatatctttgactcacattatatacatatttatataaacatcatcaagttgtgaaacagttcatgcattagccatacttatctcgctttcaccaatattaattacatgtttattaaattaacataaaatacatatatatttattcactcatatataattttgaaaaccatttatttttaataattctggctatagctacttgccgacttctaatgaataatattgattgatacgttgggttttaagcgccaacgtaatttgaatttattagtgtatatattgtggttaataatagttgccactagccaagtttattttttccttttcttttaataatatgaaattctattatatgtagtctatatatactatgtattaattatatataataaaccacacggttatgtaagagaatgcccttcttttactctttttctttgttgtttttattttttttataaattatatagaaagcacacgcgcagctaattaattataatctttcttggattgaaaatgtatatagaatatattacattgattacaatacatagtgctatatatataaatgccaattgattattatttcctaatcacactctcctagacctagttatgcttatctataatacaacccatattaatacagctgtgtttgaaatctctacagctggactgaatgtaaaaaaactataatatattgttaatgtattaatatatgtatatagcttaatattaa

SEQ ID NO: 194644 - DNA, 795 bp, Cannabis indica
caaccttaccatagacaatactgatcaccatcaatatgattccaaaacctgccactttaacttaactgtcaaatcaacattcactcttcagtactcttctatatatcaccacaaatttgtattcaaccaaaaaaagttaagtaaaccaaaaaagtacaatttccatctaatatcaacaaagatattgagttcttaaaaatttgatttgttttggttatatacaatacacaacatttaaaatggtactatagataagacactattttctgtcatttagtaaccaataactttttcccttatcattctgtcataattgtgtcacaagttttagccttatatgctctgtagattgtactgcatatatagtccaatattttatataatttttatatatgtaaaaagtgaaaaagaaaagaaaaaaatagctgttgtatacgaaagaatgaccaatatgtactgaacaatagaacatgataaggagacaagtgaaacctttatttttgaaaaatgaataatgcatgtaaatatttaaatttggctataaaatctctaatgtctagtctgtgtcacttaattacaaaggacataatagagagaagactttagaagggtcctattattcttgaattttgaacaatgagatatatatatatataaatttatatatttatattaatgtgggtacatcagaacagatatatagtattataagttattgattattgtggtccaaaaactttgtgctaaggcaaatgggaaattgaatgactgttctgcatatatagtagtgtgcag

SEQ ID NO: 194645 - DNA, 3075 bp, Cannabis indica
gaatagcaagagaactgttagaaacgaaaaggttacaataaggatacaacaatattatgcactaaaattgcacatgttgacacgaaaatactagaaccaaaaacataccagtgactaaaaaggccagtgagttagtatttactggtcgggccgtatgaatccgctaacagaaaaaacaaatgaagtgagcattatgtgacattaaattaaatgttgcacaatctagtgggcttatataaatgtgaatatagtgctatacatacagaagacctaccacagaaggttgttcaggtacaaatcctggaaatccactttcaatatctgccctagtccctcggaaaacaaaactcatttctgcaaaaagtttaaacttctttctgtagcaatacaatagatagtgtcataatacactcaactaagtcaagaatagcaacccttccctcaaaatttaaaaacctatcaatgcatccaaccagtcacaaataaggacttgcaaattaaccttccagtgcggtagtaatcaaccacatgaaagtaaagtttaatgaagaaaaggttttacaagttctgttttacgcattagataaatcaatgattaagcacagttcacaaaccaacactcaatgagtgttagaaatagaattagcatggtccaggctcgtaatgtaataatcacagatgaagaagcaagtcaacagcttactcatcttaagtgcatgagaaaagggtgtaattaagttgctcatcagcctttattgcagatatgcaaaactaacccagaaatgtatgccaaagcagtaaatatttgtttccagccagttactaagtgtgatgcaaccatgaatttttaaattacatatagatacatatgtatatatatatatataaatatatatatgaagagaaagacctcagatttgaagcattgttaaaatcaaaatatattaaagctcttcttccaagccttaaaagtcaaactcaaattttacaaatacaagaaaaaacattcttgataaaagccaacatctagggacccaataattaattatgaaagcaaaagcaaatattacaaaagatcaagcttgatcacaccaacccatgttcatggaagataaaaaaatgtggtcaaaatgcaatgatattccaaaaatctagactggaaagaaattatcggctacaatctagactgcccatgtcatgccttaaaaagctctttaaagattccttcgccacatttaaaaacatcttccccgcattggaatcaacacaatggtgatctataccatgagaaagagttcttagaacgaagcaatgtaacattaagctgattcacaaatggaagataatttaactaatttggcaaagtaatataaaaattcttatatgaaatttgtaaagttgctctgtcacagcttcaaaagaataaaataagcacgtataattatagtgccgaacaaaagaagaaataaaagcataattttgagattacattattgtgaagtagtcagtgaattataagcatattctctatatagaatctaatagtgccatctgagtcccacccccacacccgtctatgaaatatttagtcaatgacatcatataaacataaaatttcaaacacgtatttatgcatataaaatcgtagagtgctcaacccagttaccacaaaaataaccctttgtttaaggaaagcctcccaggcacaaaatcattaacaataaaaaataaaaaaatccatttcccaaataaaatatttccttgaccattgagcatgtgatttttgtcagcataaacaaagatctaaaacctcacaatgtaaaagggaaaaaaatatagagagaggcgcctcattcaaccctaaagaaaattaaaattaaaatttaaaacacatgcgaataaaataaaagataaagaaaatctctgatcctaattggcatgataacaataaacaaattgaataaataacaaaataaaagcacataaaatcagcactttttagcaagcaaaataagtcatcatctcttttttataaacatataaatttatatatatttaaagatcgaaagtgtataggcgtttacataagacagagtttctacggagccaaacagaaatgattggtgagaaaaaaacttacaagttagtaaaatcggtggagagagttgagaatgtaggagtaacaaagcggtgaaggaaggagaagagatccagttgagggtgaagctcagctaactctggtctggtctggtctggtctggtgtctttacccaccaacacaacaacacctttttaaaaaaaaaaattccaaaaaactagcttgaatattcgagacgactccaatgactgccacgtcatattgctttgtaaaaatcttgccaccattttaaagagcatgtgctttatttttctttcttcttgctcggcaagttgtctaatcttaattactcccttaataatattaagatttggataatactttttgactcgtaaatttcatatattaaaaataaaaacataatcttcagtcaattttatacctattttatgaataaatcaaacaaatttattaacagcaatcagctaaattaatagtgtgcaatttaatcaggttattacttttattagaaacacgattaggattataattaaaaaattgagacaaataattattggtctaattttcaaatcatttgacacaaaaactaaaaaaacagatgaaaaagattgcaccatcacagttaactttcaaaaatacttatattcaatttcttatgaataaagagttgaacattttaatatatacatgtaggggtgttcatccaattcaattcgtactattttgctcatagtagatccgatctgcactaaattgggattttatttttttgaatccaatccaatctgcacaataactcaaatccaatccaattcaattcgtaaaagtgcagattggattttacttttttaaaattatttaatatttatgaaaagaaaatattttttcaaataactagtaacaaaataaaataaattattgttatcttatgtttccatcaacaaattaaaataaat

SEQ ID NO: 194646 - DNA, 2437 bp, Cannabis indica
gaaagaaagaaagagagaaagagtcatgcatagttttgcccttttgcttagacagaggacaaattcggattcagttgtctcctataaacaaattcagtgggtattttgttcacactccagctaacataaataacacattcctagatctagtaggcccttactctaccaaccttcaccgaaaataagaaaaaaaatgaagaaagaagttcactatctaatatctattcaatacatcccttatctattgacaaaatataaaatgaagtcaaatatttacaaccctaatgattaatctcattgggaatcatatgtgaagtgtgtgtggtgtgataatatatattgatgcatgttgtcattgctatcttaacatttatcaaatgatgaacacatttacttacaatcaagtactaatttttctttcattttgttctattatttaaaattataaaatatattatcaaatcaaatttatccaatatatagtcatttgctacattatttatttttaaaattgttgccgggagttcacattggttccttctgcaacttacaaagctcaataatcaatattatattgattacatagccattttttttcagaggaattacattatcattatttgagcttttcattaaagaaaaaggaaaaaacattatttgagctggattatagtagttccaagttgtgtgtgatttggctttgaattttaggtggaaaaaagaaaaaggtatcaataatatgggttatataaatagctcagtttgagtcaaatatcttcttattgaatgtttgaggtatttcagcaaaaaacatgttctccccaccaaggcaccgactgtggaaattaatggtgtacttctttgcatattttataaaatttaaatccatgatcagccctttagtgtgaccaaaaagtccactcatccatatgcaactatgaccctttgatctgtatgctttttcagtggcccccatatacatcccttacaccttgattgcatacgtggagcccatctgaccgtccacctgtccagtttcaaatcacatgtgtgccaagccaatgggtgggttttttaactcaaaacaaactcacatcacatatgaaaaggagtttactttacattttcccatgttttatttccaataataaatcccaaatcaaagtagctatagttagttgtgttggtaatcatgcattaattacaagttcaatgggtaaaacatattaggagtaaaaaagtaataaaagaaaaggaagattttggtggcttatattatacacgtggcgtaatgagctataatgagttccttgaacttaatagggccacgtggcaaagatttattggggcagcaaaatttggcaacaaccggagcgggggctgatgatatactagggtcccacccaaatatgagggttttgttttattttgagtacactataatggccagtaggaatgaaaatgaaagttccaaaaaacgttacccaacaacaaagaaaagaaagttacaggtctatttctagtgacacaccaaaattagaaaacaaacctaataataataattaatgatgggattaattatttggaatcttcttgtttttgcaccaccggccgctaacatcaacaagagtgtcaccaccaccatccactcaccaacggatacaaatatcaatatcataatattacacagaaactacacatttttttttttaaaaaaaaaaaccaagaaaattcataaaacacaggaatgttgtcagaattgcactttctatattgagattgaatagcattaatcgtgtaatgaattgcactttcattaattatgaaactggcagcatagaaccagtagctccatttctttctttttctctttcaaaaaaatctaatccttggtacatacatttcagctattggtactcttagctgggaaaacgaaaatgtttttttgattaagtgtaagtaaattttttgtgctctaactcctaaaattggcaattttttttttttttttgtaaaaattataaaattatgtcaacacaattttttttttgtttttactctttatacatctctagtataaaaataataaaccgttttttttttgttgttttataatttaattatagttgtataattatattataattgttgtgagattattttctagttgttttgtagtttatttttttattcatagttgacgtaagtttgatttctcgttgtttttaaacattttgttgaaaaaagtgtattttttataattttaaagtttactggcgtattttataaatgaaaattttatattaaaaaatgctaattagaattttggccctaaactttgacatgtaccaaatcatgccctgactttaagtcgtaaaaatgccctgaactattgagattgttagatttaaagaacttttgtctaatttctattcaa

SEQ ID NO: 194647 - DNA, 1219 bp, Cannabis indica
aaacaaaacatgccgtggctacagtgcatggcatatatgccgtgcactgtagagaaactatcaatttgcagtgtgtgttgctgcctccttggatcaatcctcaacactatagttttaatttgccgcctccttggagttggcctaagcataactattttacattatctgaatcaaggcaagatgggtcgatgttaaagtatatggtacctaaaataaaataaaattttaaagtttctatacatagtttaataattattaaaataataattcttggtgaatgtttttaaaactcgagctctaatatttaattatttataattatacattaaaaatttttgagttaattgtgataatactttcaatagttttactctgctagcaaattaaataattaaatattttttaactctaaatttaactgttaattgttggattgtccatgtaaacatagtgtacacgtgctatcgtaattttaagggttttggtgtaaaaatttgagttttggaatttaatttcttgaaattattgaagattttgccacaattaacttaatatgttttaaaaaataataagaaaataaaaattgtgaattgatccatctacctcttaaattaaaataagaatatttaatatttatctatatattactattttatttttataattttagaacctatacgtttggggctcgagatgtatcctacaagtaatgtaactgaagaatctatataccttttattgctatgaaaacatgtaaaaaaattgaattttattgtaacaatatatatgatctaaatggatcattattgttgtattagttgtacaaaaactatgattaatttgttaaacaatgattgcatataaccataaatttgtttagaagtcaattaaaaacaaaagcaataaatgggaccatgcaaggcctaaaatgagtttatttgattagttatattattacagctcactcattcttgttgcttgtttacttgtttatgcaaatcttctttcggtcttttacatgaagatgcttgcatttggtcgacatcacattttccaataaccaaagtatctttacttttattttaatttttaattttctaattttttttaatgtgattttttatttttcaaatgattagtttttttaccaccacgctcttaatagcgcgtgtaatacacacactctcttcagaaacacaaacaaacaataatcccccga

SEQ ID NO: 194648 - DNA, 977 bp, Cannabis indica
aaattaaaaaaaagtaaaaaaaacttctcaacaacacacgtaaataaaatggtggtattttaaatttttaattcccaaaaattcattttccccttcatttagtgcggcatgatggaaaaaaaaccgaaatccctatccccaaatacctaaatagcctcgatcttagctctctcccatccgttcatgctattctccctacctttgtttctttccccatcttagtctttctctggtaagaattatttatttagtttttcttgggtttatccttcctcttcctcttcaatactcaaaagactcaattgattctcttagttttatttatttttttctattattatgactcgatatgcatgcagttttgcctccacatccgactctggctcctcccctcagcactctctttagctctacttctcttctctacaggtatttactggattcttagcttggtcatttctttctttatttatttttcatgattgaaagtcatttactttggatattaatagaatttgtttagaaattattttcaatctattttattcatgattatatatatcccatttgttatgaaatatatgtctgatattattttgtgtttatcttgattttgattatatttttatggatgatataaatatatatatatttgcgtttgtctcagtttttgataatgactatatttatgatacaaaatgtaacattcaaagaaaattgttaaaatcattcatgaatcttatgattataatggtgtgcgaattgcaatattactatcactacggaataactaaatatttctctaattcagtagtgatagtaattaagaaagaaaatttgttaaaatcattcatgaagattctgctttcacaacttttttgatgaagcttttcccatgttaaagttggttttgaaaattgaggattttgaggatagtgcttgaggcttatttggcacaacttgtgttgattgtgttt

SEQ ID NO: 194649 - DNA, 1188 bp, Cannabis indica
tttttttttgtgcgtaattgtattgtttatttttttttttttgtatgtgttttgtaggtttgttccgttgttgactccgcagagctttgtagacacactcatccggacaggtttatttattttcatattcagtttgggcttaaaatttctcatttttgaattgctcacattttctattcgaccagggaatttgttgaggaagcaaacaatgcgtggatgaaaattaacgagtatctacatgtgaggtgaccgtgtgaactggctttaacttgctctagattctgcttttgtttttgttgttgtattcatgcaatgtatgaacttgaactaattcagtgagttgaaagtgaactgaccatgataagataattttgctcagtggtagtggcaaacacttgcttggcatagggaaatggtttttgagaattaagtcaagtaagatgacattaataataataagaagaagaattaaatgcacaattccaattatgtgccaacgctgtagtttctgttcatgttattaatttgtatttttttgcttttagtagttgtaattgtgatttgttcctaatgaaactttttcattgttacattcagtatctcaatactaatcataccctttatgatgccgtgaaaaaagctgagcaagaaagtcatctgctcaccgaggaagctcaaagagcagcgcgttacctgcgtattgactttgagaggggtggaattcatctttctactggtacttattgtttttaattcttatttctgttaaagctttgatctaatctctggaataataccatgttcttttcactttccagacaaactagatcgagtaaatcaactaagcatagaaatttctcaactctgcagagagtaagtttcatgttgctgttaattcttgcatgtactcgttcatgtttcttttaactgatgaactttgataaaaatcagagtaaaaagtttcaacaagaaacataaggggaaccttcaagcaaaagataaataaataaaatacgcatcaaataatttctgtcaattatgcatataaattaaacgaaaagaacataatctagtgtttcacctaaatttagttgctcgaagtaagcaattataatattagtatgttggcatagactgactggctggctcacttcttattcattgtttatttccatgtgtttacactct

SEQ ID NO: 194650 - DNA, 1466 bp, Cannabis indica
aatgctgcactctgtacttttgtttctctcgtttatcgaaaaaagcttttctctcaccttttcttttggatgttttcatttcatgcttccccaccttgtttttttccctcttcttcttagacctcccacttctattatcacagaatagaatcacaaacatttttgccaacccattataccattttccctctatctatctattcttctacctttgcttgattcatttattcattcattatatataaatatagctttttaggttacttattaaggctgctgattctttaagagaagattttgcatgttcttccattagttgtagaaatatgaagaatccaacttggcacaatcctttggagaaattaggaaacaaatttctttccttttaaactctccaaatctttatgcaattacacccaccaccacctcaaggtattattatacttctttcctttatgggcatatgctaaaattttggttgtttttatttttttaacaaattaaaatcgtaatctttttctaattgcattttgtctttttaatattctgtgattagataccaatcttcattcacagaaaaagtaaaaaaaaaaaagttccaaaatcacatgcaatggagcctagttggctcttcttattatgttttttttttttggttagttttaaaagcaaaagatttgagataagtacatttactttgcagcagcaggctaaagaagaaaacaatctctcttttctcttcttttggggtatttttttaagaggcttagccaccattattgggcttctagtttcctccatggcaaccaagatgaaaggaatctacaaaagcttcaaatttatctcccaaatctttggtaatcattttcaatgcactatttcttacatgatgattaattgatgttgttctttgaatacatcattatatcttttgtatttatttgcttaatattaaaaataaaaattggatctttgttgtagttgtgaaggagcgagagatggaaattgggtacccaacagatgttaaacatgtggcacatattggatgggatggcccatctggtagtgcacccagttgggtatgttgtccacaaaattgtttcattatctctaattaataatctcttttttatatttttcatgtcatttatcgtggctcccatgttcttttcttttatattcttaaaaaaaaagtcatgcaccaatatgttaaaaaaaaaaaatttaattttttttttttcttcttccagatgaatgatttcaaatctagatcagatttctcagcaacatcacttggtaacaatggagttagtgagggaaatgattccaattctatagccctttccacgtggtcttctcaaggttaatttgcattgaagtacctcttctttgtgtctttttcttcttttaagcttttacatcttaagaacaagtactatgagtttttgacactttttttttttttt

SEQ ID NO: 194651 - DNA, 1392 bp, Cannabis indica
agtggttttctgaatattttttggttgtatagttattttttagttatttttttaatttatgtatatttgtgatggtgtatatttttagtttattcctaataatatttttttgttatatatatgcgtttggtttgttaattttatgttgtattttagttatttttaagtggtctaatcttaaatcttaatcaaagaacattaatgaattacatgaatttaacgttagacagaattaagcaaaaagatggggggaggggaggcatgcttgtaaatgttgactccacctcatttgttgggcctacaccaaaataagaacttgagatcgataatgtttgaatgtaaaaggcagctcatcaaaagttaaaagctttctacaagggaagtgaatccttgcaaagtattcttattatctatttaaactggttattaccctccctactaatttggtaagacttaatttttttttgttctatcaatcattatagatggataatgaatattcatttaaaatgttaatcttggtatagtgacagtaagagtttgaaatgaataaattttttgcttaatattagttttattacttttcctttcgatgccatattagggctcgatcctaagttctgttatttccatggcgggtcgcggtcaacctaggaagaaagttgtgaggggacacgatggagtagactaagatgatgagaaaaaaaggatcgatgtgttcggacaaagttcttaaaataaagtcaagggaggaaatcgtaggggtttcaaccttctctatttttaggagatgagattgatgaggaagatgaaatggggatgaaagggaattggagagggaacaggagactttatctccttttacaatactaaaacgtgctgaaaaagagcaggacatcaaatttgaattttttactaatctggagaagacgaagatgtgtgaagagaagctcgatctggtaagaattctcatcctctgattcttcactctgggaaactaatacagaatttaaataccaaatttgaggaatctaattcggaacagaaatgttcatctgggtaaaaattgaaatggaagatattaaagaagagattgaattttggaaattagccttagtttgctatgtatgagggtagatcctccttttagtgtgtttaatggttttgccaatagaatatggaagaacaaaagtctgcagaaagtgggtttgttagccaaaggaatttatattgtgagattcttgagtgtagctcagagagatgaggttctttagggagggtacttattttttgacaaaaaccagttattatgaaagaatgggatccatacatagatttcactcggaaagatgtttgctctgtagctacctagattcaaattcatggtttgga

SEQ ID NO: 194652 - DNA, 1287 bp, Cannabis indica
aaaatgcatttgttgctcattttaattgagctcctagccttttctttctttttttctttttctttccttttgggaaattttatactattaccataaaatatcattactcatcaaactaagtgcttacatttttgttttgtatcacaaactttctttcaattttgtagtccaatatacccattttttttgctaattagttaggggttctaactaaacatttgataataggaacaaaaacaatataaatatgaggttttagtatagtgcacaatagatatatataatataaattatcaatgattttattggcagctactattaaattatttttattattacaaaacttattactcatcaactattagacatttgcctatggttcagaaaaatgatcaataattttctttacatagataataatttaaactaattattcatactttttttatttttactacgtagaggtctgggatttattcttcatgcttataaatttatcacatttttcattcatttcttttcatcgcctcattacttctcatacttttttttactctgataccatattgaattaaaagaaaacgattattcataattgaatgtgaataaattctcatttttgaattagagcaattgctctttttatatacaacatgtagctttacaatactgagcttaacagactaactgaaattagttacagtgcgttgtacaaaatgaataacaaaccaacccaactaattaacataactaacagctcttaactaacacgaacatcacttctcatacttgaacatgttttcaaataaaatgtcaccttgcctttcacatatgaatcctattataattatatttaatatatttgagttttgtggcttatgtggtgtttttggactagttttgtaccacagtaattgtttaccttatacatattaggaataataatgtgccaattttgacagtttgtttagtgtcttttaacactaggttttttcatgttttgtcacaatgggtattgccccttttgatgctagttttgtctaccattataaatttcaaagacttcaaaaaaaaaagttttattttaccaatttttagttcacgttggtttatttcttttttgaaaatatatacaaatgagtgaaaaactcctgttttatgatgatgccttttataattctgatcctgtgattttgacaaaaaagataataataataaataaataaataacaaagtcttcccactgattaagatattttacagaaattaaataatgagccaattatt

SEQ ID NO: 194653 - DNA, 2905 bp, Cannabis indica
tttcctcaaaaataggcttgtatcagacttgctactggtgaatccccactgtaaaagagatgtttttagcttatcaacaagctcttggggcttgttttagcccataaattgctttttgaagtttgcacacatgattaggatattcttgactaatgtagccttgtggttgtctcatgtatacatcttcttgtaattccccatgtaagaaggcattgttgacatctatttgttgaatttcccatccatttgtgacagccaatgtaaaaataattctaattgtgcaaggtttaatgaccgggctgtaagtctcaaaaaaatcaacaccaggaatttgttggaaccccttggcaaccaatcttgctttcaatctttcaacagtaccatctgcattaagtttaattctatatacccatttattgtcaacaatagtcatttctgatgttggagggacaagaatccaagtcttgtttttcttgagggcatcaacttcattgtccatagcatgtttccatttaggattagcaagggcagccttgacagatttaggttcttgttcagtcatagtattagcaagatatgttttgggtttatatatgccaagtttggaccttgtgaccatgggatggacattggtggctgtggtattttgggtttgtgatgtagcagaggtagtgggagatggtgactggtttagttgttgtgtggggaatggatcagatatttgctgatgtggggactgatgttcgagttgttgactggaacaggtgggagaggtagtaatgggggtgtcagtattaagagtaggaggtaaagtggatgggatttgaaacatatttggatcaataactttggggacttgtgtagtgttggaagacaaagtgcaaaagagatccttgtaaggaaattctttttcattgaaagtgacacttcgggcaacatatattctaccactcggatgtaaacacctatagcctttagaggtgatactataacctatgaatatacacttggaagatcgaaaagaaaccttatgattttcatatggtctaagaagagggaagcaactacaaccaaaaactttgagaaggttgtaatcagggggttgatgaaacaatttttcatatggggagacatagttgagagtgggatttgggaggcgatttattaaataggcagcagaagtgaaagcctcccaccaaaaatgtaaaggcatttcagcttgtgctaacaaagtgaggcctatgtccacgacatgtctatgtttgcgttcaacccgaccttgttgttgatgggtatgagggcaagaatttcttttgaaaatgcccatcttggcaaacaatttatacaaaggttcatattcttttccaagatcaatttgaatgctttttattttagattgaaaaaatctttcaacaaaggcattaaattgacaaaaaattgaagtaacttcagacttagtattcataggaaataaccaaacaaatttggtaaaatcatcaacaaagcttacatagtatttgtatccatcattggatgtgtaaaaagaggggccccatacatcagacaatatcaattcaaaaggctttgttgttttatttctggtagttttaaaactgaaatggtgaagtttgccaacttgacaagcattacaaaaatcaacttgagtatgtttgtgagtgggaacaatggttgacaagactttatttagaacaggttgggagggatgaccaagcctgtgatgccaaaccgtggcaaaatgctggctgtcatgaacaggattgcttgtagtggtgaaattaaaggcttgaggattagtagacttggtggtaggattcttggatcttggggaaggaacttgtagcttgtagagaccttcacacaggttaccccgaagaagaacctgcttggttttcttgtcctttataaggcaacaaatatcatcaaattcaagaataacttggttatctttggtaaattgggaaatgctaagtaagtttttggtaacacttggcacatggagtatatcttgtaatactaaagactgtgaaggaaaatttgtattaactgaaccagaacctatatgcaagatagggagagaagagccattacctacaacaactttggcctttcctttgtagtcagccgaagtggagagattttgagtgtcattggtcatgtggtgggtagctccactatccaagtaccaagcatgagagttgtcatggctgctgtttgtttctgtgagtaaggcttgaggtgaatcatcattgttttgggtgggtgaggaattgggttgagaacctgtgaaattgatatcaaaacggtgataacattttaccacagtgtgcccagttctgccacataattggcaaacaggtctatttcctcctcctcttccacctctgtaagaacctctaccgccccttgtagatccacgatttccacgattataggttgttcctcggcctccattgttgaaactggtattagcaagatttgcttgaatattagtcaacgtgtcagtcgagagttgttgaattctcatttcttggctttgtaacataaattgtacttcttgaagattcaaagactcagatctggatgtgaggttaaccacgacagcttcatactcagatcctaaacctccaagaatgtacagtacaagttcatcattcgacaatggttggccagcagcagcaaggctatctgcatattgtttcattttcaaaatatagtcctcgatcgattggcttcctttctttgtcgactgaaggagtcctctgagttggagcaatcttgctctggatcttgttgcaaagagttgagagaaagtattccagatctcagccgaagattgacaatgaatgatatgacccaacatattgtcagaaacagaattcatcaa

SEQ ID NO: 194654 - DNA, 1419 bp, Cannabis indica
caataagagttgtctatgaaattttctttgacacatatgcaatgtgattatcattttcaatacaattttgtcaacaacaagtgttagagatacactaagttattaagaataataaatttaccttttgcaacagaaatggctgatagaagaggcccattaaaactaggtgggtcgaatgaactagtccctttaccagcccagtacaagtgaatctccaattgatgagtactgacggtagtgttaaaagttaatgattttgatccctcaaaaattggcccgtaccatcttactctgtaatattaattgtatgttttttagtaatttcagtattgtataagtatacgtacgaaagtacgtaattaaagaactatatatacatattacatacctgaatatatatgtcgaatacacgtttctttgggcttatataataatcattgtcatcgtcattgtcattgtcattaaaatcattatcttcatcgtcaccttgatatctatgtctgtatataatctcagcgaaatgaagtgtgacagtataattaccattttgtaagcaatacccaaagtactttagagacacgggagccagtcgagctgtctcatacagacttgtttcatcatttgaaattctacattcggcctttcttatataatcactggaatttgtatcatctgacaaaaagctccccgaaatactgaaagcccagttgtttgatgaattcacaccatatagtgttgtttcgatatcttggtcataacgaatttcatttctctcagaaacatttatttcctcaccaccgcaatttacgtacatcgtactcttgtctgtttaattatacacgcatgcatagcatgtacacaccacagtaaaaaaaatatattactcagttggggagaaggcatatagacctcaaaatggagagatgaaactttgaactataagttacgtaaaatttgaattatatcggccacatgcgttattcgttaattgtaccacacctctcctgcaaatattatatattcagaaatgaaaatagtcatacaaacagagtatatattgtaaaagaattccatgcacgtacattttgtctggacaagtgctgcagatcgggcaacaggaaaacaagttgctgcgacagattaaagatcgtaatatatagaggttagattaattaagagaacatatatataaatagtggttctccattcgtaaattccttacatattgctctttttgccatatacatatacttcagggctcgcgcttgaaaagttattgaaacgaacatccctgaaaaatatgaaactattaatatcaatattcatgatatcaaagtgttcgcaaacatcattttaattttcatttggtttaaaaaaaaatcccaaactaagtagtatatacgtggtaagcttgtttag

SEQ ID NO: 194655 - DNA, 748 bp, Cannabis indica
gaatgagtttcattcattcccaagtgatgagcaacacaacagagtggaaccacattgtctcctgacagatgaatttcatagccgtgacagaagcttataacaaggcccatagtctttgaattcgcaggaatttcaccaagaaaaggaggaagatcttttggtgatccacgtttgagaattgaataaatgttggcacattttgtagccagaagttcctgtgaagatataatcaaatatcatcatcattataataataatatttattataataatggcctaatgaggttacagaattacttacatataactccatatctgatgaagacacaggcttggcaatcctgagaagattttatgagtcagattttgagctatcaaatgaaaaagtaattaataaggaatttgttaccatgatgaaaggacttttcctggtgaagtggacatactcctttgagtctccaatggagattggagagatgaagaagaagagatttttaaatttcaactgttataagtaacttagcattattagtctttaagtcgggttgtgatattgtgtcaaaccctgtgagcgtgtgtgcagtaaaatctagagttattaggattaaaggttgaaagagtaattggttagttaaagattaagcaggataagaattactagaagcaaaagtgagttatgacgttttctgttataatggtacaacgttcctatttcaaatctaagctgatcaattaggatttgtatatt

SEQ ID NO: 194656 - DNA, 3237 bp, Cannabis indica
cattggtaattgtttcctttttttcttaaaaatgtctcccctcttatcaggtcttgttcttagtacatatttggcattgtaactaaataaaattgtgtttgaagaataattaagtgtgtttggccatgtctcttttcaaaaacaaaaattttgaaataaatgttgtttttattttaaaaataattgattttaatcaatattttttttcaattttatctcatgcggtattcattgtgtgtgaatacattcagcaacacataaatataattttttgttggcagctatccaaataatagtctacaaacaatatcataataacaaaaagtgacaattattcagtacacttagatgaataacaacttgacaacaacacaacaacaactaaataacttttatctgttccaaggagggatcagtttcaaaagatgttattttggttgatactggcactttgacaacagaatcaatcatggagcaacaagaaaacaaccaaaagcaaacccctgaagaagttgaatattgaaaaatctataattatttattcatcaataaatattgttttggttgaaaacaacaaaaacaaaactacacaatatttacaaaagaataattaagttgttttgatgttattgtgaagattcttttgtgttatttttacaacatcttattttaacctaaaaataaagtcaagttgttttcatgttgttgtaaaatttgttatgaattgtttatacactacactggttgttcaacaattagagaaatagagttttacatgttaaaacaaaaatttatcttatcttatacattcagacatggaaaataataagagaacacgcattatgttgattttaaatcaagtgggggcgtttattataaatatgaagaaaaaaataacttatattagtaataacattatttgttgtttacagttgttttaaagttgtaaacacgtttaattttgttactttttaaacatattattttcacgtcgtttgtacgttgaattttagtggttaaaatttgtaaatttcttaaattatatatacatttatttttatatttttatatcattgttaaataattgttaacagataaaaaaattactaaaaactattgtcttttttcttaaaaaaaaatataattataccaatacttgatgtagaaattaaaaatataataatagttgtatctcactttactaaaagattaaacaaattaaagaaaaaaattataatatttaatatcccgtgcaagatacatgtaaaattaactagaaaaaagtttaaaaaaaatatgaaagtaaagtttcttaaaaaaatgttgctcttcagcactacaactaaaactaaatacatttctcaatcattaaatccatgcacagtagcttcaatattcttggaagacttcggtatattttcttgtacactttcaatgtatgcaactcacttcattccaccaaaagaatagaaataggcaacaagcttattctggtcaactttgaagttcataataaacattaggtttatgccacttacaaaaactttaagtacttatgcgttacatttttcttaataaatataatgtagatatacatagaaaaaaagggcaagggaatttgaaacgtgaaagcatcttaacaaatttattctatttaactactatatatataaacaacaattatatattaatatattgggtaaatagcgaactaagtatctaaaattttaagtttgtaagcggtataaagccaaatatttatttttagcggtatattaatacagagactgtactgataaaattagagaaaaattataattttacaaacattggatacttatactgctaaaataaatattgggtttatgctaattataaaacttattttagatacttatgtcgctatttatcttaatatattttcaaatctcagggtgggcttgagctctccctcaacacccttaggtctgcctatgtcgccaataatgctacatgtgttattatcgttattgagttaattaagtattaggtctatatagtttaatataataacttttagagagtattactagtcaattgtaaaacgacatgtctagagatgttagacaccattgaatactctaataaaattgcattgaaaataatgaccacattgtatatatggcaaaaacaattttatgagcaacctctattagaaatgctataaataaatcaataaaaatacttagtatatttaatataaattaagttaattcacttgtgagaatttgattagacactactttttaataaagaatcttaatttctcgaagtgacgtgaagttttacctaacaccccataaagttagttacttttttaatacttttaacaaaatcattaattaaacataaaatttttgcacgtggttgttttagtaaggtacaaatagcagatcttctatgacaaagaaaggtttttctccttcggtaaaccaaaccaaaaaccatatcactaatcagtgaaacattacaaaacagaaacttgtgatattaatatacatcattttcttctttatcctatctttgaattttaatacgacctgtctcaatcaatcttagaaattaatatgctagttttcttcttctcctttctatctatatattttgctgaaaatgagagcctaacattcataaacagaaaaacaagaagaagaagaagaaaaagaagataaagctttgtctctgaagcttgcaatggcggtgacaaaaacaagaaatggaagtttggttttcgccattaatggccagaggttcgagcttccaacggttgatccttcaactactttgctccatttcttgcggactcagacacgttttaagagtgttaagctcagttgtggcgaaggtttttttcattcttcacttcatctatagttttcaatctcttaatgtttgtaaaatttgagagtttaattacaaatgatatgataatttcttttttcttctattctgtctgtctgcctctctttttctttgtttaatggctaaaaaagtaggttgtattagaagaagataggcaaccagagatggagtcattgatttgttaagagcaattccatgttttctcgcagtctgaactcttgtgtattttgttacacaagtctagattagaacttgccagtattggaacctaggataacaaaattattgggaaatctggtaaatatgtcttttgtttttcaggtggttgtggtgctt

SEQ ID NO: 194657 - DNA, 2836 bp, Cannabis indica
ggtttgtagggttagtcgtcagtttaggatgcagctagagtgacgtactcgtgtataagagtcatcatttcgtaggtgtaatagcccaatgaaggcttaaagaggggatattacaaatggtatcagagccttgaccaaactggaagtgtggtcgatgaggacgtcgaaccctgtagggggtgattgtgatagtcaatagtctcgtgatccgcaaggagaaatactgggtaagctgtgcaatcccacacgacctggggaaggtcaagtgtgatgattctaagactatatagatatgtgactacatagttgaagagggcttaactggattaattggtactacctatatcaaaaaggtgcatcttgctttctagtagcccatcacgaaagaactctacgattaagtgtgcttgacctagcataatttcaaaatagatgacctcctaagaagttttctcaagaagcgtgtaagtgaggacaaaatgcgttgaaaatactcgtattggtttgtagggtcagtcgttagtccaggatgtagccagagtgacatactcgtgtctaagagccatcattccgtgggtgtaagagcccaatggaggcttgaagcggggacgttataacggaagctttcaaggaagcgatatggcttcacagaatactctatgaattaaaacaaatcaaaggaggagtgactatgtattcggatagccaatcatccatccatctttaaaagaatccaattcatcatgaaaagagtacttaacatatagatataagactccataggattagagagaagatagaagaagggctggttgatttagataaggtcaaaactgaagataatcctattgatattgggactaaattcttaaccttaaacaagttcaagcattgcttgaactacttgatcaatctcaaaagttagtatactgagattcttggaacaccaaccaatgacggctgcattctttcttcatcatcgtctttcttttaatttgaagtaactaggtggaatttgtacgtggtatagttcctctaaataaaaagtctctgtaaacatcatttttgaaaagttgttcactcgcggttgccagtcctagaaggagtcttgtagaatgatagtctggatgactatcatgtccactccaggttcagtcttcaggatagctagccttctcttgaaaagaagttccagctagctagttgtcactcctagagtgttagatctggatagtcgactccagtagactcaatcctattcagaagcgtcttcagtgagtgtccttggtccgtgagttcgagaactcatatatgttctcagagttggttaagttgattatttctaactaacttaacaacatcgtttattgcacccactaactttaggatcttgatcctgagcctataaataccacattcacttatctttttcaagtagagacagagacatgagtttgagaactctgttcagatgagattgagagtttgagagagaaaaaggttgagaggtagggagagaggtgtagagaaaggagagagattaaatttaggttttgtaagaagaattttctgtaaatgaaaaatattcctgggtgtaagtgtgagagtcaaaacacttagtgaggactcaactaagaatctcgcctctattatattgtacttattcttgctcgatcaataaatgaggattatgatggtgtttcataactggagtagagctatagatcaaatcaatttattagacttgaactagtatatatcacatgttgatttttttattgtatgcatttattatttttggttttcatgattctctatttgcccttgttttctttcaattattgttcttaaaatattaattttgtcattgttaattatttaattattagagtttcgttaatttaattttttacatttaatcgtaattttcctacacaaattaacactcatttcatcaagtcatataaaagtttacgtataaattaatttgatatatataaaaagcataatatatagccttaataccttgaagatcccaattattaatgccctaatattcgatgacttgacccttttatagcattataatatgcagcaaaatcaccacttgattaaactaaatagagaaaaacataataaaaatttaaaagacaatgccatatataatatattataaataaacaaaaagtaccattaggttttaaaaacaatattatatattaaagcttgtattaatgaaacaatatggtgaatgaaaatggtagctttactatacactattatatattgttgtattgtttgtacatattaattcaatcacttggatctcaagtacatggaatatataatataatatatatatatataaataatctacttatatatatcttaaaagcaatacattgcacatggagcaaaatccaaacgtgtttggtaaaggaccgttgccaatggagaacattataagttacttctacatggcatctctcacacttatgtatctagatagtttaatcttctttggtatcaactcaagtctcacattctaaataaaaagataagaattatctaaaatataagtattttactaattctattagtatcaaatcttttgagaatgtgaccaaaaacaaaagtagaaatatatattattattatgttttattgattcaaaacgaataatatcatcctcatgtgtgaattgatgtgaggtgacgacctaacaatgtgaaagaatagagcccaaatattattattattattattattattattattattattattataaaacagtgtactagtatacatcgtagttatttaaaacacattgtaa

SEQ ID NO: 194658 - DNA, 1471 bp, Cannabis indica
caattgggtcaatttatttttatcaaagattgagactttttattcttatcatgaatagtatataatatatagtcatgcgcatataactccaaactcatcaataacaacaataacaagctaaatagaaatgctgaatataattggtgtgtagtatttttttaaaggtgatatttttattagtgtaattaattaattatggagttttatataatttaatttaataattttaaaaaaatatggtcacaaagtaatattctaaatttgagggtgattaacacgtgtcacagttaaagattggatttttattagtttatgtcaattgggtcaatttatttttattaaagattgaaactttcttatcaagaatagtatatatactctgttcatttttgaagtactttttttttttttttgttagttggacgattgggtactttgtcgtatctacaaaaaaacaaatgtagtacaacaacaacatcatcaaacgacaacaactatggcaagtgattatcttaatcatcatcatcaagaagaagaagaagaacaacaacaatttatccaagaagcccttttgtcatcttcttcaccatcatgcttaaaaggggaccaagaaaagtactactccattatcaagcctcaaaaatcttcttcattctcaaacttattggattactctatactaagtagtttattatcagattgtccaaataataacaactcatcatcaattgggtttggttgttaatgatgattatgataataatcactacaacaactcaatgattagtaatattcaagaccaaaatcaacaccaacaacaactacaaagtttcttcaataatagtgttactaacactcctactgattcagttaccggtaattacatggttcagcgaaattgtcataataataataacaataataataagcttcctcagcttgagcagctaccactaccgccgccaccaacaagtgtcgaaaatcatcgatttaagcgccaaagatcgagctcggatgaattgatgcaatgcccaccacaaccaccatcaaaaaaatgcatggtgaacaataattattgcaataatgttcaatcatcagctgagtacaattatgtgaatcagtacttgttcttgaataatcaacaattgtttttgagccctgagcttcaatttcaaggataagacaataattaggaataagaacacacaagattaagaaaaatattgatgagaagaagggtaagtagggacatgtttgttgttgttgtgagatttttatgttgttagaaagaggaatgtttggataggaaatattttggtaaaaaagggtgttaatttaatatattagattaaaatatgaaagatcattactcatcaagtagaattgtactatatatagtttcaaatgattttattagagattgattttacacttttgctcatatattatatattgctaccattacgaagcc

SEQ ID NO: 194659 - DNA, 1161 bp, Cannabis indica
tatatatatatatatatagggtcttatataattatccccatgtgaaacccacaccattacatatataacatattattatttctttctttctttcttccaaagaatctaattatataaatatatagatatatcagtcccacaccaattacgtcagattttaaccctgtctttaattctcacatgtgacatccacaaccacaaacatatatactcttttatatcatcatatatttatatttttaaaaatatactagtaattctcttactatattatactaatatcttgctattttttacactcaaaataaatcaatacaaaacctattattattttcatctaacaccattcattattttatttatttcatctaatatacaagaacttagaaaagataagttttataataatttttttcttaaattggttaccatatttacttgataattaatttgacactaataataaatttcttgtttgcaaatatattaggggacaaaatacatttcaatatatttattgtctaataacataaacttttataaatagaagaaatctctccactttaccttttgacttttctctaaccaataacaataatattaaaccacctctacgtgtatatatatatatacgtatatattaattattatatatatttgtcatatcacaacactgttaagattacttagttggatgataaaaaataaaataaaattgttaaattagctagatgcttttgttagtataagaaaaagataagatataaaaaagtgcatgcatgcagaaaactttataatagatatatatattatatgacactgcaaagaaaagataaataaaacttttgtaaatttttgatgtctttatatatttattggaacacaacacagtacagctagagacccttcagcatatttttatgtgttgttaggtatgaaaggggcttgttatggatatggtgtaccaacaagcttataatataggtcggtttggcctcatttcatttctactcattaatacattatatatatatacaccataataataataataataataataataataataataataataataataataatagaatacaacagtgtgatagtggcagtggtcacttgcttggtaccttgtagtagttgtttttttttttt

SEQ ID NO: 194660 - DNA, 1213 bp, Cannabis indica
tataatttcttttaactctttttctttaattaactggaaaaccagggcacaatagagtggtttcgattttgatcaatgtattactgtttttgtttattttaccactttaattatcattttggtttgcaaacgatcaagatcaaacaccttttactttgagtgtacagacaactaatgtttctttccatatcaactttgagattttttcttctgataagaattgatggacgtggctatcttaatcacgttaaactttatattttttcacttacactttcacctttcactcttcttaattattattagtaatatatattataattaacatgtaatgttacatattttctatagttatattatatgtaacattttatacgaaaatatatataattatgtatagatggtaatgaattcgttatgtatatacaagtgtaagcttttgctcgatacgatttaagcatgtgtaattgtaactggtatatacgacatagtttgaaaacaatattataaactatatatgtttgttcatataaatctaatattgggtagattacataactgtagacaagaattaagtttcgaggcagaaaacatgaacttttgaaattggtttacattcatgattatgtttgtgactttgtcgtctccacgtgaaagatttatgaaaaatttgctaacataaggcattacatacgctacctccatatgatcacacctatttattcttgcattatgtatattctcattttttattttatttttttgtatattctcatttacttatatacatattattctaaaaaaaacacttttgcaataatataaaataaattattttagtcttctttaataattaatcttaacataattatcaaaataacaattattttgtaacctgtttgttaagcaaaataatgaagactaactattcattttatgtgaatttattttattagaataactataattattagaagactttttttttatcagctaattaggtacgataattcattaagatataaaaaaaaaaatatttaaatttagtctaatcacaataattgaatacccatttgcttcacatccatttctgccctttagccttatttaggggtgttcatcaaactatttgtatcgcacaaattactggcattgcatagaaaatatagtttaaaattatttgtggtgcagttattgatgtgatcaatgcatg

SEQ ID NO: 194661 - DNA, 1620 bp, Cannabis indica
agtgatggacaagtcaaacactcccctgaagtattttatgctggttctttttggaaggtagtagactatttttttcttttcaacaaagaataaatatgactgtcatattcctgtatctgttttctgtattctgtttctttcttaaaagggtattaatcttgaaaaaaaaaaatgaataaattatgtgttttttcctattcctacatgttactgatacagatgtgatctatttgattgaatatttaggtaagcgttcaggcctttaatgatgaagatcctcaagggcgccgaacacttggtactttccagaaacagttttacatttttatttaatgtattttgttcttcttgttccatcagtcatctaaagtaaaaggaaactgtgatggtatttcttttttcaggattatttcttcaccgaaggaaagcggaaaatacagattcttttagaaaggtcagctcactctttctttgtatattgtaaagatgaaaagttcagcaattcttctttttttaaatctcattaaattagtacctgtccagtgatttggttaattagttcatctttatttgttgctcaatctcatgtgtccagtttcagatgtatgttgactctcgtgaaaaggtcactgctcgttatcaggtactaaacattctgtgatcgatcaatcgaatccatgtaacacaacttaatccagaatcttgtgtttatgatcccttgttctgctataatccatcttacagttaatttgtccgtcgaagagagaagttatgtttttcggaagtttcaagcaagcagggactcttttacccaaagctcccaagggatggggctggagaacagcgctcgttgttcgacgagctgtccgatcttctccaaaaatggggtcctaagaatagctgctgttgtgcagcttgtgtgaaaataagcaagaagaaacacaagatatgattcttttaattttattagaatgtaaacagtttctattttattattacacgacagataataatggctttctgttagttgatttgtgcatatatatctatagtggtcagcatgtaataataaggtctctatttacaaatgaactcacattattattacattatattatacaatacatggctatttgggtagttaggttctatttacaaatgaactcacattattattatattacattatacaatacatccgatagtgaaaacagtattactctataagtggatatatattatttgtatcaatcactttcattttttcaccttcaaatcctaatcctaataatcgtttacttgttgtcatctctcttgtgttttttttccttattattattctttttttatttccatgtttgctagttcataagtaaatctgcaacacatgaaaaagagccacacttggaaggaaatctaatatctacaaaaactaaaatctcagtttcaatattacaattctatagaactatatataatggaatggtatctaacatcctctaccaaatctaaatatattaagcaaaatatatactaataatataataaaaatcacataaaaaaatagtgttcccaataagaatggtatctattaacattttattttatacttttttaccc

SEQ ID NO: 194662 - DNA, 2786 bp, Cannabis indica
cccaacttagaccttggaaactggaccccggactccaacctagaccttagaacccagacctgacctagaccctagactctgacccggacccggacccaaatcttagaccgtgacttagaccccaacccacaccccggacccataacctagactcggacctcggacctcgaacactagatcttaaacccgagccccaacctcggccttagacccagacccgggcccagacccagaccccagccttggacccggactctagccccagaccacggacctagaccagaaactagaccctaaacttggcctcagacccagatcccaaccttggctctggacacagacccagcctcgaccctttgaacacagaccccgaacccgtgttttttgtttttcatagaacacaattttatttttatttttattttttatttttcaaaaacaatttatattttaaaaacaaaatttttacttttgtttgtgtgattaaaaattttaaaaataaaagtgttaccaaatagcgctaaaactttaaacaagcatatagcaaaatacaactatatggattgtacaaaattatgagttagaatatgaaaatacaactagcgatgaaaaacggtgttgtcgtgtcgtattcgtgccatattttatatgatttatttttatattttttgctagaagtattggcccttttttggcctacgtgtaatttttgcaaccgtaatctaatctataaaaattatgttatgtatgtgttgacccactttaacttgtttagccactattgaagttgggaaagatgtagatttagaattctatgaaaaaaaaaaaaatacgtatatatatgcagtgacagagccacttacgaccacaggtagttgtcaccctaccaaaaaaaattacacaaattttgtataaagtatgttaatgaagtatacatttaactataaatttttttttattatttttcccaaaaaattatattcttacactttggccccaacatttcctttctttctctgctgatgtatgtatatatagtttttgttttaattattgataaaaattagaatttttaaaatattttcattttctttatttaaaaagaaaaattaaatttagaatatttaactcaaaaattacgaaatataaattttacatccctaccaaacatatatatttttacataattatattattattagtaatttatgatttcattttattaaaaaaaaaaaggtatcaagttcgggttaagcgggttgtgtcatgtttaatctttttttttattattattttgtgtgagtcatgtctaacatttgacttgcagctaatttttgtaaccataggccataaaattcatgtcgtattcgtgtgattgtgattgtgttgaaacccgtttaccatataaaatgaaatacatggacaaaataatagtttggaaaaattcttgcaatcttaaaataagatttatgggtgcataatttttcttttaacacatagaaaaacggtaattctaattttttattatgtgttattatttatgaaattgcagaaggtttatgaaattttaaataatttaagagaaattcataaatttatatacttcatattaattaattatattatatgttcataaagctttatttaaaatttattatatattttattaactatgaaaacataatcttaattttatatagaaattatatatggtaaaaataaataataaatatatatatatttgttattggtattctcggcagggtaacacgtgtacttcaattccaagatttattctattttaaggaggtccattctcaggcctaaatgagttggttagcccactaacagagtcaatatgtgactctgtatttagtatcctattaaactcatccactgtaaggttagatcgcacagattcaagaagggttcttggccaagagaaggaggcgcaatatggcataactggacaccctcatggagtattcttggaagaaccgtctaagagatatccagaagcaaagacttacatggggatacctttaatatgagatcccactaaaccatggattcaccttgcaccatatcctttgacatttattgtattagcacacaataattgtcaatattaaatggaccccacaattgtggatgattgttatcttgtaaattaagacttttttaatttatacaaacttaatattaaatgtatttaccccatcagtgggtctagcttcatagagaaaccctagtagtctaaaccctagcttttaattaggatatggtatcttcatgcaaagggttggaaaataattattcaaacactaacaaaaaaattaggattcttaagctcgagcaagaatcttatccttatgtaatacatcaaaaatttttagctaataatattgtggactaagactcgttaacgcccctatgtaaaaatcttggtcttcttcttttttatattatttacttctcaagctctatttgtttcataatcagtttccaaaaaattcgataaatattttggtgcaatcattggagcttgaaggaatatttttttaccaaatctgtcatttacaacaatggtggctaccagaaaaaccactacaaaaactactactcggaagggtgaagaagatacagctatggatgatgttaatgggccttctccaatacacactcatgcgggtactataggagaaggagaaacgtcaaaggtcagaggctaacacgctcataaagatccacaaaatggaaaacatatgtagggatctgctggaacc

SEQ ID NO: 194663 - DNA, 2151 bp, Cannabis indica
cacattcacattgcctaaatttgccaactgagtatataataattttgagtctaaccttgtgttcccacaggcatgaaaagaggtgtctggcacacatgatgagggagtgttaggttcgcagcacgagcacgattgaacctccctaatatctaagataagaaacacaaaaccaatcaagtccatgattaaaggattgacaattaatggaacaactacaagaactattcatacaactggttaaattatcgacatactggtagaagttgtaggaacaaaactaggaacagcaaagtacagaacactgaattagaaaggaacaaaattctcgtccatctttattttcctattattgttagtgttgatcgtccattaatatttgttgatgtataagctcaacaaaaaacaaaattaaccaatttacaaactgccaactattttacatacttttcctaatatcaaatattcaacccctcagtccaaaattggacataaaaatcagcaatcttagtagttagtttcatctaaacacatccacattacagcttatgaactattcatttacttcaaatatttttaatgcctcactcaaccacaatgttaacaaagctaacaaaaaattaagaaataaaagagttaactcgaattccaattcttacctcgaaacgaagagccattttttataagtctgcaataaaccctgaagtcaaaatatatatcaattatgactaaagaaaagattaagtattgaagaacatcttgaataccatatcaagctaaaccaaatgtcagaaccaaacaattattagaaacagaagtttataaattcgaatcattattgaatggtacatgtcgacgcaatatttcatcaacaatagaaacctggaggggaatcttccaagtctcccaaactatagtaacattctaagcctctcaaaaaatcatttttattttatactttcaaatatgcattattttaaaggtaaatatcattaattagtatgttaaaaccaaattatttgagtattgatgaaaacaatgatgatatcatattagatgattctaaccatttgttatgcaatattcaagtctgatatataatacattgaaaaatgcatcagtgcatacatttgagatggacaaaactcaacaccatgatgatgaggaggacaaaaaagttataggctatgtggtagaatatcctgataatgaaatgactgtagtggaggattacttcaaaaatgatcttattgatataaattcaacttgggcaagtgtaaaaaataagaaacaaagagatactataaaagatgataatcaggacagaaatggggcccaagagccaagtacacaggatggcaatccaattgggaaaatgggtatgcaacaaaagtcgattgtgttgcagataagtgtaccaaataaagtgtctaaaaaaagtgaacaaacgagaatacaagtgatttatcagaaagattgtccctttgttaactttggtttacattcaaagccctttttgtttcaaaattccaactttaatgtttttaacattcaacaacaagaaaagtcagtcaaatatttgcttacacacacaaacagagctcattttttagctttattaagaaaaaaggagcactgggaaccaaagctaacgctaataaaaaaaagaaaaatgagctaaaacaaaactcatcaagattagaatttaaggtaagaaaaaaacaatctttaacagcaatataagcaaatactcatcaagaacaccaacctcccttgctattgggattcggctgacagtttcttcgggtttccggcaatcaggcgttgtccaacttggttcgccggcgtggctctccaacttgcctcgctcagacggcgccgacgccggcttcaatttgtggtcggctaagatttatattgaataatgaagaagaacagcaacttcgcattagggtatttttctttttaacgggaaagcggcaactttaaaaatatatatatatactacttgaacttaaaaggcacgtgggtatttttatttatttattttttatttttttaaaatagttttgtggttggtatttgaactctaaaactcttattgttaaactaatcaaattattactgttgtaacacattttttttttttttttt

SEQ ID NO: 194664 - DNA, 1650 bp, Cannabis indica
atatagaaattatttactccatcaccattgtatttcattcaaaccttatagtaggaaaatagaaacctacacccaatttgaaataaataaataaataaaaaaaatcaaaccaaaaaaaaaatgacataattttccaattacaatagagatttttgctggcgccaaaaagcgcccccaaaaccatctttcaatataaaattaaattaattatgattttttccattcttaataaattatcaaataaatgatcgaagtatgaattaacatttaaaaataaaataaatcttgccaattattagagtaataattataatatatgtatataaatttatactcacttccacacttctttcctgctgatcggttcttaatgttgcatcgcttggggatggtaatagcaattcccgggttaatcccagcctgcttagccaaaggagagagcaaaacagcacaaagacacttaggagcactctttattaacgctccaactttggcacagcaagctggcggaactttagctttgacattcttcgccgccccaagacacgggctcatactcgccgcagctgaccttattggggtccgaccacactccccagctgcctcaacatcccatagaaacacatttgacacaaccaacaacataagtacaaaccaagccttattggaggccataatatattggtggtatataatttgaaaagtagtattttttggtgtgtgtttggctaagtattaacactattagttgtagtagtagtacatttagatgaattgggatctctatttatatatagaggtagaattagaagtacttgaaatgttgaagaaggtagggattttttgaagtagtggggtggttgtggaaatatacgtggaaggaatttaaggtgtttgtgatgatattgtttattcaaaggtgtaatgattttggttccctttattgccctaacggtggtgattgattatagagtgagttttaataaattaactatgaaaactttgtgagagtatatatatctggattttggttcacaattaaagtgactttttaagagtgtttttttgtttttcaatctaggatgttctatgcttcgacatatttagagtttttagttttttttaaaaaaataaagaagataggttattggctattttgttggtaggtgcagtgtgaacataagaattgttattggcacgcttagaattgtcctataatggtgttttatttatttatttattttttttttttttgaacaaatactataatggtgttttaaaaggacgtatataaatatatatgcaacgtgtcatgctatgcatatagttataatagtacataaaattcatctacgtactaatatgtttgtgtatcgatcttaacataattacagaatatgtataaaataaacaacgatataataaaacaaacaatattgtgtaaatacaattcacacagacatacaagtcacttttttttttgaacaagacatacaagtcacttttgatattttaataagtgaaacttattttaaatcaaaataatcggttaaagtgattttaccacgtaaatatgtatcttaataaaatgctgtaattttaatatttaatgcgtataaactgatttaaatattggtggagagatctata

SEQ ID NO: 194665 - DNA, 3676 bp, Cannabis indica
ctctgctgacttgctggggatgatcgagctcatttgatggtaagattatactattttatgctctttaacatctattgattagggttggactgagcactacatagcacttggcgttaaattttgaactgattatcaatcttttcaatgttagagattcaatcacaagacgttacaaatgatgatttgctgaacagatcaaatatcagaaattcagaccaccgagtgttaatgaaggaattttgctcaccttggtgttaagcttctttgttgagtaaaagtaaaattcttctgagtcctattgtatgtcatcaatttcgggcttttataatattaataccttacctttagttgcttcaactgtaacgctaaatttcttgcagtgtgggtattgaaaatctaaatataatcattctcatttcctgtataagtatgtcttcattttttatattttgaaattttacttacgtttagagcatattagaaccggtgatgttttgcgaattagttttttcattagatttaaagtatgtgcaatcatgtatttaattatatcaaacaatatgaattacactgtaataattagtgtgtagtgtacctagggattacctttaattattgtatagcgtacttaaatcatttttattaatattttaatatgaattgagctttcaatctattattcaaaataaacatttttattcatattttagtgttgcccttaatttatcccaacacttgtagtaagtcacgataagccgtgtggcaagaaaacctaagcaccaggagtaattatggtaaacctcttgagataatcgtcagagacttattggtcatgtccgggaagcccttccaagagctcaagtcacacttgccagtctagggaatcgacccacctcgaggagttggataaaatacataggttcggttgctagaccctggacctaagtcacagtggatgcattaaatgtgacttggagaaaacatttgcgagtgatcttgaaaacgcgtgtcaaaggctttaaactcattattatgtgattatgcactgtcctgttatccaaatttgggaacttgtgcaactaatgctcatacacttacgacaatggtaaccttttcaccatttttatggggttataaacactccagctatattctgagaaatgggtcgaaaaaaaatagtgtaaacaccctctgtaaagaactaatatatatatatagttgtgatttgtggactacggttcattaacgcccaaaccacgtaaattttttttgcattaaatctcttttaatcactaaaacaactctaattaatagtttccaaaaatcttggtcgaccttttagtgctttcatttagagctgtaggaattattccatagaaggaatatcataaatagattcttagtgtgatggtgttgaccagaaaccacacacatcgaccacatccaccttaaggtcttgtgggtccaggtgaagaagaagtggcttcacgagtagatgtggaagagcaagatgaaactgaagatctcgagtatgaggaaaaccaagaagagtatgaggtgtatgatgatagtagctatactgaactgatggtattaagacaaaaagttgttgaccatgaaactaagttggtggagcaaagggagcaaacagaaggatgcatgagataatgatcgccatgcaaagagcgatggaaatcacaggcattcacatgcatgcgtgacctattggacaggacaagacgagagaggagtctccgcaaccatcgcaaaatcagaggcacaagaatcgggagccaagtcctatccgatacctttctgggagtcccccaaaggcaaaccctacaacaattttggaaaggaatagaaatgctcaagatccatgtaaggttcgattcgatctccctaaagggaaaggtccgtagaggggtagatttcctaagggaaaggatggtccttaggacttaggagaccggaaaagcgcatctatgcatcaagagacggtggagagaaagggaaaaagccaaaaggatcctctgttcaacttaagacaaaagctcaatgccaagcacagtgacctcagagatcacttagagcgaaagaagaaaaccgcaccagcctcaaataacaccttgaatgaagaagtcctggccgaactcgctattctctggaaggatatagctaaagtttctcgaagacaaagggtagatgattcggagtctgactgcgaggactgggaaccttgtgccataaacatacttgaagcggagctcccaaagaatttcaaaatgcccgaaatgaccttgtacgccagagacacatatcctagtgattacttgtcaagattgaaccgcataatgacagtcatgagagtcagcaatgacgcaaaatgcttgtgtttcccgctgacgttatggggtccgctgaggaatggtttaaaaaattgaagcccagatttgttgactgttggaataagttacaaactagtttcagaagacagttcgtagcagccagaaagattaatcttgaagttagcgctctaaccaacattaaataactaccagttgtaacgttgaaaaatgtcataaaaaggtttcaggaagaagattccaaaaccaaaaaagtggatgatagacaatagttggcgttgttacaagctggtatctggatgggaactcccttttggaatgaacttcagcaagagggagctgcgccttcaagacttccaaaaaagaagtaaaaaatatatcaacttagaggaagctcagataactactttcgaaggatattaccacacgggcggccctggatatgctcccaaagcatagtttccaagaatcacccttcctatcacaccacagacaagtggagcacccagtgtacaatttttagctacaccagaatattcacataacctcactctttcttcgactcagtctagttttgggacactaggaggtaacttggcttcgagagtgagtttatagtataccgctcaatccgcactgcaagcaacaagtgtgatataagctcctcagacctcccaaagtaagagatcgtcaaaaaggagcacgtggactgaaaataagaggcaaacgagaggctacaactcccagtatacttagtatactgatttggtggacacccaagaacgtgtgtacttggccacaaggaaaaacgtccactacgaagaccgcctcctctatactgggatagtttgcagagggatcccaataaaaggtgtgagtatcacaacgatattggacatactaccaatgaatgcaaaaaatttgaaggatgtgattgagaacctgatatggctaggccattcgtacgaatggataaaatacatatttccacacatgaatgggagacaagctagagcaccagtgcctcctagagcacaagccccagatgcacaaactcctccaggagcccttcccaaaaccacccagctcctgggcaactgcctagaccaaattgaatagtagccatgatctcgagcgaaccgcatattggaggaacaacacataatgaattgaaatgttatgctaaagccctggatcatgacagagatgtgtgggaagttaaccaactcccaacacaaaggcctcatctcatggacaaacctatcgcatttatagaagaagacgtctggacggtgcattttcctcatcac

SEQ ID NO: 194666 - DNA, 684 bp, Cannabis indica
tctttttataagttaaaaaaataatcatataatatatattttactaggcacaagcaaagattattctatggacatttgtagggtaggcaaaacgggttagaaacgataatacgattagaaacctgcacgagagtcaattggtttaggtttgctttaaatggattcgggtcgtattcaggttgacttgtctaacccatttaataatcaagtcgtgtttgggtcgacacgactaaaacgaaattgactcgttaatgatttatttaaatttattttaatactttaatatgtcataaataagttataaacttgttgaatacttcataaacgtgttattagttgacatgtttaaacaaaatatacttataaacgggctatacgggtcgtgtcgcgtcaacatgtttataaacggattgtgttcgattttcattttctgacactgttattaaacaggtcgtgctcaagtcgagcatatacctattatacatgggtttcaacacgacacgaatacgattcgcgaacacgaattatcatcgctaaacatttgtactctcaataatagattcaatgatactagttttgtggtttcatggttttcatttccctcctctctttctcccaaaatttataatgaatcaaaacaagttggtaacattatttttggacctcaaagaaacaaaagacgat

SEQ ID NO: 194667 - DNA, 968 bp, Cannabis indica
ctctctctctctcttctctctcttctcttcttcttagtttttttttcacttttggctctatctctctctctcttttagcctgaccagtcgtgtagtgttgtaaggggaaagagacttgatgaatttgtcattgtcggtagtgcataagcaaacatcaacctctcactgttaataaacagaacattttcctcacataccaaaaagagaacaatattgtacataaatgatattttttttatagcttttacacgtgtcgatctttggcacatcctttccagtgtactgttgtttctttgttttacagtatcagatcagagatgatgcgtgtaaattgggttgaactatttttcactttggttttattcaattgactattgagtagtaaaactgaaaaagaaaactaaggctttttttcaccttgtaaaaagattattcctttcccttctttctttgcaaggacgaagaagaacagttccaaacagctagctagctacctttcatactgaaaatgtactctatttattcattgaaatcatacaccaaattcaaatgaagtaatttctcttgagtattttcttcttgtaagtgctctctataaaataaattgctatttatgtgtagtcagttagagaagtggaattcggaaccagagaggattttctagtgttattttttctttatgtagttttgggtaatttaagggtacacatttcaacagtcattatatctctatttctttttgcatctaggataaattgtagttacttagaattatatgtaaattataaaaaaattataaacaatttagtttacagtattaaaaaaggaaatttgaaattctatacctaataaactttaatattatttccctaaacttaaatgttatactataagctatatgtgactacattttctttatccccgtaatacccctcccatttgaaccaaaccaatctctctctctctct

SEQ ID NO: 194668 - DNA, 1374 bp, Cannabis indica
ataatctgtcattcacttcaagaataggatagtaattaatcattaacgatttgggtaaacaacaacaggattctcctccctattgtctcatcttgctcaactttaaattgtgttattaagttttctgaatttctttcatattttactgtttttaaatcataattgctttcgatttaccgaatagaatcataagtataatttagtggtacttaatccaattccctgtgggatcgacctcacctgtgtgagatttactacttgattgcgtatacttgcgtagtgtttaaaattatagcaacattttattttttatttttttaaatatttataattatttttaaaactaatattacgtggaccactaaaaatttaccacgtgtacaagtgtgtacacgtggacagtccaccgtggcacttaactgtgatttttggacggaggtgtgcagagcaaaatggaaccaggatttaggtagtttagccgccaaaaattcagtttttgtggttaagtgttacaaaccgtaaagttcaggtggtttagccgccaatataccctaaaaaaaataaagtgcttactaaattcaaatacagctcaataaaaaaaacttatctttagtgactaacttttagtcacaacataattgttgactcaatttatagtcaaccgacacggagtcataataaatgagatttaaaacaaaacacgaacaatgtaaataatgacatcagaatttaaagaggttcgaccccagatgtcgctaatagtcaactccccttgtattttattaattggagttgcaaagtcaagaacaagctcttgaatgcaaggaataaaactggcaaagtttctgctatctaagttatggattttttggatccctttttcaggtcatgggtgaccccatatataggggaaaggtcggttcttctcgcttcaggagacacgaccattacagagataactcaattgtctccttggtttttggaggtagttgaaatccaattcttgtgataatatcctactatttcgtgggtttttacaattactattgagctccttgcgggatatgaataatttgaattagttactgactatgggggtccccccaaagttaggcatggccgtttaactttctctaagggtagtagccattactttggggtgacactctcgagacccactctgcaggggatgatagtcgccatctcagggggtggtggtggtactcttgagaccctttccacatgatttttgacgttgtaaagatgcactataccaaccatgtcttatgtagctagaatgtgttacttagaccatgagggtgtgagggtttaagggtacacccctaaactaacttcattaccttttgagtagat

SEQ ID NO: 194669 - DNA, 1319 bp, Cannabis indica
ttttttttaaaaaaaattgttaattaatttagttaagtaaaatgagataattaattattattacctgccaagttttgattcttactcctgatagagtgtttttaagtgaaatattttcaacaactatattggaaacacaagcaactgttttgtcttttcctagacttcctatgctgtacaaaaagaaaatatatgaaaatgtaagtaaaaaaaagtagagattcttgaataatttaattataaatagtttaatatttaattataaatattatagaataatttgaggtataaatagtttaattctcaattatatataaatactcaaatttaatttttgacagtaataatatataagttataattctaaaaccaaattgtatagtttaaaatataaggtcttcggaggaagatgttaataggttgtaaatgtatatttttggagtaatgaaattcaatgattgatcaaaaaaaatgttataattctgaaattactacatgagaatctttaattggtcaaaattattaaatttttatttttatttttaaaaaaattagtttaaatatactaatagaaaaataacacgtgactttatcacaaaaaaatatttatttacaattagaagttatacttaaatatttatgtttttatattatatatatataaatatgtggatgagagaagattatatattatacataccttataccatgtccagggccacaattcatatgatgaacatgaacatttgagcaaccagtttgtatggatacacagtcatctcctgtaaaaagagaaacataattagaaaatataaagttaattactatatttgttttagttaataattatatatattcttgagagtcccccactgagaaaaaaagttagttgttttggtattctattttttctttctttgtttcaaaagttagttttctgacagtttaccgttaaaaggaacttattatgtcaccaactaaactataaggaatatatgtatatatttttgcttaccacacccaatatttgaatgatgaatctcaacatcctgagagttttgcaagtgaataccatctgtattggggctattttctggtgaagatattgtaatattgtcaactttgatcctcttagagctgtcaaatttaagatgacactgaggactgtttatgattttaatgtttttaactgtcacatcattgcttgaatagaatctcaaagcctgaaattgtttaacaaaaaaaaatagtataacttattaaaacctaaaactaagtttaagatttagtacaaaaaactaaaaaagtaaaaagacttt

SEQ ID NO: 194670 - DNA, 1202 bp, Cannabis indica
ataattttttcattacacacactacaaaaaaaattgctactaaaatatgctgtagatttgttagccaggacttagtttgaagactcaaaagaatgtgacaccctcatgatcctagctaacaaacttactcttcaagacagccccacttttgacaagccagaattatatcgcaacaccataggagcattacaatacctcacaatgacccgacctaatcttgcctattaaaaactccaaacaattcatcatttggaatgcctgcaagagaatgcttcggtatatcaaaggcacaactcacctaggccttcacttcaagccatctacattactcaatttggaagcatattcagatgccgattgggcatctagccttgatgatcgaaaatccacaagtggattccgtctatttcttggtggaaacctaatagactggagttcaagaaaacaaaaagttgtagcttgatccagcactgaatctggatatcgagctctagcctctgttgcaactaaaacagtgtggataagttcccttcttggtgaactcggcatcaaccttcaaaagacaccacctgttacaccagaacaaagcacatagaacttgatgtgcattacattcgagaacaaatagtagaaaagaggattgaagtttgttacatccccacacaagatcaaacagctgacctttttactaaaccacggtcatctccgaggtttcaatttctatgtaacaagctaaatttggtgagcaccaaacatatagcttgaggggggtatcaggacagttagtttagttatttactgttaaatgttagttgttaacagctgtacttgtaaccgtttctgttacttctcaagtgtactctttctcatatatataaatatcaatcttgagcctctgttattcacacaagctcacttcacaattattcatcttctcaagtgaaaaaaaaaaagaataataatgtaattattaattaaacaacaggaataaaccaaaactaattaaatatttaatttatacttgtagttgtagttataagctagcttagcaagtagaggagtaataatagtactaatgtataaacagtaatccgaattatatatccgaatggtgtattgttattggtaaaaaaaaatattgggcaataataagaataaattaaatgagagggattaatgagttatttataaataggtgatac

SEQ ID NO: 194671 - DNA, 1270 bp, Cannabis indica
aaacttaagtatttataccacaaattactactaaaataatttatgaaatgtaataaataaaatgtaaaatattgtcaattacattaataaaaggtaaatgaataaataaaagtcagtaattgaaacaataaataaataaaaaatgtaatatttattatggtataaatttagtacatcctatatttagcatgtgccaaatttggtctatactatacacaagtttaatttaggaaattattctccatatactatttttaactttttttaaaaaaaaaaaaaaaacgatttgggttttgcttcgttagttattatattagtttttgtgtggaattccgtaaaaatacataaacgtgatgttttactagaaagaaaatctaatagaaaatgactttggacatttatgtgtgaagcagatacttttcaaaaccctaattaatgatacaaaaaacaaataaacaaataacacaaattaaaactctttctttgtataaaattgcacattgccttcgagaaaactactagtggtgcctagcaccttcgtgtcagtatcactattaatgtaattaaatatcagatcctatataattcaatgaacttttaaagaatataactaatcaatcgcaaggtgacatgtctagaatgtgtcaatatcattactgatgcccgataacaatactcattgtcttccttacattctaaagttcaagcacgtttaagaaattaataagaagtttgaccaccaacactttaagagataaaatagcaggaaaattgagaacttatatctaaaaaatgtattatctcaaagtttggtgggaagaataatgcgttaatagcaggtagttacattaaattcaccatgctgtctttgttagacttggaccttgaaaatgtacgacgaggagtcggccatggccaattctgtcatgcaccatggctttcaatcaaagtagttatatatattatataattatcccataataattttaaattagaaatagataataaaagtcattatattgctttgctggcaagcagtatcatcatgggccatggctacatataaaaaacttcagcttttgaagccgaggggccaaggagaggaacttttaactaggagacaaaaaccatgatattttcagattctaaatacaataatcacagatagatagttctaccaatatggcaatattagatagtaatgacgtttgctgacaatacaagatgaactctttttcaataatggaaattgtattcaaattcccttttt

SEQ ID NO: 194672 - DNA, 1666 bp, Cannabis indica
tttttttttttttttgattaacggctccagaagccagaacaacaacaacaacaggcacaaggccagacggcagaaaactgccaacaaaacagagaaacaagtccaacaggaattacaacaagcaactaaaactaatacagaaagtaacagaaacagaacaatcgagactagtctaaatgagaaacacgaccatctacagtcaactgctgtaggaaatcgtcaaaattggacaaatcgaagtttccaaatctattatttcgatttgcccaccgagccacctcatgggccacaccattgctctccctgggaatccattgaacttcccaaagattaagttgtccaaccaaggcagagaacatttggatcagattctgtatgttgaagtgcaacctttgaatatccgtgtaatgtgacttcagagcttcgacagctaaagaagaatcacactggaatatgatattctggtatcccaattgaatcgctgcctctgctcctttgcaaacagcataggtttcgcctggaagcggttcgttgtaggtggtttgaaatgtgacaattctgaggatggttccattgtgatctcttaggattgctgctcccgcggattgagtattgccaattgagacatcagaactgcaagaaatccatcccgccggaggaggctgccaatccaattgaagagatgaaggagcccctctagcagtatgtaactcattaaggcggttgatgacagttctcacactcaattccacaggagtggaacgtccttcatggactcttctatttctctccttccagatctgttcaaaaatgacggcagccccttccaacagcaggttaaggtcgagtgggtttggtctgttatccttctttgtgaaccatagaagccattcatcccaagactggagatggagtgcatccgttctaatcccccagcttccaaaccaaactatccttgcgaaattgcacgtccagaatagatggtaactaccttcagtttcgacattacacaaggggcacttggtatctggcaatgcaataaaggaaataagcttgtctttggtgggtaggaattcagatagaattttccaccacatcattttaagcctattatgcatgttggtcccccaaatgattttccacttcctctccgattgagctccgggatcatgatttttgaggaccctataagccgatttcactgtgaaatgcccattcgactctggtagccaaagccaagagtcgggagttgtacagttagggagggtgatgtttaagatctttctagcatcctcctcatggaaccaatgcttgatcaagtccctatcccattggttgttatgtatgaaagaacttaccaagcttactccgcctgcagctagcacacgaggtgttggttgtcggttggtactcggcacccacggatcaaaccatatagaagtagtccgcccgtcaccaatttttcgacaaaggccttttcgtaactcctcacgggtgtggagaatagccttccacagaatcgtgtcagttggtttggcctccaaatccaggaaattctgctccttaatgtacttttccttcatgagcttaccccaaagcccatgctcctccgtcaaagctttccacgcccacttcattaagaatgctctattcatagtttctgttg

SEQ ID NO: 194673 - DNA, 923 bp, Cannabis indica
ctacacgcataaggcatcacgatccattatcctatcacccacgaaaataataatgcaaccgcaaaatttgtttggatgtgtctactttttactactatattctctattaccgaggcccttagtagattccaaaacttctctaaaagcaattttgtttcttcttatcattttacatattatttattttaattaatccccaaacttattaactcactacatatatagtactatttgtttcttctctctcaatcttcttattcttattcttattcatattcttcttcttcttcttccaaactcataaactaaaacgtctttattccttttcaaaggtttccccacagctccttccattttccatctccgttatacatttatcgggaattaagcatgcggacgtagtcggtcaatgtacgacaaataactctccctccatttcctacctataaatacctgaaatgaacacaattctgctcagtattaattgatcagtttcaggtaagaaaattcatttctctctctcttatttaatttctttcatttgttgtcagatatttcattatatttttactttccattccagcaaaatctactattttgtttttgtttctgtttattctttctactaatttttgattaagtgggcagctccaattttccttttattagtccatgattacacagtgaaaagtttttatctttatttgtttacttattttgtagtcttttcgtttgaaagtaaaaaaaatatgtcttttactttatttattttctttttcaacttgtttttttttgtttaaattttatcattgcttagtaacaaattaacatctatcagatgcgattaaggattatttgagtaacttcaaagcatcctttgctttctttctaatccacatccccccactacaaaattgacgttg

SEQ ID NO: 194674 - DNA, 1829 bp, Cannabis indica
tttattttgttagtggtgataaataaatagtttatgtgaagatataaaaaagtaaaaaaatgagaacttagaatgaggattaatccctatttctttttcttctctcactaacagattatatatattaatatattttccatattttttaattcatcttaggttacatgtatggcaacaccaatattgaaaaaatattttaaaagaaagcttgagtgcaaaatttttcaaatatttattattaaattttatagagctacaatttttcatgaatttactatttctcattatattattttattgtttattgttatacttaatgtaatacaataatcaatatatgaacaaagaaaattgtaagattattcaacttcaaaagtcataataaaaaaaaattaatatatcattatagaaatttgaaattattaattgattgacacatacatataaagaataaaaaaaaaaaaaaattaaaaaaaacatatcattgcaagtgattgatttttctttatttgatttataagaagacttaacatattatactatagttgtgtttggtttgttagtgaacctactgagccattaaaagcacttcgatttcagccacagagtaagcttcagttctagtgttgacagaggtgatgaaaacgttgtaatcgcttgtcaaacaattgaagatagcttctatatgctctgcaggtgtgatctgatgcccgatcgaagcaagaagatcaaccaatctcttgaccttgagaagatagtcgcttagtgatccctgcgtcttagcatttcgaaggagagttctgtattggcctatattagcacaattaagagctgagtagtactcacgcaatgtactccaaatttgagctgcaatatcgcagccaaccattccagttaggattttctcaggcatagacgagagaagtcaggagacaagaacactatcctgttgatctcggtcctcatattcagggcttaatcgattggcaagacgatctgcttctgtgttgaacatcattggagcttgtgtaggatcaagaaattgttgcagtcaagctcctttgattgctgcaaagacttggtgcgtccatgggaggtaattgtactcgtctaatctaactaagagagagtgagagaaaactgtaggtgaagtttttggaagagacggatttgtatttgtagcggcttgagacgaacctccagggccttgaacaaacgctattgctgaacgaaatgctctgataccatgtagaagctttgaaagaaagaattcttgtattattaatgttcaaaaattacaaagttaaatcagctaattatatacacaaatacaaggcacaaaagtagaaaacagaaagttagttagaatcataactaactaactaacaaataacagaagtgacagcaaagctaagtgacagttggactctttaggctaaggttcactaacatagttgcatttggttggaggtaatagaatgaaaataaatcaattttcattttatttatttgttttgttacattttgaagtactagaatattataactttttcagtattttgatagaataagtgttccatttcaattttttatatgcattttaaattttattctattttattcacattgttatgtttttcatttcatcccaatcaaatataccatatcaccaaacggtaagtattgcaacttattgtggctctgttttgcgtgtatgctcaatggaacttagaaaaaacattttagatgtttatgtattattaattttatagatatattctgtttaatcctatttcatgacaatgctgcctagtggactgtatgagtcc

SEQ ID NO: 194675 - DNA, 1597 bp, Cannabis indica
tacgtaaattattcaaaatcatagaatcctaacaagtacgactaatatttaatcaccaaacataagttatatagtgaccaacataaattattttggcaagattaatgatcgaatattcgttatttctctcagttcatatcttagagagaataaatttttttggcattttaatctctaagtgtctacactgttaaatcaggctactgcttagcagaaagtttggagatagaggatgctacttcttcatctaattctccttgcaaatggtggaatagattttggtttctaaatttgtcaaaaaaaaaaaaaatcaaaatctctgcttggatagtcatcaacgacgccattcctactgttatcaatctagtgtataggaaaatttctacctcagtagcgtgttccctatgtgattgtgcttggaaattggttggacatactttatttaaatgtactaaagcaaaaaaaaagtgtggaactaatctcagtctcagatatttttccaaacattaacaacctcaatggccatgatatctactccaattaagcagcaattcataatgatactgcattagaaaagattctttgtctaatgtggtgcatttggacggaaagaaacgaagaaattacatggcaccaaacccaaaccagctcgtattatttgtacctttgtagctaataatatcataatgcaaaggtgtctcctatgattgctccagtggatacaaattcaccatctaaatcagttcatccaagttcggctgataacagtccaaaatcttatattacatggcttccaccagtagttggtttttacaaaatgaatatagacgtcgcgtatgatgcggaaggagctattattggactaaaagcagtagttcagaactattttgaagatatgattgcagcttttttgaagtcactacgaggttgttattcaacaaaagagataaaggctaatgcaataattacggtataaaatgggctctttcaaaccggttgaatattcattccattgaaacagactcacttttagtggcaaatgctattaaccaatgttcttctactggttgtgtatcttatttctatgatttgatagatgatattctcttttattattctatttccttagagtaattgtatcttatgtcaaatgagagactaatagagttgctcataacttagctagatttgtcttttttgattgaataatgattgttcttgggttgggggtaattctttctcaaatctactctgttgttaatagattctattcattaataataacaaacttttaaaaaaaaaaactgttaatttttataattattttaatttcatattttttaaataatagtataatttttattttattaaaataagatttattattttttaatgttaattatttttgttaatatttaaatatattttatttttgtcttatatatatcttttaaaaatgaaaaaatgattagaatactattttaaaataatttaacataaaattagaatatatatatatatacatatataccaaataaataaaaaagtaataagagtgttctacaaatttttggtagtggtaaataattttttttta

SEQ ID NO: 194676 - DNA, 1437 bp, Cannabis indica
tttgatatgcaaaaacaaatttaccagtgaggcttttcctgatcctcataccattcaatcaaaaaagaaacaataaagttaagaacatcaccaaattaaacaaaacccacaaagttgccacttgccatagccacaattgaaaaactccgtatattgtaatttaatggcaataaaaattcaattaataacagaaaaagaataaaattcaaacagcaaactcactgtaaatcattggcacggcgagaggtccttctctccacatttctaacagacagtggttcatctcctaaagagaattgcttaatctcaaccctctcaacataatcaggcttcttcaaatcatcaataacaggctgcagcaatccaatgatccaattctcaatcccacttctgtaaaccttccataactttccaagaaccatattcacccattcaactgattctttcctctgcaaatctttctccaagaacaatgagaagctcgtaggcacttgcggccaagcacctagccgaccctctttacccaccaacttcttcttcctcctcgaagtccatagcttgtcgaaaacaacgccaacgaagaaaaagaagacgaacaatccaacgacgtttcgattaaaaggcggcgccgggattgggtgtattactcccagttgagttctgagcttatcaacaatggggtcttcctgaaaattagtgaaattcgaacccatttgaatcgaagaagaatcctcctcagacaactcttcaccggccaattcatcggtaaattgcttgaccacaaaactcttaacaccccttctggtcgaattaacgagctcagaactcaaattaggcttaggagcagcatcagtagaaacagcagcacgaggctgaaactgaaactgaaaccgaaaccccgattttctccgcaaactccggtaagaaaagctagcgataaggaggtggcggtttcggagggtggtgaaatcgatggaggtcgtggttccacatttgcatgacggagaaaagtcgaaagtggaagaatttgaatggaaaatcatttatcagtagcccgtgttccgaaatgggcaagagaaatcgcattggatttggaaaaaaacatgaattctgaattgggaaaaggaaaaggaagaaagaaaagtattgggttggagttagaagaagaaaagagaagaagaagaagaagaaagttccatgaaaatgaaaatttgagagagtgaaaggaagaagaagaagaagtggtatttgtgaaattgtaatcttaatgcaaggctctgaaaaattgtggaagacgtggataatatatattatatatttttgggttttaattttaaatttttttaggtaatttggggtagtggaaaggtgaatggttggggacataatagacacatgggtcggaggagaaggagaggagagagtcaagccaacgcg

SEQ ID NO: 194677 - DNA, 2262 bp, Cannabis indica
agactttcaaattataaatgaacgagaatgacctaatttattcaatatagaattcaaaaccaaaaaatcatctagatgatgatactgtataagtctttccaaaatcaaaaaataactagtttttttaactatagtttgaatatcattatagcctcaactgtagttgttttcctattgccccgaaagatgaatctttcatcatcacttgacttttagtttcacagataaccttccatagttatacttacataaggaatgtcacaaaattttacttactaagtatatttaggtacaataaattaaattatttacaaaacaaaccgaaaactcattttccttcgatatgcctaatgacatacttaaaacatgcttgcctcttttctttagtagtgttccatatgcaacattctgagttttatccgtatccttattccttatttaaataaggtagctaaagaagcatgcttgcctctttcctttagttaaaattttgcctatttagcatgagaattaattttatgttggtagatataaatgaaaacatgaatttaaaaagagaacaaaataaatattgttcacaaaaggatccatataacacaataagttcaaataatggcgaatctcatctcaagataccaagcacaccgttaatttcaagtctttggacaataatattaaatgtaaagcagtactcttgttgtagcaatcaaatatttaacaataaattttgtcaaacaatttgtcaatctttagactgtacatattgctcacatgaaaatcttataattatcacacatttatcatcacaggtatgtgtgacttaaaataagtataacctccctttaggccgatcaatacttacatgagaaacacatatacaaacctctaacatttcacatgagcaatttacgcaagagaagttgctttggcgatatcttatttcaacgaactcattaacaatgaaagacaaaccttatgctaaacttgaacaaaaaaatttcaaaattatatattctttggtcgtaatgtgtatataattcaccatataacataaaatcgatactcatatatacataaaagctataaataatcccaaatgcactaatctaaaatccttgtatttatatatataaatttgccaagaattaacacaagaacactatcaagatcatcttatataatgccactgacaatacgaaatccacaaaaaaaaaaaaagtacacttatatgaatttgcatatattacagtataatatgccttcattgaaatcgagcagtacatagaatatatacgaatatgctttaccataactaaatagattgaacctttcacatagctaataatccttaatataacaattgaatcagacctattataagttacagcctattaaatagaaagatagaaaagggaagccccaaacttgatccaaataaaaaaaaaatgtttccaaaaaattaacaaatcaatatcttgaaccttaattttgagtagagaaaaaactaaagaatcacaaccgacaccataacatatatacttcaagccaaaattttaagaaagatcataaccctaatttaattaagatttgtaaaaattcctaaatctctttaacataactttaaattctcaaaaaatcaatgaaaggtagctcttgataccacttgttagaattttttaacactcacaaaatatgcaatatcaagattcaatttcataaataaatatattacatataattatacgtgtataaccatagatttaaagaatacctttgttgattcataaatacatatgagctcacattagagattttaatccaataccaaagactttatatacgagtaacactatagaacctccaagttcatatgttacttaagaaagtgaaccatcaatatgtaacttccaaaaacgacatacgtttagatattaactaagaacaatcgatattgttctctcatttattttgtaaaagttttcttagcttaataaatgtaattaatattgtaacagtcttgtctgaccagtattgtaattcaaataatcactcacttcatatataaatgagtgatctaattaaaaataaagaataatcaaatctcttataaaagtaggactaagcataccaagctctgattgcaccactatacttttgtgtctttctttatatatatattgttttggtcttagttatttgtttatttcatttttgagttatttgccactctagatgtctacttgtaattctgtaagtgagtga

SEQ ID NO: 194678 - DNA, 1198 bp, Cannabis indica
agagagagagagagagagctgcataagcaagaagagaaaagcatcgtcctcaaccacttggtcacacactcacagctttagagagagagagagaaaagaaacccagctttttagagagagaaagaaaggaaacccagctttttcattttcaaaatttgtatgtttgaagagagagaaagaaaactcctctgcccctagaaaattgcattgagataaggacttatgctagtactggtagtaaatacacatactctctctcttattcgcagatatacaaaatgacctcttcatccttctcttcctccctcctctctgcattttcacagagcctctctttaattttccacaaactgttcgacctttaaggccccccttctctgactctgaccccccctctctcctgcggcttctctaatagcccaattctcttttcttgattttagagagccatctctctctctctagcgcagtgaaatcgttcgacgtttactcctcttgcttcaaagaaatatcgatttgataaatctctcatttttcacctctaatagaagacgggtctgagaaaaactgttcgacatttaactctggtcacgtatacgtcactcgggtctgtcatttcttttccttttttctgttttcttggtaccctttaatatgtcgtctgcattttcattttctgtggtgtcattcaagacttggttttgagtttattaaatggcattgacttagtcagtgtttctctgggttcattttaaattttgtttatttttcattctttttgggaaaaaagtggaacttgttagaagggtttgaagggttgagctgggttatgtgtgtatgagtgcgaaagtatccttagaagatgcttcgtgttaaaggatttataatgggttggtgacagtggacctgtttcagtctcttccgttcgttgtcttcaactccaagcctttttgttctttcttatttggtttggtaagctgtaaacaattagtttctagttttgtcttttctttatttctttattatgattatttgcattcaaactttgaacagttcttttttccatgcttattttgttccttaaaagaaattattttgtgattctgctcaaactctttttcatttaatatgtttcgtttactgtttgtttttagaaactagggttattctaaatattgccagagtatatttttttttt

SEQ ID NO: 194679 - DNA, 1057 bp, Cannabis indica
ttttttttatatatattttcatttaaagaattttcttttctaatcaaatttctctaatttttactatacgtttaccaatatgtaatgatgagaattgttaaaaactattattggtgcctaacatttttttgatgtcatatcactagtataataaaatatcaactctcatataactttaaaaaataattttaaagaatattgtcaaccaatcgttagacaccacttacaataggcgcgagacaccactactgtccaataacaatgctctatagtaacaagtagtattggctaaaaatactattgctagcattgttaggtggtctgactacctaatttgcattaggagaattttatttatttatttatttttaataactattaataactattaaataatactccttgtgttatgctttctaataatgttattttttttaacaaaaaatgttattggcattatatatataggtgctcatacaattggatttgctcaatgctcaacgttcaagaaaaggctattcaacttcgagggatcaggaaatcctgatccatcactagactcctcacttataaagaacttaaaaagtgtgtgccctaaccaagacgattcagataccaacttggttgctttagatgcttcatcttcatccaaattcgacaatggcttcttcaaaaacctagtcaataactcagggcttctccagtctgaccaagctctcatgacagataattctactgcgtctatggtcaagacctatgtttataattttagtatgcagtattttagtgtccaagttttacaaaaaaaaaaaaaatttataaatatgttaaagatggacaccacagaaaggggtccctctctttagattacataagcatcctggctagaaactctttaacactttttgctagaccatacaaacaaaagcgttatccttacgactaataaaaactacattacaaaagtcaaagttcttgacagcatttaaaactaaaatagaaacattgaaacaactagtaattagaaagtctctgcaaattggaaaaggcatggacc

SEQ ID NO: 194680 - DNA, 1540 bp, Cannabis indica
tatttattattaaaaaatatttatacttacattataattattcttactagatttatttgattttgtggaggcttttttattatttcggtctataattattaaattagaaaaattacatttaattttttaaaagacaatatttttattagtgcccccacattgaaaggagtaggtccatccctggctgtaattacagtttcaccgcaaaaatgcttttgtaaccctgcaccctttagcatgcatttgaacctttcaagaatagtcatattcattctttctgttaatccattatgttggagtatctcatttactgatttgtgttttttgattccaattttaacacaatacaaagaatattcatatgagaagtattctaatttattgtctgtcctaagtaccttcaacttccttcctatttagcttttcatgagtttcttccaattattgaaagttttcaaagcctagttcttatttttcaacatgaaaacccaaatctttatgctaaaatcattaatggtactcatgaagtagctgacacccccaagagtttgtgttcttgatggaccacatagatctgaatgaacatagttgagtggttctttggtaacatgtatacccatagggaatttcaccctgcaactctcgcctagtacacattcttcacaaaactccaatttaccattcaatttttccttaacaaaccttatttttctagctcgattagacctctttcactcacatggcctaatctcaaatgccacattctagtttggtcaccacctttgtcattcacagcaacattggttgttcccatcactgccttaccattaaatagataccacttttaatgtctcctctcataacaaccagtgagccattagtgactctaagagactcctcaatcttaatagagcatccatttacagctaattcaccaatagacaatatttttttttttaattcagggacatacctaacattcttcccagttcttttgatgccatcatacatgacaataacacagatgaaattcccttcatctgacaggctttgttatttcttagaagaacattctcttcttgtatgtccttgaactcacaaaatagattcttgtgtggtgtcatatgaaatgaacacccaaaatctaatatccatttctgaccagactccttgctggacacaactaatgcatctgcaaatttgtatccatcctcaacaacatttgattcacctctctccctgcttttgtttctggcattcagagccttacactcatctcgaaaatggccttctttcttgcagtaataacaaaacttttcactcttaaacttggattttgttttggttaggctaccactattgtgcttgttcttgaattccctcttgtatgttgttcctctgacaatgtacaagccaacaccattagaatcacctttgtcccttgacttcttttgaatcaccttggaattgagtgcagctttgaccactgacatgtttaatgtgtcttccacatacgggatcgtgtctacaaaatgttcat

SEQ ID NO: 194681 - DNA, 1718 bp, Cannabis indica
ataaaaataatatgaaaatattattcaaacaacaacaaaacgacataaaaaaataatatacaaataataaaaaatcaacaacaaaataacaagagtataatatcaaaaaacatcgaaatgacgtattttatgtaaataaaatcttaaaaactgtaaaaatatttaaaattctatacaacagtattttcgtatttttttttgtttttgtattttcttgaaataatcactttattttattatttaataaaatttgttagatatatatttttataaataaattttaaactatatattttatatatttaaaaaattgataactaagttattaagaattctattagatttatttattattattatttaaataataattaagttaacaattttaaataaacatgtattgcatatagggttattttatttttacacttcaaaataattttttttattacatttttatggaattttacatggaaatccttattacaactagcggagcaacctaaatcgcaaccaaaaatcgtatagcaacccacatagaaaccaccagaaaaatcacattaaaaattcaaactgaaattttaaaaaaataaataaaacatagtatatatagagtaaatctcctattaattaacaaaggggaaggacaaaaacaaaaggaccaattaagaaaagtgaaagatgaacaaatatggacaaacaggttaattcttgatcattctagcttggtaatttagatcatcgcagagattattgtatatatatagctatattcttcctagtttgactaatgataatcagcagaagaacaaattaaaggggatctcataaaagaaggaaaaaaaaaaaggaatttccctttttagtttttatataaattctaaagaactaatggaagtcactagatagattctctttttctgattgaaaaaaggaacatgctgccttctatattcactttcttttgtttttcctttctcaatcttcctgctttctaagatatggatttaattgttattaggaatgtgtgtgcatgtcatagaaaagttatctacaagtgaagttaaatttaattgttttcttcttaaaaaaataataattaatttttttctagatttagtaatattacaagctatatgaagtaaggttttgtataatataacattacaaggacaactttccaatttaattatatatttatatcccaaagtgctgggtagttaatcattattaagggccagccaataactacactattatatattagtttaattagtgcaagtgtgctaaggaaagttagcagcaagggattattattatttgtggtccatataaattactgtacgtatatatatatctacatatctactcacactaaaataaaaagaaaggaaggctttataaatatttaaaattatcacatgtcattttttatattatcaagtcatcatcatcatcatcacaaacaattgaaattatactagattgctcacctggtcccaagtaatgacgacctgatcatagaagcacgaggtcaagccattggagaattatatatatgtatatatatatataatatataaattctagtgatgatgtatagggtatcttaattaatcaagaagcaattgccacccataataataataaatattggaattatatatggtggtgtttagttaaggtaatgaaaggaataaaataatttttattttatt

SEQ ID NO: 194682 - DNA, 1947 bp, Cannabis indica
actcggtaattatttcctaatctttgtcttttcccactacacattaaatgatttcattaatatctgtcttctattggggatccatactaagttcgatgatttgacaattgtgaaagaaagtagttgcatttaatgttttgaaaagtgttcatgaatttttgtaattattattactgatatcattatgcatgcatgatggtacaccagggtggtgccacaagaacgggtcattgctacttgtatacgactacatgcccaacggcagcctagacaaccacctcttctgtggcccggatcaggagccactgagctggaacctccgttacaagattgcaactggggtggcttcggccctgcattacctccacaacgagtatgagctgaaagtggtccaccgtgacctcaaggccagcaacatcatgttggatgctcacttcaacgctcgccttggtgactttggcctggcgcgtgccatcgacaacgagcgcacctcttacgctgaccaacacctcgatggtgtacctggcacacttgggtacattgctcctgagtgtttccacacaggcagggccactcgcgagtctgatgtgtacggctttggtgctgtcttgcttgagctcgtctgtggcgagaggccgtggaccaagaagggaaacttcaactctttggtggattggatatggtggatgcaccgggaaggctgccttctcaaggcggtggatgagaggcttgggagtgattacactgaggaggaggctgagaggcttttgctgctggggttggcttgttctcatcctaatgcaggggaaaggcctacaactgaggccatcattcagatcatttcagggtcggtttcggttccccatgtaccgcctttcaagccatctttcgtgtggccatcgtacatgccagatggggcggcattggggttggacagtagcagttacactaactctaatgctaatagcatggctactagtattacaactgggtcatcttggcacgttggttggacgccttaattacttagtatctcatcagaacacaccagggaattggaatgagaatgggatagcataacaaacggaagcttttgttctatttttctatatatacccaagaaaaagtcctataaatacatgttttcattcctacttcgtaattgttttgagttggatagaaatcgaggggttgacaccatatatttattctactaagttctttttttttttttttttattaatctattgattgttgttctatattggtagatgggagtggaggccgaaggttttgccagtgtgtaaattgtatattcttattatttgtcacatatataacaaattgttttaattgctttattatttgtcacatatataagaaattgtcttaattgctttacaaaatttacatacagattactcgtattccaactcttagaaatcaatcaagttaaacaaaaagctggttctctttgaatataaaaatatgagtaccaatttttatacagtaaattttatctatataccgatatgcttcaaagaatgaggctgtacataattacactttttttcttaattataaagaaacagagaaaaaaaaaaagaacccacctcgatcaactatggaaaaaggggtggggaaggaagaaaaggaaactatagtaatgattgcctgttacctgtaagtaagagtaaagagtaagaccgtcttggaacgaaactacctacataatgggagttgtatcagacaagtgcattcttgggtttgatttgattcgtcacatatggattcccagtgtgtctaaatcaataatggcagtgtcaccaggcttgtaacctccagctgtagcgcttcactcaagaggtcttcgattactgatgtgatctcccgccttagagctcgagcgaccgtatgtcttgctgtaaccttgctggcatatgaggt

SEQ ID NO: 194683 - DNA, 1204 bp, Cannabis indica
atatgattaaccatttttacctaatagcaaactctgcatataaaaatatgtagctatcaaactcaaagctatgcgtattgattctcattctatttttcacatacaatatcatcttcttttttattggtttttattcttttgttgttgttaattttagcttcacagctttaacatcttattatatttttcttatatataataaatataatatatatcgacgtggaaatctaatcatttaaaaactgttaaatatatatatgatgatattgccatcttgtaacgctatactcatccatccaattaatttgttaataatctatatatatatatatatattctctttcatgcattttctaacactatatatacccctttatctcatttcatttttatccaaaaccaaaacccaaactcattactactatagcagtagcacttcccactattccattattccatctaaaaaatctggctagctattatggccaaaaccaccaatattaacgacctcaaatatggtcacacacttgtcgttttactattttgtgtgtcgttttgtattagtagcataatagtagtggaagcacggcagccatttgcttgtgaccccaaaaagggtatcacaaagagtctaagattctgtgaaacgagactaccaatacacgtaagagctagagacttgatcggacggctgacattggctgagaagatcagactgttggttaacaacgcaatttctgtgcctaggcttgggattgaaggctacgaatggtggtcggaggctcttcatggcgtttccaacactggtcctggggttaagtttggtggggccttccctggttccactagtttccctcaagtcatcaccaccgctgcttctttcaatcaatccttgtggcaacaaatcggacgggtaatattaattctctctctctctctctaatcttctaataataatattaataaatatttattggctaacatgcaccacagtctttttctcctcctctctctctcttatatataaataaaaattaattaagtttttttgatattacttattaaattaaattatgtaagtttagtatcgggtattacatataacaattatttggcattgatgtagttttcatcatattatatatataatcaaaatgtggattatattatttatatagtcgtacctttatttttttttactaac

SEQ ID NO: 194684 - DNA, 1851 bp, Cannabis indica
ccgaacacaaccctagagaaaatacttccaagtttactatcttctctgttctgactgatgacctagagacaatctacgcaacaactcaatctatggtcccatacaaaaaacctgctccatgaaaaaggacgtaagtaagaaagacatgtccaagttctgccgttttcatgcagactactgccatgacacgaatgagtgcaataacctgaagcacaaaattgaattcttaatcagaaagaataacccgcacttgcaaaagtacgttaaggccgaccagaatcaaaggctcgcccaaacaaacaataaccaggatttactaatgcattcttacatggtgatctcaaagaggatgtttcctcaaggttataaaccaaagggggagcttccacacaaccttgtttgcaagctaaagaagtcattgtatgctttaaaacaagcttcgagacaatagtttgcaaagttttccactgccttgtttgatgagggtttcaatcactcagcaactgatcactcattgttcataaagcattagtgcaatcacttcatctttttgttggtctatgttgatgatgtaattcttgttagcaatgacctacaagagttggaggcattgaagatcaagttaaatgctcgattcagactgaaagatttgggaaacctgaagtacttcttggggctggaagtaggtagatcagaaaaaggcatatttgtatcacaaaaaccatatgccttacaactccttgaagacctagaacaccttggatgtaagcctattaacacacttatggaagccaatctcaagctttgataggatgaaaaagaaaagctggcatatccaactctatatagaagaatcgtgggaaaactccagtatttgaccataataaggccaaacatttcttactcagtaaataaactgagccaattccttgttgtgcctcgtgctactcatatgaatgcagcaattagagttctacaattgtgaaaggaacccctggtcaaggaatttattttcatgctgaatctgaagtcaagctgagagcttatacagattcagattgggttgcttgcccagacacaaggagatcaacaacagggttttgtattttcataaggaattcaatcatatcatggagaagtaagaaacaacacacggtttcaaggtcatcagcagaagctgagtacagaacaatggcaaacacaacctgtgaaattgtttggctcttatctatcctaaagaaactcaaggttgatcacgatgaaccagaattgttgtattgtgacaacaagtcagcacaatacattgcagcaaaccaaattttccatgaaaggacaaaacatatcgagatagactgccatttggtgagagaaaaggtccaagaaaagaattattaagactgttcatgtggcttcctaggagcaactggtcgatatactaactaagcctctattccttactcaattcaagtacttcaaagataagatagggactaaagaatatatattgcccatcttgagggggaggtatcaagttagttaattctggtattagttagttgttagttagtgtcctagagttagttagttagtgatgcaactaactcaagctactataattagctgaattgtaattgtaacagattgaacttcttgctctgttttctcgtctctctctctcttcctcgatggattgctgatagagcatttcagagaaaagcttacaacatataatgtgatatgtattttgataggaaatttttaatgatcaaataaataaaataaagacatctaaagttaaaacaaaacacaaactcagtgatgaaaaacatacatgtaacatcagcaatatga

SEQ ID NO: 194685 - DNA, 954 bp, Cannabis indica
atatatactcgtgcgagttacacttgacccatatttacgttaaataatatataataatagtaattattaaaaatttcgtttttcttggtagtgaggaaatatatatatatatatatatatatataaatcgatagatagggtttaatgggatgagaagggatggcgatggtttatatttctggtcactgatcattatcgaccactatctttttcaccaaagttaaggcaatatataaatataaatatatctatatatataaatgtaaacacactacacataacagataacagaggagaggaagagctaggttagaaaaattttgtaaaggaaaaccctagagatgtgtgttattgtgtgtgtggatgggaattaggaaaagaaggcgtgagatgaaaaagattctaaccaaattagcaaaagtaagtaaaaaagaaagaaatttaggaaaggacaaaggtggtaataaaggcaaagtctgctctctgaagatggtttttactgacttaaatacgtatctgtctgtgcgtaagtcgagggagattgagtggtcaaatcactaaaagtaaatattaattttacatatatatttgagaaagtagaattaaaggaaaaaaaaaagggggggaaggggagagaatttaaaaacgtatatatatatatatatatccatatagttatagaaaacaaatccatcttgtatatatttgtagatatacataaagatacgcatgattaggttataatggtgttttttgtttgatatatatagatgatgatgacaagtgaaagagagagatagatagaaccctaaagaggcggagagggaggcggagggcttattgtccgggaggtaataagagggatcgatatatggaatgagattgttttttagataggttcggaaattgaggaaaacttttatttaaagattcattatagagagagagagagag

SEQ ID NO: 194686 - DNA, 1426 bp, Cannabis indica
cattaaaatatttatactatgctaacaaaattatagatcactattatgcatagcaaaataaaaaaatatatatataatataagaataataatataccatacaacaaaatagaattatacaataaatttatataccagccaacaacctacaacaatccatacaaaattaaaaaaaaatctacataattttaaaataaataaaattttaataaaattaatataaatatatcataatttttaagtaatttattctaaattctaaaaaaaatatataaaaaaaattattgatttttgtatataacaaaaaataatataatataaatatttgctataattttccgtattaatacactataaaacataataaaacacgttgataaattttaatcaacacactaataaaacactgccacctcacgcatttataaataataacaaaccaactgatcaattaattctaaagttgtatcgagaaattataataataataaaagaaaagtaatgatgtgtacatcagaactgaaaagcgataaagaaacttttatttttttagttctttttccctttattgttgggtgtaaagcaacatagttgtagtaaacatatttttggtaaataattaacaagtgttaaccttatcaacattcttacccaaaaaaaaaatacaagaaaccttatctacattcctcattaaaaatttgtaagcatggacatttgttttgtccctccaaacatttaatgggacaaaagataaactaattcaaaattaacatgaatcaagaccatgccattaaaattgagaataataataataaaaattgacgagtttagtgggaataaagtatgttatcccaatatctcagcaaaattatattgatataccaattcttgaatcaattgtgatttgtactcaaagatcgactcaatcttaactatattctttttcatattaaagttttttaaatattcattggtatttcgtctaaataataataataaatttataaaaactcaaaggcttaggtggaacgtagagagctggattttaataaggcaccactaacttactatgtattgataaactattaacactttaatttatacaaaattaaacatgtgaagttgtgaaccaaatcatctcttataagaaccacaagaataaagactcaaaaagtaatgtcatgctcctattattgctgtaatgaaagcttattttaatgtatatatctatagtaagtggccgaggatatcttaaaggatatgtacatatatttgcttagcttttcaaacatgtaaagtcgaaatatttcatggacacattctaagattttgtaataggttgtagtttccactaccaaagcatattatagcttatagaatctctttctaatggattctctcataaaattgtgaataaactaggttaa

SEQ ID NO: 194687 - DNA, 1523 bp, Cannabis indica
ttaaaatctatatataaatttatggaagagttttcaatatattgttgtgaagtattaacatataatttaattcaattagttctgttattattattttttatgcatgtatatatataataaagcaggttcataaaaatttactcaatacttttacaaacaaaaattcatgctagatattaacacccttatatattacttaatttcaccaaacacttctccattaacttatagctcttactcttgaaacttgtaattatatcaatatacactaaaagagctaccaatacctatgtaataataaacttaaatttgcccactaagtatataagtacttatatataatggtacaaatatataatatatgtatatgtacaacatctgaacatcatcaaaacaaaaagataaattttttcattgataattttgcttccaaggaaggcatttgattttagggcaagagttggtccaactacttgtgcattctccctttgggccatcacaacacttgcaaaccagtcccaaagtagcaaaaacatttgcgtatcctgaaaaaaaaaagttcacaaatttcatcaaaattatactttaatatatatacataaatatgtaaaagctattaagaaaagagaaactaaaactgggctgtttgtgaaattacttactttgttgagcagaggaaagaaacctagcttgaacagccactgatttctctgaagcaagaacagcaaaaaggaccaaaacaaagagcaaagaaggctttgaaagacccattaaattcttgtttcttcttattattcttcctcttacatgaaattttattgagacaaacttgaattgggtttagctgaaggagctactgataaacacaagtcaaccaatcaaacccaattggggctttgtaagtcatcccttcccactatttaaatagcctcattattagtttattaaaaaattttgtataacatgatatgatagcttagttcatctagaagaaatggtagccttttatttattttattataattatttttctgttctaatttgcacaaattaaatcctaaattaatattctagaaaaaaacaaaaagtaaggtgtcacacgttttccacttgtttacgtctctagtgggtatgtaaatgtaaggaagtttcctatagttttgagtttctttgggctggtaacttctttcacaaacaaacaaaatctttttttagaggatttcatttctggatatttcataaatactaaaaaaaaaaaaaaaactcacgaaattttaaatatttgtttataattttatttgcaaaaaaaaattacgaactagtgatgttttcatgttattttgtgttataattttattgttttttgttattttgtttgttatttattcgattgtttttttattgttattttgtatattatttttattatatatttttatttattttctatgttattttataaaatactgtacaattgtaataaaaattaaaaaaccgtaaaattagatttcttttttctattc

SEQ ID NO: 194688 - DNA, 966 bp, Cannabis indica
aaatataatgagcttgtacaacttagggccggtcttaaacgggttcatgtttagagttcatattttttgggatccaaaacaaaaaataaaaaattctttttaagtttttattcatagcgtaattagttggatgtattatatattaatacaatgtataagttttttaatatttttgagagtgaagatccaaaaccttaggttcataaactctcaaggtggaacattggtatagaagcttctaatgttgaggtttaatgttgttttactatggttctaatgtgcatacataattaagttaagttgtctttagataattggagcttctattttattaaataataaaaaaaatatatatataaataaaatagcttaattttaaaaacaattcctaacacgaatcaaacatataaaaaaaatttattttaacaaaaatattttatcatttaatacaagatcacaaaaatttgcaacataagatccatatttacccttattaatttatcattaatttaaatataagcattggtttcttacactaaggccttactaagattatgttccaatatcataactcattatggataattggatatataattgttgttatgattgttttaatgccttattataattatgttgtcttttcaaaagtataattttccaaaactgttttggtgttatttattagataataaagctaacaaatgtgcaagtcaataatcgtagaaacaaaacaccaaacattaatatacggatagccaagtacaatagaccaaattctcgactcaccataaattatgagcaaaaaatgtaaaactaaaacacttgaaaaaacataaacacacacaaactaaacacaacatacccattaacacttatgtaaaccaaaaaaaaaaaaaaaaaacaatgcaagacactactttattattcctatgatttctagatacacacagtgcttttacacgt

SEQ ID NO: 194689 - DNA, 592 bp, Cannabis indica
agcgcccttttataaaatcgccttggctttgagctacaatatctggaagaatcagcttcaagcgactacaaatcattttagtagctactttgtacaatacattgcagcaagctataggtctatagtcatttacaacatttgggcatttgcttttgggtacaagtgtaatgattgttgagtttaattccttgagcaactggcctgtatgtaaaaaagaagtgactgcttcaaagatatcatttttgaccgattcctagttatcttggtaaaatgaactattgtaaccatctggccccggagcctttgttacagaaatactgaagacatcctctttgacttcatccaaggtgtaaggagccttgaaaatctgagtgtcctgctctgtgacacaagctccttgtgtgattaatttggtaactactgtccttctattttcaattttagatcccaatagattttggtaaaacatcagaagagcatttgtaatctcataaggttcctccattctttttcctgcagtatcacagattgacaagatgctattgcagatccttctttctcgaatgctcgagtgaaagagagctgagttttc

SEQ ID NO: 194690 - DNA, 730 bp, Cannabis indica
ttgatacaaatatatcataaaattattaggagggtcttattgatgctcttactaaacaacatgaatgaatttgatattattgaaaagaaaagaaaaactaatattcttgtttattagaccaaaaacttttcttaaaagtttccttataaaatgtttgttccgacttcagaaattgtggacatacaaaacaattgtgtgactgaattttagcaacaaaaaggagaaaaaatgtaataacaatctcctattgatcaaatgaaagtaaagaggaaacaaacggataagtaagaaggataatacatttggaataactccaatatctgtcataatatatcttccgcaatctacagctcgagttaaacacttaagaatacacataataagcacatatttcacattattcctcaatatgtaagaacaatcaatgaaactggctatacaactgaagttgactccaacaatggatcaaggtactctttgagcttcacctttgtgattgcaccttctctcctactttctggtacttcctttccattattaaataagatcaaagctggcaatccatacactttgtactcttcaattaattttggatttgcatcatgatcaatctttacaactgttaatctgtccttgtattcctatacatggcaaacaatttttactcacatattatgacatgaaaactccaatatcattaccagctaaaattaaacgttttttttttttt

SEQ ID NO: 194691 - DNA, 1799 bp, Cannabis indica
atactcctaatttagttctcattctaatatagaacattagagttatgtttttcatttcagcattctagataatatctttggacctaaatctgtatgtattttgcttaaaattctcttaataagaaatgaacattaccctttatagcaatagagtatttctttcttttgggaccacttaaatttgcaagattatctaagttgctatataggtgtatgcaaaagctaattaaggaatgtacagagcaaattttaagttgagaacattgcaattgaattgggtaaacacttcacgtcatattaccagcaggtgaatagtagtaatgatttcttttttcttcttttccatatacgttatttgaatgtactatagtatttaaagttgttattattcttttgattttagtaagtactgtgttgcaggacaggataagaatgtttgttgtatcaatatgtataagatgatccaaaaaatttagtttattttatttttgacagatttctacaccttttttcagttatgtttcaaagaaatgttaatggtaatctatatgtcattgagattgaagaaacccaaaagataccccaactttatcttctctctctctcttttcagttaaaatagaaatttattaaagagaaatgttgagttcttttgaggtggcaagctttgcctacgttagactgaatcacagtaagattttgttcttcaatttctcgaaacctgaaaccgctactaaaaggtagaatcgtgttagctaaatgattctaaggcatgatttatttattttgtcaaagctatatattgggtttggaatgattaaaaagaaaaattcgagggaatatatttgtgggttttgaatttttttggtcattaggctactgttacttttacaaaaagtcgacaatgatgagttttggagtgagtaatatttatgaaattttaatttttttgaccaggttggaaagggtttttgtaaagatgccaaagcacaaaaattggctttccattggattgaagctgtaatggctttcttatgctatttttattgttttggctttggttttgtttggtttggtttgggtatgcaataatatgttctgtactcctataacatgttgtgtcccattcaatgacatatttactaaattataattagaattataataaactagtattcgtattatgctgttcactaaaattaaccagaaagagaatgagaataagaatcgttttatcatatttagaaatgaatgataatcaatactaagagatattgtcatgtcaatatgaacacataaattgatttgtattggtttgattagcaatagtatctatagcattgtatcttacatttgaagtcatgacattattactaatttttttttttcaaatttgttgcaactaaggaaagtaatgctcatcccatttacacgaagaagttagttgaatttgacaggaccgagtacaccgatatattttggcgagcaagatggcctaatgcacaacgtgttcttgaaatgcatttcttcaatgaatggaaatctattcttcctcatgaaaatgaagcaaacccatttattctaggtagatcaacaatacatggaatggtaataataaggctagaaagctatgctatagtaataattttcatgatgagctcatcttgttttggtttcactttttttttatcttgtaggagagagagattcgtcgacttggaggcatgttctaaattcgacaacaacaggtgacataaaaagtatgtccatgcatgttggccaaggtgtaggtctaatta

SEQ ID NO: 194692 - DNA, 1191 bp, Cannabis indica
agggtttggctacttcgttgggtatagtattagatattttaaacatagtttttctaaatttcactgtactagtctttctttctgttctacatttattaatgttgttactcattccttggctaaatatacactgtcggaagttattaataaggtttggtggtctggttatctttcttgtatacatgatcacattttatataagatgagttaatataataagttttaactcctctttggggttttttacaaaaaaaaaaaatacaagttgtaattttttattataattattaaagtaaatatcggtataagtacttaaattttaagtttataagcggcataaactcaatatttatgtttagcgcattagtatctaatgttttgtaaaactgtaattttcttcaataactccaatagagtaacctttttcaggttatggactttggggattagcactacatttgtcgcaatgattcctttctgcattactccaatctaaaaaaagttcaaaattgaatcacaaaaatctcctcccacaatgtcccaatagtgtttaaagaacaagactgaaatttcatacagattaggagctttgtagctattcagggtgataagtcctttcggatctcttcagcttctaggacacgcataagttttattgatcatcttaagttagacatctatgataatattgttcatattaggcatctatgggatgttcctacacgtaaagatgcagttgaaataatccatgaactctttctcaatttgattttggctattgatccatttaccatttttgtcgatgatgttttctatcacattgcagctctatctaataatagccaaaaatggaaaaaaaaaaaaaaaaaacaaaaaaaaaaattgaacacttgttctcgtatttagagttatatttagttaatgtgtaataaaaaaatatgtagttttcaacttattctttgttttatatttaggtgggcttgggtatactacatttctgcaaaatgtatacatgtttatatgatttttgggccctaagtttgagttgggcttaggcactacaccaatttaatccggcttaacttgagattagacttgatacacggtgcaagtgcaagtaattataatataagattcatatatcatttattaaccaaaaaaactgtaaaacctaatattaataggaaattt

SEQ ID NO: 194693 - DNA, 914 bp, Cannabis indica
aattttgtattggtcaaagttaagagggtaaaactactaatttttaagagtaaaagaaacagacggaacacaaagagcataattatgtaactgttatattttaaggagaatttttaacaagccctatattttatgagacaaaattaggtagtgtcgaaaaaaagcaaaaaatactaattattctaatatatattaattcgtatgtctagtttatttttggaaaaatataattagatagaaagagagaaaaaatttaaagtaattaataattatgtgttgtgttagcctaatatataattataaatttggcgtttttattgaggcaggatattgaggcattgtcaaagaaactgaagtttatacctaacttggtattcaaaacggatgttccgtacgtggaattcttggaccgagtccacacatccgagttgaaactcaggtcccagggattgtgggacgtaccccacccttggatcaacctttttgtccccaagtcaaagatttctgactttgataaggttgtgttcaaaagaattttgggtaaaaacaccagtgggcccattcttatctaccccatgaacaaacacaagtaagttatgcactttcctttttcctttttctctctgtatgtatagtatatttaacccattatatacatgctttctgaatataacagcttcattcttttacactctgcatgcaacacaaccaattatacataaattgtattaatttatagaccaataaaaatcatctgtctccaacttcctatttcatgtcccaacacatgtgtccattttatttattttatcttaactcaaaaagcttcgttaggtttagaacggttagtcataaaacattaattatcattacattggaaattgacatcaattcatctttcttttttttttttt

SEQ ID NO: 194694 - DNA, 683 bp, Cannabis indica
aaagatcatggaggtttattggggaagcaaaatcagagagtgtgtcccatttcaagaaataatattaataataataagaaaggaaaatcagaggagtgtgttgtgtgtggggtatatagttctttggtatttgctgcaaaaagtttcaaagcttctttacacttgaaaaccaaacccctctactctacttattcattgtgggcacaactttactttggagtcatctctcttcatatagggcccaattctttagggtttgttttgcttgcttttatatggttattttattacttccttgtttttggtattttgtaccttgatttcagtattagtggatttgggggtattcattgatttagaaacaaaaatggggttttctaaaaatatatatataaaaaataataataaattataggatgaatgaaataatgtatagcattatgtagtttccattacattgctatgatagataaaataacaaagaaaattcccttgaagaaaaagtgaaaaaatttaaaattatgaatatttgtcaacattgaaatttaaacgtatatttttgggacaacattttaagttgggaaatttctttttaactcataggagtggagtggggtcattatatattgtagagacttgttggactttcacaaaaactccaaactttttttttttttattttt

SEQ ID NO: 194695 - DNA, 1581 bp, Cannabis indica
aaaaaaaaaaaacaaaccttttccactcccaagaataagagaggaaaaaacaaaagggaccacagggcacagaagcaacagaattgtaataaataaaatagtaacagtgatacatatttatgtgtatatatagatctttccttcgatctttgtgcaattaaggggttctattttatagagtagaagaatccagcactattaatttcctcgtcctttaatattatttgatttgatagttactcatccttttctaatttatgtacctccaccaatcaaattaatttttcattagttaaacttgtaaacatatcaaaacaaaaagtttattgtataattatatccaaattagtaccaaaaacaaaagattagaattaagaaaatgaagtacctaaaaggtcggaaggaaccttgccattggagtatcttccggtgggtattcctcctctgaaatcacgaccatagggaggaaaattagaccttgccggagataagatattgttgttgttattacctgtatcaacaatcgaatctccgaacataatcactgctgaaactgtcatgttctccggtaacttaaccctaccttccgtcaataatacacaccacaaaaatatagtaataataatgacccaaaacgacgccgtcgacgtgtttctttcatttctcctcatcattctctttaattaaacaaataaatttgtaagatttttgtgtagtagtagaagtagtagtaggaagggatagcaaatatatatatttatatttataggtcgaattctaattccaccagtttgtctgacaattaaaattgttgttcagttgagagtcatttattagagaaatgaaattattattataatcattttctttctttcccttattcttttcttttttatatatatagtattgttattttacattttacaatttggtggagagttatgcatattatttattaaattaaaatgtatgaaatttaatattgaaatatatcaataataacatatgctattttatgtggtatttaatacattaagttttccttaacacttttcatatatatatggttagacaaataataataagtaatatttgtgatgaaattctcttaatatttacaattaatacatataatcttaattaaaaaaatataacaaagttatcttattttataattttgttacagccatatttttttaattattaagtgtcagtttaaaaatacgtaacaacatattttttttttgtacaaatttttgagttaatgcggttaaaatataatacgactataataaaattataaagtaaaatatttttgtcattactttttaattaggatcattttaataataataataggtgtaattaaagtggttgtcatgaagttaaattacgtgtctgctttatgttctgttggtcattttaaaaaaaatatatataaaagtataaaaaaaataagtatggtggattaattaatatgtcgtatatcatataataacccaagaaaagaaaaatttattagtacacgctcgtggaaaaacttcactttttcaatacttgtgtacttcttgttcttttctg

SEQ ID NO: 194696 - DNA, 1419 bp, Cannabis indica
ctctctctctttcaaaaaatattattagataggacatatatgggaactcttgtaggacacgtggcaccagggttgggattcctcctcattggattatggcaccttttcaaccatatcaaacttcacgtacttcatccaaattcttacatagctccaccttggttcccaaccttaaaacctaccaagtacaacgagctaatcctcatcatgattggctcgatggcctcggttgccatggagctcttcataggccccgagcgacaccaaccactcgaccatgatggcaccatccctacaaaccatctccacaatttcgagcactcttttatttctctcactttttttgcatactctcttctttccattcttctcgatcgtgctgaaatacctaataagacagtgacacagcatggcatgacacaattaatgggagcggttgcctttgcacaacaactcctcctctttcacctccactctgctgatcatatgggaccagagggacaatatcacttgctactccagctcgtgattcttgtctctctggtcacatccctaatgggaatagggctaccgaagagtttcttagtgagttttgttaggtctcttagcattttgtttcaaggggtttggcttatggtgatggggtttatgttatggacaccatccttgatttccaaagggtgtttcatgcactatgaggaaggtcatcatgtggtgagatgctcaggagaagagtctcttcatagggcaaagtctttggtcaaccttcaatttagttggttcttcattgcaatagcaatttttggggtgtcactctacttggttttggcaaaggtttatggccaaaaagttgagtatttttcattgggattcaatgaagaggataaagatgaggatcttgaatctcaaagaaaaatcagcttgaaattagaaaatccaaaagttttgttgaaatgggaaaagttgatcttgggcctattgacatagaaagatagaaattgaaaagtattttttaaaataataaaaaaaatactattgttgttccttgaaggattagacatatggttaggtatgtatgtgtaaataaataaattaattagctaggttggtgggttccatcctaggggaaaaaattaattaagccagtaattataaattaattaataattattaaggcttgatctaattttaatcattggagagaaaattggtttcgtgttgtcattattaaattgttatgaattgatatggttttaattatatagttaatagggtatagtttattatttttcttgtgtacatgtacatgtaaagaaaagatgagagagtgagttttgaatatattcgaaaccaccaacttgtaaattatgtaaagaaacttcttgtaatgactataatcattatataattcacttatta

SEQ ID NO: 194697 - DNA, 1545 bp, Cannabis indica
gtaatcatatagactgtaatatttgctttaatgagaaggatatgtttcattttactgcttattatggttctcctgtttcttcacaaaggcacttaacttggaatttacttgataaaattttttattctgctcctaatttgccttggttaatcatgggggattttaacagtttattatcttatgctgataaaattggtagtacttactataatcataaggacatggatgatttttccaattttttagttaagtttaatctttttcctctttcttgtgtgggtaacaaatttacttggcgtaatcgatctgtttgtgaaaggcttgattgggctgttgtttcggattcttggtgtactctttttccgaatgttgttttacatcacctttccttttatgggtctgatcatcgagtttttaaagctttttcttgatgatcaaaatcttagctcttcttgtagaaggagcagacgattcttttttgagaacgtttggcttgaaaaccctgaatttttttttctgttattaaaacttcgtgggacaatggtaatgttagtcagaataattctggtccttttcaggactttctttccaaacaagatctttgcattgctgctctcaaatcttggaacaaagtagctaacttatctttgaagtctcgtatttctgatctccagaatgaaatttccagatctcagggcctttccacttataatcgggatgaccatctccgtattcagtgtcttcaatcacagttagatgctcttctctataaagaagaatttattggagacaaagggctcgtactcattggcttaaagctggtgacaaaaacactaggttttttcaccgttttgcctctcaaagaaaaaagaataatactattaaattccttaaggatgactctaattgcgttgtttctgatcacgatggtattagtaatatggtggtttcttattttcttgatctgttctgtgctgagaggtgtgatgctgatgctacctgtcagattttggattgtcttggccctcctctagaagatgttgattatgcttatctggatgaacctttttctgttgtagaggttaggaaggctctttttagtctttctggggataaagctcctggacttgatggtcttaatgcctatttttatcagaaaaattggtccactttggggtctgatttagtccaggctgttctttcttgtctcaatgagggtgcagattttactcacattaattccactctcattgccttaattcccaaaaagcagcatgcccattctttgaaagattttcgtccaataagtctttgtacaaccttgtataaagtgatttctaaagtgttggctaatagattgaaagtggtgttggataaaataatttctccatttcaagtgcgtttgtttctggtcgagtcatttttcataatatccttattgctcagagattgtgcatgctattaattctcgtaaaaatggcaagatggttgggctgctcttaagttggatatggctaaagctttttgaccgtgtggagtggcact

SEQ ID NO: 194698 - DNA, 1066 bp, Cannabis indica
aatagcagtatgccacgtacttcttgttgtgtgcttggcaccagaagatgcccttagcatttctcttttcaagaggcctcctaccttgattgaatacccatcttaattaagcatggatgagatttcttgtaattttccttcacttagttgaatcttgaacgattgaatgattgttccaccatcaattctcatatactcacttaattacatgcatgatatatatctatctagccagacatacttaggaacaccctgaatctatcacctaatctataaatcttagtagctagattgaatcatcatagatcatttgtcaaattcatattttataattattataataatatattttttgtttatttgttttggatttcatcagatggtcattgattgccggtagaatcccaggaagaacagctaatgatgtgaaaaattattggaatactcatcagagaaaaaagatggttattaatattgatattcatcaaagtagtaaactcaataataataataataaccatgataaagcatggtccaacatggtaacaaagcctcgtccaactcgaatcatcagaagccaattatcagccatgatgaataataataaacaacctgttatagatcatgaccaaacaaataataagaattattgttggagggaattattaaacaacaatatcacagaacatggtgaccaaataattcaaggatatatagagaaacccataataaatagtggtttggctaatcatgatcatgtagtttcagaatgcaatgattatttcaggggccatagtacaagtgatgatcaatttgtcaataatgatcatgactaccacaattttttgacagacttcaacattaatgacatcgacatgcaccttttgggacctttgaattattaattactatagctagcgatacatataaatatatatatatatatacatgtgtgttttataatttataaatcataaactaataattatatgaatgaattaaattaagttatgtaatatttgtcattaattttgtatgtagtatgtaaggtacgactatttctata

SEQ ID NO: 194699 - DNA, 1017 bp, Cannabis indica
ataatttgtttgtgaacatgtgaataggggattatttgagaagatcagtgtctgtgattcaaagtggtgaaggcaaggtatggatccaactttcttagtaaccaaacaaaaaatgaacagagacttgttatgggccatgactgttttcatatttgggaacctaatttcaactctttgtctcaattttcacaggtagtattacagattaaaaagctcactctcttcaaaaagaagaaagaaagtatgtcacattcatttaatttactaattttttcatgtaatgtgatttgatagaagaaatgtaataaagtctttatattattgtttcaggtattgttcttgatttacatgctgaactatacaaggattcagatggtgaagctacaaatgagacatgttatcttctggttttaacaacaagtaaagggatattcaaattagatatgggagatgattatcaacgttataagacatgggctaaaactattactcaaatgttgcttctctcttcttctatcaataaatatgagcaacatttctaattatgtaaacttttcttattaaacagtgtttgtgtcagattggaatgttaaaaagttgttatttggttgtgtaattatatcataaattaaatgattgtgcttaatgtataattagtttgttgggagtatagtgatttaatagtaacttatcttattgttggtaccattttggacaaagaaatgaataatcaaaggtatgaaaacaatggtcatattaatatcagaagtgattaatttactgtatatcatgctctgtaatttacctgttacattttgaagcagtgtatcaaaaatgacatcagtggaccaaaatttgaataatgtatgattacttgttaagcaagaaagaaaactacaccaaaatattcgaagcccgagagagagagagtgttagaagcttctgcaaacaccagcttattgaagatgatggtcactggtcagtcaaaacatagacaacaaccgaagcttgaagatc

SEQ ID NO: 194700 - DNA, 3036 bp, Cannabis indica
acactgttcacactccttcagttgatggaaggcataagctataacttaatcagctagcattagaatgcattccagaccctgtctaaatgcatcacaataaacgatgaactttccctaatctgatggtaaggtaacatcggtgctgattttaaccacatgttaaacttttaacaactcacctcacacttatcaagctacacaaaccattggtttctttcaattaattccgttagggatattgagatcttagaaaacccttcgacaaaatgttgttaataccctactaacatgagaacactttgcaccttagtcactatccttggcctcgaccaattttttaactcacttgattggatcaattatgattctatctttttttgacaatgttccctagaaagggcacttccgataaccagaacccacatttttaaatttcgcatatagcttatgatccctgaatcgctgtattaccatttggaaatgctgttcatactcctctcctgaattttcaactgatgataactaaatcacaaaccgacctttgaaaatacagtctactcttgagactgtttgaacaaatcatcaatcctggcaatgaatattaattcttaagtgtcagcttgtttaattcccaatgaacaatacacattcggagggcaccatccttcttttcacaaataaaccctggggctcccaagggtgatacactgggttggataaacccaaaattgaacctcccctgaagttatattttagctccataaattttgctagagtcattcagtatgacgctttcgaaacaagttctgcctcaggtaccaaatcaattacataatctatctttcgttatgacagtaatccctgcaactcctcgggaaatacaataaaaaaattctttacaattttgactatctttggtccaaatgttccaagcttgatggagtcaatcgcaaccgctaaaaatcctacccatccactgcgtagtaaatatttagcccttgaagctaaaataactaggattcgagatccctgaacagatccagcataatcaaatggatcttcgttctccgattgtaaagtttcatttttactacgttagcactcaactcctttttctttaccctaactggcatagacttaacttgccctttggggatatccaattccccgctaggcagtaggattccagccttcttttaataaagtcacaaggcccacctaattattaattacttatattgccacgtttgaatgtgtagcccccagagtcaagtaatacaatagaataggagtggttgactagaagctggcctatcacgacagaaagacaggttgtagcatcagcttgagtgatagcaaaaattcgaacacatacgggttttgcctcttgcttctgctcttccttcttttcttgggaaaccccccttaaaatgcccaaccatgtttcctgattgcacttttcgagatgacgtttcatacaacgaggaacaattagggtatgaataaccctgacgtccacctctaccttggtttcctcaaaacctattaattaacggtgggataacttccatctccaacatactccaaattaggaagagtaatggtttcaccaacacttaatgtctctcagagctcctgatgaaatcccactccactctcgactcatagaacctttcaattagctcaacataaatcattgtgtcatttgtaatgattaccatattatatttaatcttggcatttaaatctgccaagtatttctcttccttgctaaaattcgtagatagtacacctgcaatcaacttgctttggcgatcacactttgttgtgtagtcgattactcacatattctctgaccacctcattataatacttagcattgaatagaacctgaatctcttcccaggtcataatagtgatatctcgagtgaggggcatcaacactcaccacactagagcgtcctaatggaattgaaacataccgcaagtcaccccatcattccatcccattcccagtgacacccataaagttcaggatcccctcaaacactatgactcgcagttcgattttcatattgtccggctttctagaaaactgaaagtgtcaacttacaaaacctcacattgaggttttatacaattaccaacaataaattattctgctggcactactaactttgggcagccgatacctacagtgatggtgttgtaggaggaccttgttgtctcattctctgaatcttctctttcttgataattaatatgggcttgcattcttgcaaccctttgctccccatttatggagctgatgatggactctcataaccacccttttgaaacctttcacgacctctgccacatccacggggattcagatattttgacttcactgaccgcctcctgtctcaacctcaccatcttgacttttgcatttcgttggacgttcatacactaggacttagccgcaagcccatacatcaggtaggtcgaatagcgatcaaatatattctatataccgcatttagggattttaaggcaacacattcaaataagtaattataaactattacactttctaacatgcttttcttatcacataaattactaaacaagtaaaggcttactgaactgtgagtcgagcctttctctgacaatgattgtacatgtcttgacgatcttcggtagacaacctggcggctctgatactaaaattgtaacgcccttatgctaaggcacgctacagaaattttccaaatgacatacttccttgctaatcaagagttttcttttaaaatcgtgtcaaatcaaaatttaaataaaattaataaactttataaacatacaaatgtatataaaatatataaccgggatcccgtgctaaaacatcttgaaaatatttttacaaacttgtcgcatagcgactcaaaaaatattctaagatgtccagagaccgaacactctagattgctctgtcttgacatgtacaatcattacccgagctcgaaactcactcatgttcatctctacctttcttta

SEQ ID NO: 194701 - DNA, 1046 bp, Cannabis indica
cacccaaagggttgccaaggtaacattacttttattatctattattttttcttttctttattgaggtttttctgtgttatttttattcaaacttaattaatattaattaattagttaacagtaaagagtaaagagtgaattttaatacatttttaagactattcactatgtatggatatgtggggcgttcttagtgattagattttttatattatttatttgaaaattctagaacgtctcaatattatatgtccattaatattaattaatatatgagcgatacaataattctaatgttatattatttagatgatataacaaaccattttctagagatggcaaaaaatccggatatctagggcgggtcagagtcctgatccgatggggcacttctgaccctcaagacaaacgggtcgctaacccaatccaattgatatatattctatgaatggataactttattattattttttttatcagaaatagaagaccttattattgtttatgtccttttaagcttgctcttattttttaattattcagatattgacgagtgcaaaggtgaaaatccgtgcatcaacggaacctgtattaatgtaaatgggagctttaagtgttcatgcctaaagggttataaaccagtcaatgaaagtgaaacaacttgcggtaaaataaatggatcacgtagagctctctgcctctatattcctttgggtacgtatatgtattttactcaaattgatcatcatgtttatgttttctttcttttaattattaattgatttttgttttataaaggaaaaaaaaaaatccacacggcgcgatttgactctagcttacaagaatctaggaacaacaatgtaattatatgatggctggtatagagaacaattaagttatggaaataattgactatgtatttacctaactagttagctacattgcgtaaatgataaatttataaactgagagtggggactagcgagactgtttttaagtggtatactgaaaataatagtactatatcctgacaaaaaaaaaaaaaa

SEQ ID NO: 194702 - DNA, 1260 bp, Cannabis indica
ttttttgtttttttttttttgagaaataaaaaaaaaaagatgaaaaccagcttgcaaaatgtatgcagatagccaaaatagttttaccaggagcatttttcctgagaagtatctaacaagaacattttattaaccataaatatctactggcaatatgccatcatcaactagtttatacagagtttttggccaagatgttactgtccaaaccaaatagctaaaataatataaaagaaatagtgaaattggctcttgaatttcattgttaaatcttcatgtttaattgcacttgtttggttacagttttaaataaccgttcttagttatagtatgcaaatttaatgaccagtttcattgttaaatcttcatgtttaattgcacttgtttgtgtaagttggatgtcacaagaggaggttgccttcgttggtatgatactgttgtgtgaaaaaacatcacataaaatagtaaagattgcataacatatcatcttctatggaatccacaagttacttaccagttagaaatttttttaacttctaatcttctaaacttgtactcttatcaaaagtacaaaaaaaaaagttataaacagcttaatacatactatatcaacactactcaacacctcttccaaaactcacaatggaattccaaagccaagaagatcttagcccaaaaaagggtcagcctgcatagacaagcagagttccctttccatactaaggtctcttctctagatattagtatcatggtgtagacttcaatagtcttcttctacatgcaaatcctgcgctctcccattgtcaacccgagatagtgaccctgtacatactgggcaaggagggtcccttctatcctcgtaactcgtttttggttccagacaatctgcatgatagagatgaccacaagctagaaccgccaccaaggaaagttgaacagaagatacagagatccctggaaaataaagcttccgactcaacgatttctgacaaattacgcagattgtttttgtatgatcggacaatatgagatctgacacacatgacctaattctttctggctcaaaaaatgctttctccctaaaatctgtgggaaaatgaaaaattgaaaccaatgtcaatacaaatataattaatattgaagtttcaataattgtactggaataaccgacacccaaatagcagttctagtcaaaaaatttccacaaaaactcatgcttttcatatctaaaaattcaaccgttaaagattgtaaataggg

SEQ ID NO: 194703 - DNA, 594 bp, Cannabis indica
gatgttatagagttttcaataacctaaaacataattataccctcttaccataggatcccatatcctccccaataaagaagattagattttccccaccttctataatctcatctggaacagtcgaaaaatatcaagtgtttgccatatgtgacaaaagcatgaaaataaaatagttaatacaaaagagtttttgtgtatagtatatattttgagttagttctaattttacctttcgttgccttttgcttactgaattcggtggaaacatagccgatcctgtcggcagggccaggcaaatactgactgcttaccaactagaaaggaaatccctctttttttttttgtgttaatttaattatttatttattttcacttgtatagtatggcttcattgttcaaacccacttatgtttttgtaaaagagaaagtagatataatgattaatacaggacaagactctctttctacaagaatcttgacactttcaatgctaccccatgattaaccttctctatatactatatacatcatctttgcttttcttcatttcttcccaggctcccactaatactaccaataccaataccaatacca

SEQ ID NO: 194704 - DNA, 923 bp, Cannabis indica
ctttttaccgctagttttaactgcaaaacttcactctctttttctatttttggccacacaaaaatattatgttctttttttttttttttgtaaaaagaaaaaaaattaagtacttctttaatataattttggcaccaccatttattaaagaaaaaaataagcaccaccatcaaaggaagttgagatcgaacttcatgtaggcaaaagtggctgtatctatctcatctcgacagtaacgttgactttctcctcagaaaaaccgcgttcaggttgactttattttcttctctgtttatttttttccaaggaaaatccaaaactcatgtttctctcactttgacttaagagaacaagtttatgacagatagattgtaccttccaaacattcaatagaatcagtacccattttttcatttcatttatttatttatttatttattatatatatataaagtcttcaattttgagcttcattttcactgggagactccttcgcctcctgattgatgatctcattcataaccgcagcaccagccagccaccaggtacaattcattattcacgattctaatccaatctcattttcatttctttgattcgatattacatgaacttaaacttggataacgcttcaattctatatctttcgtgattttctgtattgatcttgttctgcaactgtttcatctcaagtaatcaagaagatgaatcagaatcattcaacttgatcctattaaaaaaagtagaattgtgtctaattcagtaaaacaataatgagattagtcaaatatttagggctgttgaacctggcaacgcaggaaaaaggggtttctcagttgggtttggtaaagggtaaagttaaattcaaaaaaagtttagcatttttatttttctttcctttttttttttttgtttacgtaact

SEQ ID NO: 194705 - DNA, 1649 bp, Cannabis indica
ggcaatgtacctttgtggctccttcagcatgtactgataagaataattttctctcagctttctggaaaaacaaaagttattttcaatcaacaaataaacagaagatagaagtaacgttcagtgggttggtctgaaatcatgaattaaaaaaagaaccttaaactgaatctaactattggcagaatttttttttcccttcttcagagataaataagtccttatttgaagcctattgagaagttcagaaccttaaggggattaagacaaggtgacccactgtcacaccttttctatttacaatggtgactgatgaattagagacaggagttcaatatgtaatcagtccttgaatttttccttttgagcactcccaacaactatatgaatagaaaaacaaggccttgcaataattagtgtcaaagcatttgtcatactgtttttcaccggacaggaatctttgatgtattattctctgattataacaggactgtctttatgattctggtagcgggtttggttttttaggtcttataggtcgtgtgggtccttttctaggtgtttaggctagatggtctccttcggttgtcatgatttaattaataaaatagatattggcggtaaaagcacccgaattttataccttcttaacaattaatcaaaaaaactaattttttgaaggcaaaaccatgtaaatctcttttttttttaaatggttgtctgcgatgtgaactggaaccaggtaatgcctaaccgcattgcgttgtgtgggtttgatccttcagtctcgtccatcctcaactgtgctctacatctccaggcaaaacaatgtaaatctcaattctgttatgttatttatccctccgtccaaaacactcaattaagtgtcacggtggacaactgaagtgtatactaacatatacgtagcagaatttgagtggtccacctaatattaattatttaaatattataaaaaaaaataatttataaattttaaaaataaaacaataattgttttttcctttttgagtaacaaaaatacatgagactagaaacaaagtgattgacttcttcatacccaacaaaacccaaaaatcgaaatatgaatattccaacaaaccaccccaaaccaccaccattattaccatccaccacaccaccaccaagccactaccattaccaccaccaccaccaacatttctctaaaatcaaacaaacaaacaaacaaaaaacatagatccaaatctggaaaaaaaaaaaaaaatcaaaaccccacaactccatttgatctctgctttcaagaactcctctgacctagcagtgttctccctctcgccggaaccccatacgacctcgttgaccttaatatctagatcgaagctttcgttaactgtagtttcagaggtcaaggaccacggtggtgaggtccatttgggtcgtcgggccgaaggatgacaacaagggtctcgtgctctttgtccgttgtagatagagtggcaccgagagggagactaagcgagtgagacagggctagatttttttggctttgggaaaatggatctgtgatccgttggggaaaacggtggccgaagcacggtctggacaatgccgccgcacaagagaggggtgagagagaaagagagaggaaggag

SEQ ID NO: 194706 - DNA, 1279 bp, Cannabis indica
ctttatgatcttatatatcaaatttgatgggaaatttttaaatatgttttttttctagcgattcgggtttcgggggttcggtccggtcctcgtccagtaagaaagattatgacggtggtgagtcaccaaaaaagtttgacttggaagggctgtctcatttcgagaagaacttttatgtggagtcgccgactgtggcagcaatgtctgagagagacgttgaggagtatcgtctgaggagagaaattacagtcgaaggccgtgatgtgccaaaacccattaaggattttggtgacattgggttcccgggtacctattttcttctcctttgagtttgttttttaaacccagctgctgtttgttgtttgagttttttgtaataagaatacaacacaactttgggtatggattaagaacagtacactgtgctaaatattaattattttttatctcaatcaatttttcagtaatttttttgttaggtaacttctaattttgtgaggttttattttcttgtacgagtatttttgtgtaaactttctatttgaatgtagattatgttttggaagaaatttcaaaagctggttttgttgagcctacgcccattcaagctcaaggatggccaatggctctcaagggccgggatcttattggaattgctgaaactggatcaggaaagacacttgcctatctattgccggcaattgtccatgtcaatgcacagccaatactatgtaagctttaattgtttaacttcaatgattatgtggttattgttactgtgaaatttttgtagtggtttgtgtatatttattgaaccacatcaactcccatgaatgtgtacctttgttcagctcctggagatggtcctattgtgctagtcttggctccaactcgtgaacttgctgttcagatacaacaagaggctaccaaatttggtgcatcttcaaagattaaaagcacctgcatttatggtggggttccaaagggaccccaagttcgtgacctccagaaaggtcagtggtaatttaaagtttctgatctttgtatcacaatgtcattcagtttttgtatttgcttcccgtgttgctgatgaaactatactgtacgttttctctctcaggggttgagattgtaattgccacacctgggaggttaattgatatgatggaatcacatcatacaaatttgcgaagggtcacatatcttgtcttagatgaggctgatcggatgctagacatgggatttgaccctcagatacgaaaaattgtttctcaggtat

SEQ ID NO: 194707 - DNA, 1250 bp, Cannabis indica
cactatacaataaaaaattaataaaaaaaataaataaataggataataaaataattttatatgtatatataatactatccctccacctctccatccttctttccaaacaacttgaaaggataactaccatactctccctcccttatattctttatcctccttcaattctccatcctttatcctctccatcaatctcaccaaacatagtgtaaaagtaagattttttgtagtaaatacatgaatctcgatataaattagcacttctaacttagttttttttttaattaaaaaaatcttactcttatttacagcactttccttctttcccatatacatgtactatgtactataaaagaactttaatatatctttatattttatatttcttagaaggaaaatgaattgttaaaatcctataagtcaaactcaaaagttaattttcataataaagttacaaaaggtgtttcccacggggatagagcacattttcatgtagtttcatttatttatttcaaccaagactaattaatttaatatatgtactcttttagcaattgatgctaattaaactatacttcatatcatattaatgatttaagtcaataatcaacattcaatagtctattctgatgacatataacaacatcaattataagatttgattaacttactatttaatcaacaaataataaatatataaatatatatatatataaaatatagctatagtttattaatttataccccacaccgacgacaaaatactttccgacaaaagaagaattattatttttcacgtgtaatgaaaaatctcaataccctttctttctctaccgccacaagaaaaaaaaaaatcttaattatatattcaaattaaaaaatatttaattcccatgcttatttttttttaatgagtatagaattcacactctctttccatgcttaatagtgttgaatatatacagaaaaatacaaataaaataaaaaagaggaaatgtaattaagtttatagattaattcttaaatattcatcaaatcccaaataactcttcttaattaatctaaacgaagtcagaggcagctggtagaagattcattgagctaacaacaataaatctacacgtataattttatgtatctcaattatggccaaaatcgatttttttcttagaagaaaatatgtataacacttatttaaaaatgatatacctatacattaagtgttagtacctaatagaaaaataatagga

SEQ ID NO: 194708 - DNA, 1286 bp, Cannabis indica
ggttcgggtccgaggtctgggtcggggtcgaggtttgaatccagggtgtggggtctaggttggggttgagtttcgagtctggggtccgaggtcgggttcgaggtccgaatctaaggtcctggtccgtgtcaaggtccagagtcgagttcggggtccaggtcggggccaggatccaagtcctaagatctaagttggggttagaattcaaaatattaaattaaaaaaaaaaataattaaaagaattttaaaagtggcttttttcttttcaaaagtttgattatcaattaaaaaattaaaaggtgaaaataattttatagaatatgataataaaaaaaattacttttctaattataaaaaaagtaaataacgacataagtattcaaagttttatgtttgtaaacagcataaacctaatgtttatttttagcggcataagtactcaatatttgtaaaactgtaatttttctctaattttgtcagtacagactctattattgtcttaaacagggcatatataaggcctaaattcttgatcattgggtctagatagaaatatatagtatcatttacttacaaatattcttttaataaattcaaaacagtctaaagactctaaactgacgaaactgaaagaaaattacaatttttcaactattgagtacttgtaccgctaaaaataaatattgagtttttgccgtttacaaacataaatttttgggtacttataccgctatttacccttaaaaaaataactaaaaaaatattatcaaacgcaccttataatgatgtagttattttttcataagaaaatgaatatttaaacgctacattcaaataaattaaaaaaatatgtattttatttataaaataatttgaatatttgaatattatagagtaaaaggcttgtttggtacgccgtattacatcgaattatattttatgcaatatttttatataaaattatattctgtattaactacctagatatatactatttagtataaattaaaatttaacaaaatattatataaaaatacaatgggaaggagtcatgcctatttttatttttattgggaagatatttttactctgaaactgacatctacactacaataaacctaattttatttgtacttcctaatcaccatcatattcataattacattcacattgaaatattttgtttgtgttgagacttgcgagcaagattcatcttaatccagatatccaaacacgccaaaacttatcttagcatccaaacaaccctactttacaaaaaaaaaaaa

SEQ ID NO: 194709 - DNA, 1584 bp, Cannabis indica
cagtgtaaataatatgtagttcactttagtatgctgatcttgtccctccctcttacagttagtgtactttgacagtttattatttatagctttactttaattttaatacaatgtttcaaattaaattaattgagtaatttgcactataaattacttaattttaatttcagttggagataaatattaaatttaatttttgatgataataatatataagttatattttttgaactttcctaaatacttgataatattaagtcaatagccgcgtaacattttctattggtccacatttttttttttttatttaaaaattaattgaaatatattaataagaaaatgagatgtggataataattttttactttatggttaggtacttacagaagtttcaaaaataaaatttaaacattattactgtcaaaaattaaatttaagtatttaggcaaaccactcaaattaattcttattttaattcatttgaaaaaaaaaagttctttctttttaagaacaaatcaaacaattttagtagacaaaattgaccaacaaaatagccttcaagaatagtattttgtttcgagatcgcttaacaaaggaaacatttacattagaacaaccttgcaacaacattatgcaatcagtaactagtaaaccataaaccaaatggtgaatacaaatcaattgcactagaaagggcttgcattaacaccaagcagtcattttcaattaagagtttggaaccctgctgatgttgaatattttctggttttgcattatttgttttaatgagcatagctattaggtattagtggtgcctaacactatctacaggtggcgtcccacgattggttatcaatattctctaaaagttattttcttaagttatatgagacccgatacttaattacactaatagcgttatgacatcgaggagggtgctagacaccaataatgcctttatgttctctagttaagcacctctttcaatccacttgcttcagctaattgaagctccacagtccacacaccccaccttgctgtctgctataggccccaacaatcttccttcccaatccctagctatccaagcattgttataaggtattaatgatgtttagtattacttggaggttgcactttgtaattggttaacgatattttataatagttattaaattaaattatggagatctaatacttaattacactgataatatgtcatatatagatagtgtatatagatagtgttaagcacctcaagtacgttttagcatttctcacgcccaaatccatatctattttctaaactaaaaatagaaacatcacaattaatcttgatagtgccaacttctgcttttgaccactgctctaccacaccagcagccatagctaatgttgaattgtgatcttcaccatctctttgagctaacatccaagcaccaaggcaagcaattgcgtcactaaccaactaaccaccctttcatccacaacaatcattttttattctataattttaatagtaatagtaacaactaggaggtaactaattttttatgtcacgtgaaaaaaaaatatgaaaaaaaa

SEQ ID NO: 194710 - DNA, 1076 bp, Cannabis indica
ttttatatttataataatttgttttttatattcttcacttactcttggtctactcaatgtttagtcatatcctcatcaagaaaaaccaaattaataatgtttgggagaaaaataaataataaagaagcttgaaaagtttgtattattatttcattgtttttttagtcaaacattattggatatatattcctatcctcatgggcgcacaatcagctcccactaaaccctagattatcataatatatataaagagtgcacatattattaagacaaaaataataagattaaatttggataataatttattaaaaattaatagcgtgttcatggatttacagtactggttcacattattggattagattttaactaatgttttttttggagtattttatactcttggcttttcgttggccaatcactagatttaaaatgtagatatattcaaaattttgtgtttgtgtttgtatttatatatatgtgtcatatgtttgttaagttactttattattaaaactttctacattttaaaaatttgaattcaaattgattggtggtctatgatcacctaagttgaatgtcattgatagctagtgcccactgcaaatgggttttatatttatttctgaattgtactagatgtgccttcaaatatcttaattaattaattctccttttatttttgtttaatactttatatatatactataatattagtgataatttcctttaaaataattagtaataataagatttgagtagcatgaggcgtgattataatcacgcctgtgataaacaattattagtgtacatagaagaacacttaataagattagaatttgtaatagatattaaataatatgaagaacttgatgaaggggattaagtttgtggtttcttaattaagctctgtagatgtcgctctttgtttgggtgactggaaaatacgcactattatgatccttaattcgaaatcatacaagccattttttttttttgtctaattataattttttttcctaaactttaacatgtactaaatcatatatctcttgaacttttctagtcgttaaaaa

SEQ ID NO: 194711 - DNA, 886 bp, Cannabis indica
tgggttgggtgctggactctagggccaacaaaacacttgatcacgactcacgaactggaccaagtaccacccgccatttcccgtccgccaccgaaattgtaggccgaaagatactgacatgccacctgcgaagaagggcaaggccaaggctcacaagcccctatcggttccctcacccaaaccagatcagaccactatattcccctcctgtattcgtagcgtccctccctcctccgtcgccatcactatccatgccaagcctggctccaaaatggcctccattactggtctttctcttatttatgtaaatgtatatgtatatatgtatgcgtatgcttatgtttatgtactccaatattttctaaattttcttcgcactgtttcggatgaaggttttgacgatgaggcattaggtgtgcaaatcgatgcccctgccaaggatggggaagctaatgccgctcttcttgagtatatgagctccgtgagtctttcttatgtttttcattcgatcattatatttatgttctatattttttttttttttttttgctgttttgtatttctaatttgttaggaatacaggtgtttcaatacttataaaaaagttaggaaagttttagttttttagttaagtaaaataaaatctaactgggaattttggtaattttgaatcaattagagtgaatcatataatggggtttgcactaggctttgatctttcaaattggacttggaatttttctttgcagtttagaaatggccgtaatggctgccttataagatcagagttgtcatggagtgatctataacttccttcttcttttttcttaatatcattattattatttatatatttattcgactttgtaacatagaggtatgagaa

SEQ ID NO: 194712 - DNA, 2571 bp, Cannabis indica
ggtatcccctcgacaaatgagtaaggataattaatcttaccatgacctgggatccaggcgtcatgaaagatagatgtcgtagtaccatctcctattcgatttcctgattcccatcttaagaagctctttaccccaagtgatactgatccagacaagagaaggcctgcggcctttattagcctcaaggaaagtggtgtggggaaaatagcgggctttgagaatagttgccacaagggaagtaggtgcctgaagtaagcgccaagcttgtttggccaacatggcttggttgaaagccttcattgagcgaaatcccagtcctccatgaaattttgataggctaagagcggatttttccaatgaatttttcgactatgttcggttcctccccaccagaaggaagccatcatagattcgatttttgagaggaaggaaaagggtagtttgaagcaagccatggcataagaagggatcgcctgaaccactgattttaaaaggacttcttttcctccctttgagaagtgttgcgcattccacctattcaagtgcgaccagactcgatcagtgaggtagttgaaggcctctttctttgttctcccaaaagtttggggaagccccagatatttctcgatcgagtcgcgaataggaataccgagaagggtagtgatttgatgctgaatgtcctcggttgtgttgggtgaaaaatagagggaggatttgtgaaaattgaccatttggccagaagcaaggctgtagtcatgtaatactgcttttatagttgcagcagccaaaggggatgctgtactgaaaaggaggctgtcatcagcaaagaaaagatgagaaatgattggagccgtacgagcaattttgagcccaagtccttgattacgagaacgggaagtcaaagtattttgtgagataagagtagacagtccctccgaacaaagaagaaagaggtagggggagagtggatccccttgacggataccccgagtaggcttcactgaacctaaaatctgctggttgatggaaaaagagaaagtaactgtggagatacatgccattataagcttgatgaagcgactggggaagtgaaatctttccatgactttttgaaggaaaccccattcgaccctatcaaaggcttttgccatatctagcttaagggccatccaaccagttcgaccagtttttcggtgtgataaggcatgagtaacttcctgcgcaatgatgatgttatccgatattaatctaccaggaagaaaagcgctctgagtgggggagataatgcgactaagaataggcttaagacggttcactagcactcgagatatgattttatacggggtcgtgcagaggctaatgggtctgtagtcagcgatttgttgagggtgaggattcttcggtatgagtacaatgacggtgttatttatagcaccaagatcagcctccccattaagaaagctttttgcagcacggagaacatcctggccaagaatatgccagtttttttgatagaaagtaccagtgaagccatccgaacccggagccttgtcattggccaattgaaaagcagctctctttatttcagcatccgtgtaagtgctggtgagagaagcagcctcagactccgagatttgctcactcagaccggataagacgcaatccataagttcattgccaggattttgactggtgaaaagttgagaaaaatactgctcgataatgagagcaaaggagttattgtccttagcaatggacccgttggggtgcatcaaagagcgaatcttatttgtggctctacgagatgaagcaaattggtgaaagtattttgtgtttttgtcacccaatttgagccaattcacacgggatctttgcttccaatattcctcctctttgtatagaggtgatcaagttcattctctagctttcgcccaagcgtaagctgagcctcagttggctgagtacaattttgcaccgtgttaagacgcgcttgaatatccttgattttggatgttaaagatggccccagggtttttttccattggcgaagatgagatgagcaattctcaagctttttagttatgcctagaattggatcactgtcgtttatgtgagtacttgatgtcgaagcttttcgaaggcactcatcaaagccatcttcagccatccaaagtttgtcaaaaatgaaacgcggagtgggagagtttgaaagaacttggtgatgaagatttaaaatgagaggcctgtggtccgatccaaaaaagtcaccatggataaggtggtgactcggaaagagtgaatcccattccgaagaagtaatagcccattcaagccgctcctgagtatgagtgttttgcttttgcttatttgtccatgtgtaaatgttgccctggggagtaagagcatgaagggtaaaggcatccatgaagctcctaaattggcttgaagggctcctagaagtgtctcctccaagtttatcttccaagttaagaaaatcattgaaatcacccattatgagccaaggggagcttggaatattggagccaattctatgaagaatttgccaagtat

SEQ ID NO: 194713 - DNA, 1795 bp, Cannabis indica
attatgtactcttttttattgatatttcatcttctctcacctctgaataaggatagaaattaggtagataatgagcgggtaatacatcgcccaatcccatccccactctccatttatgctccatatatataagaaagaaagaaaagttgttgtatgcatccatatatcttctaaattctaaattttacttttattaaaagaaatttacactaaaataatatacactatatttactaacagtttacaaaaaaaaattgatttaaaaacttggtattattactattaattaatatatcattggaaatatatgtgcagactcacgtagaagcttggggtagttgtcctctaaaaaatttttaaaaaaatatatatatacatacatttttattagttacaacatatatttcagtaaaaaaattatatttatatataatattaacttttaaattcaatgaataaactaaatttgatatatgataaatgtcaaggttcaaatttcattaagaccactttttttttctttttaaatttatttttgcctcctctaccttaaaaaaaattacactcgccactaaatttagttgtgactacatcatcatgataatattctttagtccgatctgtttttcaataaaaagcaaatatatattcaaatttttcttgatcactaaaaaaacaagtctatttaatataaaagaaagaaaaaatataaaatgaaaaaaaagaaaaaaagttgacaaattatgtgattgatatctatattattatatatcgatatagatggagtagctaattaataagacgttagctaggccacaataccttatattcctttcagtctttttgaactttaattctcacttcaccaacattttctttcttttttttttagatatatttacatatatttttttcttgatcgatcatgaatttttattataaccaattaaaagctttttttcctgtaaaaattgtgacacgaatgtcaaataaatattgagcatccatactagaatcgaaattaagatttttatctttgaattataacatgtactaaattatatcttttgaactttttaagctgttaaaaatttttctgaactattgaaattgtcaattttgctaatgtggcatttattcatgtactaaattatacctccgaactttaatatctactaaattacgccttctaatcaaatttaacatacactaaattagacaaaagtgcttaaattattatcaatttgttaaagaaaaaaatgtgagtgattattacatatttaaattattgttggacaaagatatatatagcatatattcttatttccttgaggtattattgtactacactagacttatatatatgtatataatgcatgagatatatagataaaaaatttattctatattatatatcctttcaatatatatatgatatatctaatatatagatataaaaaattcaataaatatatacatgacgagtttgatcacaaagtattgatcctttttttttcgattcgtatatatatatatatcatcaaggtacttactagacatacaaaggaatcatcaaatcaatccaattaccgacaaaacttaattattattctcttacatatatatataaatattatattaatgtttttagaaaagaagaaagaaataaaaacattattatccattaataatccctaaacctagctataatataatgattttatatatacacataataaagacatctaatacacaagtgatcaatccaataattaaggttatttttttttttttt

SEQ ID NO: 194714 - DNA, 1423 bp, Cannabis indica
ggtaaaaaaaaaaaagaaaagaagttatattgtccaacccttgtctatgacatgagtttgggtataactaatacagtcatgtgcattgtaactttggtgacaacaccatttgcgtttaggttattttggattgaaccaggaccactagtttattaacaactactactactaccactcatcatcatcatcctataatattatatatattctgtataattaatgtatatatatatatatatatatatcttgagtaattgtatcagctttgtacttctttcttgaagacttgaactattcagatagcaaaataagctcactcccttttgtggtcctcttttgatattctaaattaagtttctgtcaaattatagtactatatagactatagtacattttatcaatatcaaataaattaattagaaagtataaaaggaactaataaaatgattgcaccatggaactctctcaaagtagtttctatagccaccacggccataatatgcattatcactttattaagaatatatataatcatggggaagactaataataatttgccacaacaaacaaaaccggaacttaattatatttgtttcttaagatgagatgatcttttttttttcttatggtaatattttagtgagtgatctacatttttgaatatttagacaatagaagctattatgacacatggtggaaaaatcttatagataagcattagtataagggaaaaagaatacaaatatatagaggctatatatatacatatattaatttttatttgacatatttttctgaaaaatatacttgttagtaattgtttactccactagtaatggcaccaaatgatattgtctatgtcctcctgaagttaaaagcgtactggaactctatatttaggagaacccttttaatgctctctcaaagctattatttgtaagaaaaacgtgtgctttcaaatcaattaagctaaaccttttatagggaaaaaaaaaccttttttcaagagcaaaagatccatattttttggcccgcagaatataccgattttgccaatatctaatatctatattatataaggagatcaatatgattatatagatctaatctaatactcgaattgatactgtgatcttctgcttggtggactaaatgtagctcataataaaaattaatttatataaaaaaatatgattttagtaataattgattcagttgtttctcttttacatatactgtatatatttgatccaaaactggcaaatagttatatgtatattaattaattagtgaaatttgatttttttggtttgtttgtttgtttgttgttgtttttttttttttttagttagtaagtatattttattattacatgatcgatgctagctagcaaggtcaatagatacactatatgatataatca

SEQ ID NO: 194715 - DNA, 2048 bp, Cannabis indica
aaataaagatgttaacactattttgaagtgaagagccaaaaagactttttcttttcaattattttgaggagttgtttttcataattagcatgacataatacattctactctatattttcacttattgacaaagatacgtctattcttatgttatgattatatcaaattgggtaatctatttccaaaccaccctctttaatgaaacttctaagttgaatattataaataagaacctaaccattaagatatacatatatatagcataggttgtttttacgatgtacgctcttaaaaatagtatttttagaatattttgtttcacacgtgcataaaataaaaaaaactacatatatcataaattgtttaaattttatttttaacaccttaaattattttaaaattttcataaatttaaaataaataactatgatatatataaaataataaaactatttatgtgtcaaaatacaaagagatgtatggtacacttatttttgagaggtgaacatagaatttccaagtgtttttttttgaggatatagcaaccaatgaccacactagaggaagataccctactatgagaaaaaagcctatctactttgtaaccactaaaaccataatagatagcaaataatgtgatacttaattggcattgccctttccttcaatcacaagaccccaagtgttggcctaccaaactcttaattattttcttacaataatctactactacacatgacatgacatgattttcattctcttgttattaacacctatattctctaggcatacatggtgaaaggaaaagataatgtaatgtattcgactaggtattacttagtgcgattatattaatggaagttaactaagcaattattattatacattaattatatgttgaaaagtaattcatgtaaaacacttatatatagttgataaatgcatcatctttggacttgatcaataacattgttatgaagtatttatggtgcttaacattatcttaaaattttgttttataattaattaacaattttttatatttattaataaataaaacctaatattaaattatactctacacaatacaatgcatgtcaggagtattgatctctgtccatatatatacttggttttgtttgtatcaataacaacaaagtaggtgtcagcaataataagtataatttatttagtacacaaaaaataattttaatggtgactgatgaggacataaaggtgtttgataaagaaaagatagagatgaaatgatggcattgtccgtgtccccctaacattagaactcatctgtttggggctattgaggttaatttggattcttatttaacctctttcttttttctctcaattttttcttctgttttttaacaccccaaatagcttcacatttagatataataaggattaggtcacatttataaattaattgcttaaatgactaatttatgatggtgtggaacagatatgagtttgaaaaagtccatcatgataattaaatcaatggctcgtcatctcactctctatctgtctcaactctaattcttttttaaaaattgtagtggacccatcaatcactgtgctgaaatataatcaaatatcacatccaaagctatcttctactacattgtacataaagagttacccatatccatacatgataaactaatacacaaaactcttcaagtaattaattgagcaacttattttattttacttaatttataaataataaaaaatacattcaaattggaatgggtgccataaaatataagagttggaaggttttataatccaatttattcattgatagtaaagcaggtgttgtctacatatataaatatagattatatatgtgggatttcaatgtcaccttcagaaagaaaccctgtttgtttttttaataataatttattctgaaattttttgaatggcaatatttggggtaatctattcagaaactgggccactgcattatgggtggcttcctcaatagataaagctaaggaaaaataaaaaaagtgtactgtgta

SEQ ID NO: 194716 - DNA, 1743 bp, Cannabis indica
caaattaatcagagaatattgggatatgatagctctacttggtctgtggaaagtggaatagaagttgttactagtagtggctgcactccttttagtattgaagaagttattactagtagtagcagcactccttttactactgaagaagttattactagtagtggcaacactccttttagtactgaggaagagtattttgactttgactttgacaccacttcttttgaggaagagtttggtatttccttggctgatttatggtcttgagagaaaaagtcttgtattgattatagttaaacaatatagctagcttaagggggggtatatgtctatatgagattaggatattcatgagtcagaatgttactaatgcagtaacatattttgagttataaatgtatgttcattctttgttttcattaaatttgtaattttcatgcctttaaatggaaataaaatagaacctttatcaatagaactaagaaattatacttgagaagttatagatagaattatactaagaaaaaaaaaaaaaaaatcaaaacaccacaatatattattttaaaataagttttttaagcctaattgattctaaattaataccatattaatgtaattaattaaaataaataagaaagtgtgtttctatgtaaagtttatttttttacacgatgtaaagtttattttttaactacccattacattcatttaactttactaaaacacttttttaaataaagttagagtcatttataaatgacctataattagtgtaaaaatttaacaagataataaaactaagtagtttttacgcaaagcaattcatataaacaatttagaacaattttaattatcatgtttctactatgagatgcgtaacaaaaaattacgtgagattttcataaaaagcataaaatgcatgaacatgttatcaatctcatgaaaataagtatttaaataattaaaataattaaataaacaataaatgtttaaccgaatgcttttgggtatttttaattttacaaccttttataaaaataaaattaaaatgaaaaattaagaaaggcttgatgatctccatcgaatttcttcactttgctttcggaaggatatgtatcattggtccaaaataattattttttattatctttgattaaataaaaaaatatttttaaataatcaatttgttaaattaaaacccttttaatataatgtctttaattaaaaaaataattttaataaacctattattttaaacttcaaaattttaaaatatatcatataacaaatttatctaatttatatattagatatctaacaatcaggatttttaacaaacaataataaaaaaaatatacagattaatttaaaattaaaaaaaaaaaaaaaaaaaaaaaaaaaaaaaagaaactaaatgacggagaacacggggcagcaaaatggagccaacaaaaccgggtcatataggtccgtacagtatgaattcgtacaactttagcaatgttggttggtcttaattgagctcatatgtgtggtcttcccattcatgcagtttattcaaattcgtttgctttggtgacaactatcaataacggaaagatgtatttcaacgaactaggagcgttgtttggagatattataactttattatctaaattttcaagagcaattttatcccatgtagctcactctaagaatttagcagcccaaggcttggcaaaacatgttctgcggttagacaat

SEQ ID NO: 194717 - DNA, 839 bp, Cannabis indica
gctcgtattatatttatatatatgattaaggaatcattcgaagtatattaatttgttgattaataattttttctatatttgtaataaaatgcagaacaattgatagtatggcagtgggatatgctaaaggaaaattgacatgttttctaggtgatttggagtccattgttgatgttgtaagtttctattttattacataggaaattatatttttatataaattaatatatttacatattttttttctttattaaggtgtttaattgtgtttgttagtttttattttcaaaatataatatcttaaaaaatttaatctagaaaaataattgtgtagttagtttcgtaatactgaatatgaatttacacagattccagctgattacgtagtgaatgccatagttgtagctatggcagttcacgggaacgatccttacttaaatagaaaaatctatcaagtaggctcgtcgatgagaaaccctgtgaaataccgagaactccaagagttcgggtatcgttatttctcaatgaaaccatggataaacaaggatggaaagcctatcaaggttcaaaaggtcacaattttgagtgacatggaaagcttccaaagatacatgaccattcgttacttgctgttcttaaaggtaattaatcatgaccattaatatttgatcatcatatataataacaaaattgtatataatatattattaattaattaattataatgtatatcaacatgtttttgtttggtttgtgatgaaaattattagggtttggaattggtgaacaatgcattttgccatattttcaaggaacatatcttcatcttagtgaaaaga

SEQ ID NO: 194718 - DNA, 1694 bp, Cannabis indica
ttaccaaatacattatgctgcagggtgagagaagtaatcaatccgagctcaaagatggtttggaagtcaaatccagggacataggattaaatgtatccgctccttcaaaacgaaagagtaagaagaagttagagctgatagaaacactattggacataagtgatccgcttggtagttgagagggcatttcgagtaaaaatatatcttccgtgagttcagaggggagaaacgaacgcagtaatttcagaactgaccttttctatttcacattctatcattgcatcccccagaacagtttctaagtatttacgagtctcattcctcctttcactggtgtgtagatgctccctgatgaagatacacataaacaataagtcattttgcattttacaaattgttcttgatggttatcgtaaagccttagccttccatacttctagaaacacaatgtatcaaccattaatcaatctctgctacaatgtatacaaacactattacagcagagatgaagatagatacatcataaatctcaagagattgtgaatcgctagaaaatgataatgatgttgatgatgaacatgtagtaccagtaattgctctggtggtccacttagtgacttatcaaatacaatttttttcttttattgcaaaacctcactgcaatcagagtaaataaagctatggtgatcttcgaattcatgcgactccgacaaaaaagaacagaagaagaactatggattatgtacaaacctcctcctatcgagtccatcaaattaaattgaagaattatctctcgttacgaatctgtagaacttcagagtatgaagatcaagaacaaaaaacagaaaagaaagaatagagagagagaaacagagtatgtgagaaagagtaaaacccagaacttatttctttattgactgaatgtctatttatacacaagtaagacagcagtaaagaagagtttgttatagaaagaattgaataaccaaaaatagttagaaagactaactaaaaaatcagacttaactaattatactaacgtccccctcaaactaaatggtgtagataccatttgtagtttggcttttaagtacaaaaacctctcaaaagacaaagcctttgttaatacatcaacaacctaatccaaggaaggaacatatctaaagaaacttggttgtctaaaatctgatctttgacaaaatgaaaatcaatctctatgtgtttagacctcgcatgaaaaactaggtttgcagctaatgcagaagcacttttattatccacccaaatgacatgaatttgcacaagagaaacttgaagttcttgtagtagagaacgaatccacttgagttcagcagtagcattagtcaaatctatgaactcactctcagtgctggagcgagcaacaacctattgtttctttgcggaccagctgattaagttctctccaagggataccaaatatccagctgtagacctgcaatcatcgatgcagttggcccagttagcatcggagtaggcttgaagtgttacggaggaagacggtagcagccatatgtttgatgtacctttcaaatatctaagcaactttttacaagcttcccaatgaacagtcgtttggagcatgtaggaactgactaagtttatttattatgaacgccacatcaagcgaagtgagagacaaaatattggagagc

SEQ ID NO: 194719 - DNA, 1258 bp, Cannabis indica
taaattttgcaacataatgaaaatgagactttttttcattggagaaattaaaaaagtaaaaaaaaaaactctaaaattagcaacgtgattcaatgattatcaactgatgattaaattttaaatgtaaaaaaaaaccgtcagaagtgtaagaaagaaaggtaaaacagaaactgtgttgtttatgacattgataatcatagtaataatcaaagtttgctcctttacacacgtgtgaactcaaagtctgagcctttagttttcaattacaccaaattcaacaactttctttctcctctcttatctctctctttctggttctaatggctatcaaactttgaataaccctttcatccatccatggctacccttcttaaaaaagtatgggattcagtctcaaaacgctcctcttccaattccaaaccagactcatcatcatccatggctacccatctgtctcccccttctcatcatcatcatcatcatcatcatcatcatctctctccttcttttctggaaataccttctgatgttttgctacaaatcctcaaacttttgggacccaaagaagttgcaaagatgagtgtggtttgtaagtacttaaagtctttagctttagatgaaaagctttgggttttctttatacagaatcagaatgcttctcttcctcactcttgggattctcttgtttttgctgaaacatatttgagatctgcttatcctcttcagtaagttcccaactttcaatttgtgatttttgtttgttttttttagtttcaagatcagtacttttttgggttttggttattgcagaacactcactactcaacctactcaattgtgttttatgagaatttatggtcaacgtgtgcaagttcctggctcaattatcattgatggtaatatttatatgatataaagatatgatctttatagtaatataagaacaataactagtcaatagtaataataactagtaagtttttggttggtagttcattttgttgtacttatgtaaattttgtaaattttttgctactacgtagtcattttgttacaatattagttcttatgttgttaacatcaatgataattgatggtatggtaatatttgtatgatatagagatagggaaattggcagcaaaattttgttgtagttcactttgttatatttaaatatttatgtaaattttttggtggtaaaaatctttatgtaagttcattttgttgtacttaaatttctatgtaaatttttactag

SEQ ID NO: 194720 - DNA, 785 bp, Cannabis indica
agatattgtttgcatgtgtatgtgagagcaaggctaagttgagcagtcgtgaaagcgagcagatgaagattgtacatgtcggggcagttaggcgtggagcgtacggtctttggaacagttggttgtattttgtatagtcgttagacaatttttgtagtacatactttgtaatagttgtaaatattttatactcaggttctcaattatatatatatattattgtggtatttataagtatttaaataaaattttgattagttatgttttttaataaatttattgatgagaaagagttgcacaattaaattaaaattagcatacctaaactagtagtgttacataaaacttatatatcactaaactaatcccacagtgaattctgaattcgaggtacctttttcttaggttccttaaaactaatgcaacttaaattactcttcaaaaaatatatacaataataataaactaagcaaaattctatttattggtgatgtaaaatttgtaaaatagagtagaaataccatttggagtaccgtaaacgaaaaagcaacctacggattaagtctagaaatacacattaccccgtaaatcttcaaaattaatttagggcttattaattaattattgtggaagtaactaattaataaccaaagaatataacaccgacaaaagaatccaaggagatgacgttgcatttaatgcatcaacaaataaaaccgtgaagaccatttaagatacaatggccagccacgaatttggctgtaattctctcaccatgaccataa

SEQ ID NO: 194721 - DNA, 2663 bp, Cannabis indica
gttggtgttgtttctttttcttgtgtgtaagttgccaacattacaactttattaactggtttgaaatatcattaagtggtaatttatgtattttttcattgattctaagtacagttttcttttttggcaaatttctttttgtttttttgagttgaatttttgttttcataatgatactttctagaatatgttccaccaaataaatatatgtaaaaaaattcctcataatatcgtattttgattgatgcgtgtgtggatagataaatacataggataatattatatttactcccttgcctaaactttcaaattttattcgttctttatttgtaagaggatatatcttacacgtgttttgaaaattcgtgtagtaaaaatataacaagccaataaatgacagtcaaataaattaagctttttatctgactccaatgataagagattatcagttggtgtgttgcttttttggagaagaaaataataggagaccaatattcatatgtatttctctaacattaagcatcgaaataaaaaaaattacttatgaatgaatgatttgtttagtccattcttattccctttaaaatgaaatatcctatgactacagcaaaataaattaatctaaccactgaaatttttctttaaagcttaataactaattagattgtttgacattaattttcttagaatatatattgtggtattctatgtgatcagccatcttctttttgatttgggttgtatttttttgcaaaaagatgcagctgttgagtacaaatagttttaatgtgaacaaatatgttttgtttataataatttgatgactaagaaacactttttgttaaagctaacaatttttttacttaaaaattatgttaggcacaatcatatttgttagataggcaccttattttataggtacgatattctgttatggtttagttaatttattttataatttaatggttcatatacattagcttatcattaatttaagcttcattgtgtttatatatataaaaaaagataccagaaattgaatagacgaaaatttgttttggtctcagttcaatttaattcttttatttattttattttaggccaagagactgtttattttatatttatggtatttttgagtggtatttataaatatgctctaatcatctctagtttttatatacataatagatgcattgtagatatatttgagtactacaatgtcaaacttttggatattctttattacatcttctgtgtatatgtgtatatatatattcattgtaagctattcaagtcaatatctatttcagctttttgtttaaaattgatgttcaatcattcttttctagtgttgtttggtttttttattagtgttgtgctttagttagttccttgctaagtttcgtttgttttatgttgtactgatgtttgaactttgttgctttgtgtactcccttttaatacaattgttggttgaccttttattggaggcaactttcatacatgtatatatgtaatatgggctacaattgcattagtttctttctacttatataaggttatcatttagctattgataatattagatgattgggcacaccaatatgcatcatgtaactttggccccatgtcatcactatatagatgacatggtacttccttattgtaagaacatgtgttgctggtaattagctattgttgttgttgttgggttgtagtagtgtggtggtgtgatattggttcaatttttgaacattgaagttaatatgagttccaatatcagctctatcatcgtatatcggcagcttctctcacttcctcagcccccacgcagcaacggaccaacttctcttcacttccactcgaacaactccacattcaagtaggtatatataattctatcctattttacaaaatattattaatattatttatacaattttatatattattattggttagtattccttcttatcttttcgattaaatatattgatgcctttacttttttatataaaatatgactttatataatggctgttactgttactgaagaatataattttgtagttatggtgtttgattaaatgtctcctaggcatatatattgggaattttgtcatgaatatagattgtttaatgtaacaactgtagggaacttcattttattactgggattttataaagaagtagcctcatttaatttattatatattggagtgccataatgttattttaatttaattattgatatattaagagttctatatggtgattcaaccacactttatcctgatttaagcgaaacttacaaaatatttaaaagaaaaaataccataatttttcttttctcattttaatgtagtagtctactgtttatacttgcaggtttcattgatcatcatcagaatttgaagaagaaaaagctgatggcagagacaatcttaagcccagtcatagagaagttgattgagctgcttgcccaagaagtaaatttattgaaaggagttcacagagaagccaatagtctaaaagatgaattacagatcattcagccttttcttaaagatgcagaagcaaaaatggagagaggacagcttagagatgctacagaagtatggctcaaccagttaaggcagctggtcgatcgcatagatgat

SEQ ID NO: 194722 - DNA, 1110 bp, Cannabis indica
gagagagagagatggagttcccttcaaaacagttttcacataatgcaattagaattaggctctcatcttagctagctcccattcccatcccagggccgaaaggctctctctttcatagattagggtccactttagaattatcaattaggtgacttaatttattggtgtgttgtgtattaattaaacttttatccagaatgaaattatttgaaaaaatatagaaaagagaaaacataataacttgagttggaataccaaaatagtaaatataatacttgatatatgtactgtatgatcattattattagtggtcttttcttttgaaacaataatgaagctaaattactaatcttgcttatgaatgagcattgctacttgctagtaccactaatgcttaatatcatatagaagtggtgttattttattgattacctatattccataaaaattaatagattaaattatgtaaaatttcgatggttagttgtaacaatagcgatatggcacgttgaatttaaaagtggcgtattatgagtggttagtgatattctatgaaagttaatatattaaattatatgaaatttgatatttaattttatcaataacaatataatatgtactttttaacatttttttaatgaatatattaggtagctagggtaattataaagagattatttttttttaatcttcttcttttttgattggtaaatactaaatagtattaatagacaaatattcatcatcgaacataatcaacgaataggttaattaaattatttacaataattaagaaaaaaacctaacacaacaacttcaattaattgtagagaatataataattcatatgggactatatgtctatattttttatttttttatttttttttgtaggtgatatttttatagtatttttatttttggttacatgaacaaattgtaattatatatttttatcttgattagccatgtataatataattcaaagcatttctgttaaaaagaattccaagataaataaaattacattgtataaagccatgagccaatactgttagcaacatatgccaatatggatgatcattattacattgttcactttttttttcc

SEQ ID NO: 194723 - DNA, 1485 bp, Cannabis indica
ttatttatttatttttgttttaggggatgatgtggactaatattcactaaccaaaccctaaatttagaactttcaaaacaaaaccatttttgttatttcttaacaacacactcatttaatataaattaagtgaaattattcatttaaattagttcgttattcattttgagtgctaactaataaaaataatctaaaaaaaatagcaaaagaacaaaaaataatctcttaaaaaatataatattacaattacaggtgtaataaaatattttaaaaaataatattaatacgtgctaaaataaataactaatctaccaaaacacttcttaattacatgtgtattgcagacttacacataaatgtaaatttataacattttcttagaaaaaattataaatccatgtaatttgttgactcatattttaatcattttttttggtttaattcttttttctggtcctactgttaattattctaaattaaaaaaaaaatataaaaaggtacattagattttagtcaatgtcaaattattatttagtatataattaattattatgttttatatattttaatttaataaaatcatgaaatactgctaattttttctataaaacacctcgtaatagtatagtatcaccttctactgatgtggaactagctttcttaaacttgtataaaattataaaaaaaaaaatcacaaattttattattttatatttgaacactaaaattataatgctacatataagcaaaattatattatttgatgtcaaattagatatataatgataatgtattagattggaatactcaaaattataaatgaaattaattagtcactttcaaaactaaatccaaaaaatgtatatttttttaaatgaaaacattgtgactcgtgggcagatttcaaatgtgccaaactagttagccatcactaagaggggaccatataattttattttattttttaaagaaacaattaggtaattaattagttattattttttatgacaaaaaatattatttaaaaattaggtctatttatattctttctctggtagttggaactgaaacatagaatgtagcacaatgtcgtcttcttcttttttctttttcctataaaaaataaataaataaatggggagcttatatatattggtatattactcaaattaactaaatgatatatattttttcttaataaaaaattatttaatggtaatttgtcatgtagtgtacgtacatttgattagtgtaaatagttatttgtattagttggtaaactatgttttcttttgataaggataatgttttctttgaataatctcaccccacttaaaataataaagtattatttgacataatttcagtaaacacgtcaaaatcaattaattaaatttcatataaattttgtacaaaattaagataattaggtggatgcctcttcaagtaagacctaaaatatttatatggaaaatgattgagaca

SEQ ID NO: 194724 - DNA, 1152 bp, Cannabis indica
aaaaaattatatatttttattttcccataaaatgaatattccttgtatcttctggttttcatagtatgctactacacaactattattctaatttgatacgagttaagttactagctagttccaagtcattttcttctattattacaaaaaagatattataaatagcaaaatgctaaaagagttggaggttatttgaaaaaccatcaagcattcaaaactcgtttttttatggggaagaaaattttcattaaaagccttcttctttggttgccaaaagagaaatttatttgtattcttttctatttcatgtttcaatagtgacaaaatcacaaggcttataagagtatctccaatgataaaattttaaagaatacggtaagatggacatattatgtgataaaatattgagatgttataccattagaaaaaaaaatttcattctaaaaatttgcattaatgatatgttgtagcattgatgctattcattttttttaataaaaaattgaagttaaaaaattattgtaactaaaaattaggatatatattaaataataatgtgtgagatcataattatagtatttttaaagaatgttatacattgaagtgtttttagaagtaagagtaccaaaaagatgtagaaaaagaaataaaataaaatattatatttttaagcaaagtaaaaaataaaaatgaagatttcaatttttgaaaagatttttttatgtaaatttagtttttcttattaatatttactaattaatacaaaataccttcataaatttaaagggatgaaggtttaaaaaaataaggaaaaggaaaaaaaaaaatggtattattgactttaaaaataacttgactaaatttgaaggttaaaagttatgttgcaatgaatccaaccgacaaaataaatttaatgtattttaattttatttttttgtttgacgaaaattgtttaatgtattttgatataatcaaaacgacaaatatatttatatgtactataacttgttaatatgtgattgagtgagtacatgaaacaatttgttaagtacataatctgaatcatgccattcaaatattaatttaaataagtcaaagctttgaaaacgattttaataaaatgagattgttttgtactcttcatattaaaac

SEQ ID NO: 194725 - DNA, 2019 bp, Cannabis indica
cttcctttttcgataaaaagattttattttcatttttctatattaaattatataactaagataataatttaattcgaattaaatcgaataataagggtgtttggtctagtggtatgattctcgcttcgggtgcgagaggtcgtgagttcgattctcgcaacaccccaagatctcatcttttgtttttttttactcatttctctctctcgtttttgccttccatcttcttctctgtgctctctttttctcactcggatcatcacagtcagggtcgtcttcttaggccctttgaccctaattgcttcccctcacgcacaccagcaccatctccaacgctctctctctctctctctctctctctctctcacgcaggtcaagcttagagaaccatttttctttttcttgtaaacttcatttaataatatctaatgatctgtgatgctctttcaatttgcgttttacagtttctagtttatactcctgtgtttttattgacttgattgatgtttagtgagtactaacctgtctttgtgtatccatccactgatcaaaattgctttttttttttttttttttttttctttaatgttcgttgggacagactacatttactttgactcctagatgttgttttgattctatcttatattttaatttgggttgtattagttctttattctaatttaattgcttttctccttcttcttaatcttcattttacagtatctgttttgtggtgctctttcaatttgtgttttacagttatagtttatagtcttcttgtatttttattgatttcattgatatttgattagtaataaactgctgaagaacaatgtttttgtttggtatgtttataatgtaatttgggttttggttgcatatttcttaagcattgatattattattattattattattgttgttgttgttgttgttgttgttgttgttgttgttgttgttgttgttgttgtagctttgtttgtgtatccactgatcaaaaaaattactttaactcctagatgttgttttggttctttcttatattttaatttgggttgtattggttatgtattataatttaattgctttttccttttgttgtttgatttaatttgttgggcattatatataatagttttaagttgtaaactattaagtctccaatgtgtgtaaatttgtttacaatggattagaattcattagcaacttcttttgaatccttgagatctaagaaaataagaaagttctaaactttttatctgtcttaaaaacgcaagttgtccattgattcataaggttgtggaggagagactgaaagtttgatgcttttacttacaggagcttgaaaggaaagaaattgaaatcaacatgtcttctaatgcaacaaggctttctcatttgcaatcatatgttgatgagttaaatgagaaagtagaaagtggctgcagcgacagcaagagtctttctgatggattaaaccgtttgttaagtgaatcggaagaagaattagtttcggctaggaaggtagttcttcttgttcattaggaataaatgattttgttaagcaaatcagaataagaaactgtaacatagctcttgagtttattttttgattgaaattctgtgttcatctggtaggaactagctcctttgctgaggaaaatactagcggtaagacgccagcttgatgatgtgccttctcaatcagaacttattcagtatgttacaatttttctttgtttattataatctttataatatgggcaatactatgtctgtttctaatgttcataaccattcagaattaggagttgggcctctttctttctgcagatatgaagggagattatcagagttatatgctcatattcagggaaaacatcagcaaacacaaaagtattatgatacctataatacactattggagattaaggaattgatgttaaaggaaacatccttgttgaattcattaagttcccaggtatgaatagtgcaagtactttgtctttccaattt

SEQ ID NO: 194726 - DNA, 1257 bp, Cannabis indica
aagttcaggaacgatatatcttccatttgggttatactctttaatttctttcaagccgataattacggtcccatatatcgtttctccccattccttccttagatttcttaggctctcatcttcctcgtctataatttcctgcaacgaattacataacagaaaccgaaaagaaggttttaaagtgtcaaacaaaagagctaaaaataatacaagttatggaaagagtcaaagacgaagccacttttcttttggtcccccctaaatcctatccctggatggaagtaactaattctagttgctgaatgttaaaatgtatggaagtgaagataaaataaggtgtatgataatattggtctatgcatattattggatttagatcggatacttgttagaatgtacggaagtgtggttgagaagataggatagagtgagatgcatggcgatgccatcaaaaaccaattgacaatgagtagagtagctcacgcatcttatacatgatattaactttccgcacattatcaatgtaagactcactcacactataagcttaacatatcaatgcaacacacttaatgcgtacttgaaacatagaagataagttagaaaagagaatacctcggtattcccattactagtcaccaccttgaatggatgccaacttggattgttcaagttttcttgccacaaggagcaaagggtggcagcttgcacttgagcttcatcgaatggaaatcgttgcttggaaacgtcaaggaagggcttaatgtcaagatctcccattctttttatctcaatgttacttggactaatcagcaaatcaggtaatccctacaaagtaatttagtcttaaaactcaacactagtaaaaccaaacaactgatcatagacagtctactaactgatctagtgagctaaactttctatgatcactcaacaaaagataaatgatgtacctcaattaatgcttcccgagcatcttgtaactcgttactggtctgacgctctctagtcaacagagtttgatttaaaattttcaaaccatccaaatcatccacgttttcatgtaattcatcgttcatttctttcatcttcttctgaatcgattcatcgtcttcatcttttagatgcttcatcacctctaactttcctctcaactctttaattctatctccagcctctgcttagcaccagctccttttctagctgatgtattttattcaatgcattctcttcatctctctgaaagtgttaaatttt

SEQ ID NO: 194727 - DNA, 1766 bp, Cannabis indica
ttttttcattccacatatatttttgatcaaatatgtccttaacaatctttcaattatatattttaaaaaaaataataagaaagtaggtacttcattaattaaatatccttcaataataaagacaataaatcaacaagtataaattccctattgatgatacaaccagttttaaaataggagttttgtgcaagaaaataagtcattttattggcaaattatttattcaaattaaccgatacattacataattctaataataaaaatttagactcattaattaattcgtcatatggagaaactatatgaattatactttgaatagcatgcacaaccgtataatcaacaatttagatcaatacaaattattggttttatttacttttggttttgttctctcctactcttctcgttcaacatggtatcagatacgtaaattcgtcctctcgttcctccatggctgattctagctcaatctctgaagtctttcctccaattcgttgccaaaaacaaccaatctaactttcaatcacatgttatcttcaaactcaatgaaaataactttcttccatatcgtcatcaagtctgtgcagccattaaaggctatcgtcttatcaagtttcttgatccaaaacctgtttcggtaaattcctcacaattaagataaactcaacaatcgaatctctgaataattcattgagtatgacatccaggacaatcttttggtttcctagctcttatcttcgatgtccgaaaagatcctcactcaaatggtcggctgcaacacaactgttgagatctcgtacaatcttgaagagtactacttaactcaaaaccgtgcaaagatcagtcaatttcgcattcaacttcgcaaaactaagctcgtagatactcttaatgactatatactcaagattatgcatcttgtagactcgctagcatcgatttgccatgttctctccacacaagatcatatcgaaactatcttcaatggtctgcctcgagaatactctatattcataacctctctctctggactcgtaaatatgcttattatgttcctgaagttgaatctatgttgatggctaaagaagtgcgaaatgaaattaatgactttgaactcgacattgccaaactagaagtaaatcctgcaggtcaatccaagaattccatgccttaacctagattctcttcttttgttcatccatctgctcaaacatccaatgttggtagaggtatgcattttcctcctccagttggttatcttatgtttggatcttatcctagtcctctgtgcaacagttatggatttcttcctcctccactctatccacctttctctaagttactcaaacattctcgaggtggttttcgtggcacaagtcttggtggtcgtagatcctccaaacttaaacccttttagacttaaatgccaactatatcacaaataaaaatacattttgagataaaaatttcactggccttaagtcctttcaatcattcaatggagtggatctatataaaaatttaaaacatgatcttatgttatatttttaacatttttgctcatgacctaaggagaaatccaaaatacaaacacttgtcacacttttgttggtctgacttattaatgtttaaataatttcaatttactttctattaattgaaattagtttatttagatgattaattattttgaacaattaaagtgcttgcactttgaatcaatgaatttacctgcaaccattcatattactaaaaacaaaaaa

SEQ ID NO: 194728 - DNA, 772 bp, Cannabis indica
aaatttgttgctggttgcttttttaaaagttaaaattaatgtttgttgtctcagaagtttacttgatagacgtcttttttcttagatgctttaaaaatttaaagatatttgaatgttgcttttttgccactatgtgtgagatttgtattgtttgtccttaaaatggttttggaatggatggttgcttagtgaaatattaaaattaatttttcatgactgaaaaatttacttgatagacagtttgtctcctttttagaaaacatgtttactcttttggaattttgttgctagttcttttttcaaacgattaagttggtctatgttaccttaaaaatataataaatagagagttgcctcctctttaaagaaatataattactcttttggaatttatagttggttcctattttaaacaattaagtttattttgttgcctaaaaaatttacttgatagatgattgcctcaaaggaaaaagtatattctaatgaagcctatttctagtgtttgagatttgtataatttgtccttaaacaatttaaaacaacatagcctaattgttggtttgaaatatatggctctggctagttgttttttcaaattgtaaaattttgtttggttggtttaaaagtttacttgatagataattatattttatatttttgaaaagttaaaagtacttttgtaaatgttccattattgcatgtaggtgtaagatttgtattgtttgcccttaaagttgcgaatagtgatatatagttttctattttggaa

SEQ ID NO: 194729 - DNA, 1570 bp, Cannabis indica
tattaagagtgtgcagtttccggtattaatgatctcccatgaattgttttgactcctattactgaggtgtttaacattaggcccactaaaagcccaataacacggtttgcacgactcattacatttggtagtacataataaaatagtcaataatataaacaaatatggatatatttattacatatctgtgatgataggcagtcacacgagggcatatattcggtatcctcataacgcgtttcatgctcaactttttgaataatttaatcgtcaaccatttaatttaaacataatagtttatgtgtattgcttcttttactaaccactacattattataattgttaaaatattcaattaattatgggtaatcatgtcccacggatttcatgtactttattaataaattagatattacatccagtagcttaattttatttgtttttctctcaaaaaaggagtgatggaacattcctttagtgagttcatcataaaaagctgatccctatgatcttattatctttaattatcattaagggaccagaattatagggttatatgacacgtgttccttggttttttagttgatggttacgtatgtgtaatgtgttgggattggatggaccatacctgtacacacccgttctagggagatctttggaaattgttttataattgattatatgcataattgggttgtgtcaataagaataccaaatagtaaccaacaaacatattagacaaaccaatactatttatatcttacacgtcattaattccgaaaattattctccactttcaacaattatctcgtgaggtttttgggttgatgattgtaggtggctgtggtatgataaaatttaatgttgtttgtgttaaaaaatttatatgaagtatatatataattgttgtatgaagtacgaaattaataaaatatatatacactataactaggatcgaaatagttattgattctttaagctttaatctcacataagctttgatctgcaaagttaattaattgatgtgggtaatcgggcttcaaagctctctcttctctctttagatggatttactgtagtgagttcgtggaccgagactctatatttatataggtgagaccttccatcaaaatctctaccataattaatatcagaatattttgacaattaattctaaaaattaaatcgggtaactgaaatacttggtaattaaatctgaccataattagaatattttaattaataggtaaataattaattataagttataaatcaaatcaaataaaatatttgatttgttacaatatttaaatattctaacattctctcacttggtcagtatttaactaatttaccacttaaaacccaacgttactcattacataataaacatatagcaataggtcctcattattagtcgagtattatcttccatgtattatgatatattcattatataacaatgtacttaagcaaagtgttagaatattagttgtaaagaaattagggaaaattatattttagtagtttcctatttgtatttaatagtttctcatttagtcttctagct

SEQ ID NO: 194730 - DNA, 962 bp, Cannabis indica
ttggtgggggcctaatatctcaacttagagatcctgtggtaaaagcaatgagtgcggccaaagagtttgacactcttgatcagattgaagaagaggaggatgctgaaagagaactgcagaaggcagagcaaaagaaccgtgatgaaattgagaaacttgagaaagatggccatcagtgattgatccggaaaagaagaaaaaacgaagagaaatttcaatgttgttttttgtttttaacagagaaatgtctatgacaaattacttgaggctttgatcatttcacaaaaaatggggttggttagatttccttgcatatgctcgttctgcaaggctgtttctcatgtaaaacaagtagccattgtgggaaatcccatggtagagaaaagctccattagataaaaataaagctcactcacactttggaatttacatgcctgacttgacttgatctcagaatcattttctgtgttttgcaatgctcaccttgtcaaaccaatactttggaaaatttatctctcatcacgttttagtagtcatattctcattctcaatgcttaaatataaacatcacctatgaggctatgatgctaacattgaaggtggcaacttttcaagcttttgtatattatttatctaataaattaaacaacaatccccattatattttatataggagaaagtacatatatttttctttgatccaagttcaacaaacaactttcatggctttatgggtcataaagaatggcccaaactattccttattcgttctaggtttgtcccaaatttgagtggtcctctttattatcgagtcactaatccatgtattagaaaatgaccctttaacaagaaaagacaacagcatattttcttgccattagttctttacagtcatagatttgtttctacttgttttatgttaagtttccttcattgctacgcatttatattggattaaggct

SEQ ID NO: 194731 - DNA, 2382 bp, Cannabis indica
atgtagctagattttaatttgggatttttgagagatacagatagcttgggcgttttacatggattcatcacaggcagcaggaactggtgcaaatagcggcaatggaatgatggttcccctagccaatgatacttccattgcagcagcagcaacagcagcagtaacaacaacagcaggagaggaagcgaagcagaacctgaatgcggtgattaactctacccagaaaactctgggccttcttcaccagctcaatctcacggtcacttccttcaatgccgcgtctcagctttccactttctccatcgcatgtatatttgtgatccccttagctctctttttttttattattatttttattttgtctgaaatgtttaatccttggttatcattcataaaaactattgcaggaattctattgtttctgagcttgacaacatggctaagctagcagagaaatgtaatattcaagttccaatggaagttcttaagtaagtttatttttgtgatatctctgatccttttataaccctttgtaacatgttttataatttagtctttaattgtgtcattatagtctgatcgacgatggtaaaaatcccgatgaatttacaaaggatgtaataaacagttgcatcgccaaaaaccagggcaccaaaggaaaaactgatgccttcaaggtgactcttttattttgattctgtgtgtaaaagcaattttatttcccttcgacgattaatgaaattttctctttgtcctgttcagggtctacggaagcatcttctcgaggaaattgaaacgatatttcccgaagatgttgagtcttacagggagatacgagctgcgtctgctgctgtaatttctctcaattatgcacttatgtgcccattttctctgttgtgatttatgcattcatattatgttcctcactcaattatagcccatttaaccattgaaatgcaggaaatgaaacggcaggcacaagcacaagcacaagctcaggcccaagctcaagctcaaagcatgataccaaatggagatgtaaaggttaaaaatgagctttgatggattaaaaatgatgtacatttttgttgcatgctatttctccattcacaatcttaacaacacaacacctagatctaggcttgttagggtggttgttgtttcatataatctcatataaatatatcatttttaaacacacttccctaattttagttaataatataggtttttctgcattgttcttccgtgtttttaacactgaagttcaaacaatttttttcacacgtgtataacagactatttgaacacgttaaattattttgattttttcaaaaatttatcggacgtgttagataactacaacgaacacactcaattttagggggttgtaccataaattttttcaataaatgtcatcttattaaattttgtcatttgaattgtcctcattagattgactcattcatatatataagcaaaatattatctttattaatcaaaagagatcacaaatgagtagtagtacccaagtagtgagtgatgatgcattttggtcttatacatagaaattcccacttccaaaaactcacaaatgcacactcacctatcatcatctcacattctacttaagaaagaaaagaaaggcaacaactttagtgaaattaattagcttaaatagtcattaacaagtaagtaattaagctaagtgagcaaaaactccaagtagaggagcattggtgactgtagtgggctcagcatgttggtaattagaacgtgagtctgaataggcatcattttcatcagtgctcacaactgcaccatccaacacatttgggtttggtgcatttttattgaaccaatcatcgaaaccaccttggcagctcactggccttttatctttcttgattgatattattgatgctgctctgtggtgaatctgttgtggatactttgatccaaatccaaccatgtaactcatctttaatgggtttgaacccaataaataatccacctaaaaacatatataaatgtataaattaagaaaaaaatgtgaataagtcatatgagcacatataagagaaccaaattgtaataaagtagttaactgagagagaaaacaagaaaagaagtcatttttatcagcacaacttaatcatatttggaaagaaaagaaaaaaaatgtgaatagattttttttttatatataattataatattatagataacaatgacacgtataattagtgttggcattcaaattaatgagccataaaagtaaaatatttttcgatctttatttagaaaaaaaaaatatagttttcttaaatcagtaaaaaaaaacatattttttcaaaagataataattttttgggatttttt

SEQ ID NO: 194732 - DNA, 1358 bp, Cannabis indica
ctcaatatgtgatttttggcatctaaagtataaaagaaaaaaaaaggtaaatacagtataaatctaatttttgctgtgtgacagtataaatgtaaacctttactaaaaattcaatatttttgtaagtttctcattccttccatcttgaaatctgatacggcccggcccagcccagcccaaccctctatttatttttaaaaaaccaatattaagaacaaggacataaatttaataaaagaaaaaatagagaaaaaaaaaaaaaaatttagctcggagttggagtcgttgcccttcacacttcacagactatatcatagttttctgctaaacctctccactttaaggtatgatctatctttcttacaccgatttccccttttcccatcttctttatgttttctcttgttctgggtttcgatcagtttgcccttttagtgtttgattgattcactgtattatgtttttcatttatcatgaatttgttgctcaacagttcatgttttaaatctgtgtgtgaatttggcagaaacccagaaagaaaagatgccatctttgcaaactgcgttgccccctgaacttgccaacaatgccattagagttagtcccattaatttctctttgtttttttatattggaatattgttcttgaaaatgcataagcttgaattctatctttattgcttgtagctttaccgggagtgtcttcgaagagctaagtatattggtcacagggtaatttctttcttcaaaattggttaataatattcatatatgtatgtctaattctgtattgagtaagtttggtatcctttgttaatgatctctcactagtttattaatgattcattcataaattactaagaaaatgcagaacaatcatgctaaccagatagctttctagtatttattcatgtcgaaattagctaatgtagatcttcattagagaaaactaagatcgcgtttggttagaagtaataaaatggaacagaattttcattccctttcttggttgaattttaaagtattgtaatgtcataccaatagatgacctttccactatgataaaacttttatcaaatctttttatgcattttaaattttgttccattcttatttttattcttattctgtaaacattcagcttgtggtttaaactaattgattttcattattgaaaaacaaaaatggagaaagggtaatattcaaatggctgtaaaaataacaactttagagtaatatatgtttgattggattttttaaggtaatgtggatctgattagctgaacaatgcagatctattcctagtacaagaatgttgagtatttgaggccaagctctttctgttaaaaaaaaattag

SEQ ID NO: 194733 - DNA, 2020 bp, Cannabis indica
ttaagcatttatatattaagatacgatctaaatttaaaatttttaacagataagaattttcttatgtcatttgaattagttcgaaagaactacctcaacaccatgtttaacacttgagctgtacatactaacctgtatatatatacatttatatatactcgatcatcattttgattccggtgaaaaaaatatgagattatttcacatacaagtattaaaataaaaataaactttaatgatcaaaatattttatcgactcttatatattataataataataaatagtaattttataaaatttttaaaaaaattatgtatattttaaaagatatttttttttaatttgagtctcctaaaataaatgagtctaagtatgagtttagtcaaccttagcttattagggttgacaatataattttttttacttttagtaacaatagatttgtgattaatataaaaaaagttataactaattataaattattattattattatgttgttattaaaagatttatggttaaatatattagttacaaaaaatataatttattgtgactaaagtatgtatttttagtcacaataattaaaactatgttagtaacaatttatatttaaatactatgtaatgttagtcacaagtaactttttattatgactaaaaattatatttaattacaaaaaaatttaatattgttactataaaattattactaagtgcttaggatatactcttcttttatacatatataaatatatattttaataatttttgaaaatataacatacttttttttagtaaagaactttataaaattttttcttatatataataagatctagaccaaccaaatctcacgggtgattttgatataacaataattcattttactataaaaaacatttgttgaaattggataattgtgagtgggtagtaaagtaaatctctttcctctctaaagccgaaacagctgacctatatttcctcagaaaatgatagtcacttaattaattactaacaaaatagtccaaagaagattataataattaggttcggtttatatactgtatatttaatataatatcatgatcaaattgtgggcataaatagtgatgtaaatatgggttggaatttttgacacacacgaaatcggtacgagtacaatgtaattacgaaaaatataaatttaaatacgataaaacataatattataaattagtacgacatgacacaaataaactaatttaaaaggcacgacatgtgacaagcccaaaaaatacaacacaaaatattaaaaaactttagcaattactaattacaataataatatgtatctgttaattataaataaatttaaatactaatacaacttaagattgaacattataattttctaattaaattaatcttaaactaaatttgtatatatatatatatattaatttatttatatagtatgatataaaatttgagtatttataaataaatatttaatttttaataattttaattagttttttatataaaaatttgtaaaatattattaaaaattatataaatataattaaaattagaaatatataaatacttcagtaattaactcaatattaattataaaaaatatagaaattaaaagatgaatcctagtcccgacataaaaatgggctagtttatttaaaaaaaatagattaacacgaaatactatagactgtaccaaatttattgtttaaaaaatattttttagaacattgttcaatacgacctacattttaaagtacaaaaaagaaaatatgaatagaacaacaaaacacaccaatttacagcaaatccataaaagttaaatacagatacatacttttttcaaagttaagttgtgtttactttagtgttatatatgttgataaaaagggtacttgactctaataaataataattagaaaaatgtctttatcgaagaaatttaggactcaattattataaggttacgcgtttcttgaattcccaagcatattttgatgggt

SEQ ID NO: 194734 - DNA, 939 bp, Cannabis indica
taaaaataacaaatatatatataaataataacaatataacatcaaaataatctaaaaacaatctaaaaataacaaaaaaaaaaatcacaacacaaaaataacaaataacatgaaaacattaataaatatttgttgtaaataaaaatttataaataatctttcaaaaaatatataaataaacttatttaaaattccgaccctattcttaaaaattttggaacttttgagtatgtgtgaaatatgcgaaaatgaaatcctctgaaaaaagattttgtttgtttgagtacacacatatacataatctagtattggaaacttagtagcggcaattgttaccgttaggttttgaatccattgttaggaaactttgtttgagggagatgaagaggtcgatagacgacgtttacatgggttctcaactcgaatcacctactatgctcttttctcttgattcttttgaatatctaaggaccgtgaggggcagattttctccgatcgaaaatggtaaatatgaagaatttcttgtaatgctggaagactatgccactcaaagagttgatactgagggtttgataaagagggtaaagggtttattagaaggacatccagacctcattttaggttttaataccttcttgccaaaagggtatgagattaccccaccaccactagaggttgaggatgaggatgacaatgttggtgttgcaattgaagaatctatcaaatttgtgaacaagatcaagacccggtttcaaggcgatgacgatcgtgtgtatagatcatttttacacattttgaacagctacagaaaggcaaacaagcctatcgcacatgtccaacaagaggttgaaacattgtttaaagagcaccctgacctgcttgttgagtttacacattttttacccattaatgacacatcagaagatcatctgaatgaga

SEQ ID NO: 194735 - DNA, 601 bp, Cannabis indica
gaatcaaatttgtagtggcagagtcattaatatattgccaaaaatacttttaatgaattcatatgcaaatctttagtgctagcttttcttattatatacaataattaataattatgcattctcaatggctaatattcagtagtgtaaattatgtgtaatcttcagctattcaaaacttcctatattaatagatttaaaattaataattggataatacttggaaaatcattaatcatgactttagaatttagaaatggttgagttttatatgaattgaatattagaatgagattgctgtttttgtcataagtattgttattttgtttatttatttattttttaaatggtcataagtatttttttagggtaaagaggtagcacaaactaaaaagaacaattgacggcgcaggcttcaccaccaatccagcagattgtttttcaaacagaagacttctttgccagtcatgagcaaccttatttgctgttagacagatgtgacgaaaaaagacattcgaaaggtaagaaagaagagcccttagctgagacatgagatctcaaaacacactacaacaatcttgttcattacctatatagatcattt

SEQ ID NO: 194736 - DNA, 942 bp, Cannabis indica
cgagagcacaatagcttggaaacacatttgtaaattgttgggcaacaggtaataggtttgaaatccacagctctagttgggttgtcgtgctttggtatgagaaaaatctaagttgaatgaagttccttgggcataaaacctattctcaaaaaactcagtgataccagagcagaattcatgaccaatttttgtccaaacaactttaaaaaaactagacccgaacccatctatgccaggagatttagtttcaggtatactaaacatagccttcttaatttccttcttggtgaagggcttgagaagcattaatttttgatccatatccaggcgagtatattgatcaaagcactctatcttcaacttgaaagtactcgagttgctagtgcccatgtaatttcgaaagtggttgacaaagtgatctacaacctcaaaattatcaacaataaccccttaatcatcaatgaatgacgttactctattttcaattcttcttttctttaggcaagcatgaaaaaaggacgtgttgtcttcccccttatgcagccagttgattttgcatcgctgtttgagaaatttgtgacacattttcatttgaaaacaatagttagcagcaacttccgtttcttcttcctggtttttaacctctctaggattagcttgggctttattttttgcttcaaaaaaggagctcttggctgcttcatacttttttctcatatcaccaaattcctcataattaaatttcttgaggcaatatttaaccctcataagtttgaggtataaacccttaaaacctgtcgcattaacaggcttccaccagttggttataactatttccttgaagtcataatgattatcccaaaagttaaagtatctaaaaggcttgacacccgatttgacctcaggcttagttgaaatcacacaagagcagtggtccgaagt

SEQ ID NO: 194737 - DNA, 1039 bp, Cannabis indica
caatttacagagattaatcccttagaagtctcggatgaggatgttctgaaggaaggcgatcctgctattagggatgtctttcaacctcttttatcccctaaatcctctctagaagcgattcagtagcaagatgatgctcagaatgattttgtttgtttcctcaaagcaaattatcaatgttacagtgaacttaaacaaggtatggcttcgattcctctgattctgcgatctagctctgttgttcgtaattttgataatacatttagaaattttgagcaaggtagcaggaaggtgaagatcaccttagatgatattgaggaggagatttcgttttggaaaccgtcgattgtatgctatgttttaggagtgaatcctccattacacatactcgaaggatttgttaataggatctggaaagacaaagtggatcgagtaaagatgttgtcttatggcatctttctcattcgattcaattcagtagaatacagggatcagatcttgaatggggaatatatttttttcaacaggaggcctgttataatgaagccttgggacccaaatgtaaatttcaagaaggaggacgtgaagtgtgtgccaatttgggttcaactagaggatttagaattgaaatattggggtcaaagattactttttaaaatagttgggcaagtagggaaaccattaatggtggattccgtcaccaaggagagggagagattgagttaccctagggtgttggtagaggttctaatggatcaaagagtacctcacttgcttaactttgagaataaatttggtttgaatacaatagttgggattaaatacgagtggaaaccagtcacttgcacccattgttctggagttcgacatactgctacagactgtaagaaatctgcttatgtcaaacaacaatgggttgtcaaacaagacaacaggaagccaatacagattgataaggagggatttacaaaggtctctaatggcaagaagacagatgggaaaggtaaatctgttgctgtcacagctactacagtggtga

SEQ ID NO: 194738 - DNA, 2976 bp, Cannabis indica
tcatgaatattattatcaagttcatgtaaatctatttactttgatgttttttatttatataaattttagtttttgtaatattatgttgctttatgtaattaattaacaagagtatatatatatgtttggattttttcaccatggatttatctcgtgtttttttttcttttatttttaatctaatattttatataatttgatttttggatgttagctagtttttatccaataatgttgctcttctatctccatctaatattctaatttttatagtacatttaggaaataattttcatagcaaccattttggttttatctttgtatctagtaattaattagccaatctaacaaagaagaaagaaccaaaaaaaatattggtattttttttcttctaattgtaattgtaattgtaatttaaataaaataatatttatatattgaaagccatggcttctagatatgtatatttattgctagttgaaattaatttgttacaaaaacaaaaaatatagagagatatatggaatttattattggtatcaaatgttgtgaaaatgaaatataattaagaagcaaaaagattttgtttttaaacattatgaaagtgtaagtaattattgtacataataattttaacctataaatatttatagatttatatggtcctaatatatataacaacacattaccttatatttgaagaaaaaagaagtgtgcctataataaattattagccaaggattttagtaaattttcaatttgtttaataactagataaatttagaataaaaaatacaaaaattagtcttaatacaaatgatccttagggcttaagtaatatatataattaattaatatagaaattgaaattaataaaaatgaaaaactatactaataataaaaattatgtagtggacaattcattgaattagtagaagaactatagttataataaattaattaaggggataaattcaaaaactagataaactatatatagataaatttaactattattaatggaatattaattaataaagagtgtagtgatgaatcatgtgaatcatttcctgaatctacgcagtagaatatgcctctcttaataataatattaatattctccaattttttaaaacacataaaaaacataaataaatacaagtgacaaaatgagctttaatattaatcattggtttcttgaatgaatcaaatcctaagtcttgtgtccaaagtcaccttaattattccatatgtcttccttagaaattatatatatatttttaattaattaaataaataattaattacaactatatgtaattatacataatatcttatgttttatttattttttaatttaattaataatatataaccttgttttccggttattaattttacttctgacataatttatatttatatgcatataaaaattacaacttattaattttgtatatattccaactatatatataaaaaatatttctgcaaagtactgtgtattaattataattaatgctgtttatatcacttaattatgtttatgtttcaaatacaagtacaaccataatttttaatatataaatatattatatattgaatttaaaatatataagtaaaaatgtatgtgtaatactatttgtacgaattgtgcatttgttttcatgatcataaataattaatgatgtatatttataaaaattgtactgtttattattagctatgtatatattgtggtccaattaaattattgccatataataatacaaaataaatatgaaatatatacatatatacaattacaaatgtcaaaacaactctatatatagtccatatgtacacacatgatgatgatgataattatctttaatatataaatttattttaacttttttattttcgagtttcaacactattaataattaaaaatgagtaccgatcataaagagagaattttgggtagaaaattgggaaaaagaaaataaagaaaagagaagtatgcatgaattttatgtatcatcatcagtttttgaagataagatagtaactgttattaaataatggaaaaaagaaattaatatatataaatgtccatatatatatacatctttatatatttttaaataattaatgggaaattttattagattaaaattgaaaataatttagttaaagttgattttttagggtttttgtcctatttaatttaaacgatttggttaggctgatttttgttaattctagtttatttattaatgatttttttttttcttcaaacaaaaattgaaaataattaatacgatggttataaaaaaaaattaaaggggaaagaaattaaacaaaaaaggaaagaaaataagtaagaaaaaagctttagtttgatatatactttccattcaaagcaaagcttcctttggaaatttatgcttgagaaaaacttaacccctctctcatataaatatatatatataatccccttgtttttggccattttttcttttgttttacactttacacttcaaacattattattacaataaaacatgtgttttgtatttctttttttaaaacttatatttcaaaataagctatattatatatataatcacaatatataaattcaattatatactagtataatcacttgttatatatatatatatacatatatatataataatatcttctctagctagttaataacatggggattttttggtgatcacttaattaatgctatatacatatataatgttttgatataatcaaatattgaatgactttattataagaaaatatataactatatattttctaaattcttataatattgagaaaaatagcatcaaaatgaaataatgtgattaaaaaaaaaaggaaaattttcttttaaacaaaattacaaaactagaattatccaaaaatatatacttttatttttgttggtcaatctaaaaatatatacttaaagtt

SEQ ID NO: 194739 - DNA, 1783 bp, Cannabis indica
tggtgtagatcatttctagggctaaagtaatttggataaagacttttaattttacagtataaacgtgaagctacctccccatgtccaaatgaaacggcaatgtaaagggggctaacatctccgccacccgaaatggtgatgaagtctccacaattcttcaaatccagaaattcgttgacgatttctaggtttccggccgcacaggctgagaaaaacggggtgttacccatcaaatcttgtgaggacatatcaatgttgtccttgaaatccctaaaaagttgcctcacgaacttggtagcttgttctgctccgaccgccacgtggagaacagtttcctttcttcctctactctctaaaatatcttctttcaaaatattagggttttcgttgatgattcttttggctgttgtgtagtctccactcagtgctgcatggaagagcctatttcttctccaccaatcattatctgataattaatgtacgtaaaacatataaatatataaatgatgttcatatatatatatatggaaattaattaaaagcatatatatatatatatatataaatggcacctattgtcataataacttgttggttgcctgaaaattgagaagtgctagagatcacagaagaagatgagtttgaaggtgtggaagtactattaccattattagtagatacagaagcctctccacggtcatcattattatccattttgtatatgagttattaaaacttataattatgtagtatatatatatataagtgttgtgtacatatacatatatagtattcatatatatatatatgtaatattaatattggggaaaagcaaattaaaagactaaagaaaagaatgttaagtgggctatggtaattggttcattataaagtgtcaatgcactaagagtgagccttttacgatacttcccagaaagtaattaatcctatatctttaattaagaatcgatcacggaaattacaaatcccataatgcattcttttccactttcttttacatatatatataactccttctttaacccattgattccacttggataaggttttaaatttgtggtagtggggtttattataattaaatagaagtggtgtttgaacatctaatccaaatccaaaactatgttgcttatagtgcatctaagaaataagatatgcactattgcttaaatatgagaatagatcatcataaataatatatttttatatacatatatattgaggaagtggtgatgatgaagagaacaattgacataaaaaaatgcttttgataccgaaaacaattgacataaaaaatgcttttgaggaagtagtgaatcaaataaaattcatagggctcaaaatgctgctttataatagtattgtataacactatttcctaacactatcccaaaagggttattgtcgtcttttcttaagtgacatataaaaagtttacattaattagagaaatcgatgtaatagttgtagatgcatatatattaatttatttacagcggcactactacaaaatagacttttggtgtcggttcaagggacattttttaaaaaaaccgacactaaagatcacccaaactctttggtctcagtttataactgacacatataataaccgacactaaagtacaactgagacaaaaaaagttaaaaaataatatataaatcaaattgagtataagtgtcgggttataaccgagaccaaaggatctttggtctcggttataaatcgagacttaaaggtatgacaaaaaaataaaaaaaa

SEQ ID NO: 194740 - DNA, 1626 bp, Cannabis indica
agatagccatatatataataggtaagataagattattcattcatgaattacatttctctggtctatcttctattttgtgttctcattatggttgcaaaaatttcaagtttgtgcttttgtttttgtcagtattgattcgaatttctctttgtaacaaacctcatcatcacagtttgtctaatatatatgttggtttcgtaattcctggttggcagaacacattttaatattttcttttcacacattcttagcatgtgtcactggtttctaagattttttatttttcttgatcctctcaaaattggaaattttttaaccttttttccaaaacggctaaggattcaaagtttgcattttgcagaaagttgtttatatatttatcgttcaacgttgttggtttgtgtttcaggaaggtgattattgctagctttacaaaaaggaaaaatgcaacaagaggagaatggtgacattaatcctcaccaatctctggataataggcctggcatcatctttattggttcccctaatgctggcaagcgcactcttctctcacgtatgtcacttttcccttttcatttcttattctctttatggtttgcaaagtttttctgtttggttctcacatggtaaatcaattgtaagctttcgtttcgtttttaatggctcctttttgagctataaatcgttactttccgaacttttgtaaaattgagagcactttttcactgcaggattaacctcgattgattttgaagatgcttctgattcatcccaggagctactacttcatgggtaggtttacttttcttttacccctaggcaatcactattttcaacttcatcagtggtagcctaagtgacaaacagatcttgaatttttttctattagtgacttatttgttgttgttttcccaagcagctggactatcaacacaaagtactacactgctgatgtttccgtatgtgtggctcatcttcatgaaactttatccatttcgacccttccatcatattccaacttagctgccctggtcatggtcttcaacatgaatgatgtaggtcctttcctttcctacaatatgactttatgtgctgtttacttgttagtgctcaatgctttagcaccctacctcattacattttgaaattgctctttgtgcaaccataaaggttttagtggaaatgagtatatttctttgacattctgtgcagctctcgtctctagttgcccttcaggattgggtatctcgtaatgatcttgaaaagtttgagattttgttgtgcatagggaacaaagtggatcttgttcctggtcatccagttcattctgaatacaggagaagcctaatgaaggttaacgactctgatttggagtttgataattatggaatttctgaaactgaaggaagcagtttgttaggagatgatgaaccagaaatggaattggagattaggagatcatgtttggagtggtgcactgaccataatatcgagttcattgaagcatgtgcttctaatgctgattttgacaaatgtatgctctcttcctgttttgacttactttcagctgatcttttagtttattaagagtcagtgtattatattctactttaggttgagtctttg

SEQ ID NO: 194741 - DNA, 1204 bp, Cannabis indica
gatcattgttgctattaccatcatatcatttatcctatttgggaagattcaatcaaacaactaaaaaaataaaactattcataaaacttctatctcttttttttctttgccagaaacctttatatcttttttcttctctataataatttttcctccaaaaatcagaggtattttggtgtatattttgcccacattaaaactcataagattaattctctaattggtcaaaaagagatttctctctttttatctctctctgatctctcctctctcatttttttcattttattttttttatttttgtgaaaatgaaatgggctgctgcaatacttaatttctattttgtatttaatgacttgatgttcaaacattcttacaagccacaccttactaaaagacaaacactacgtacctatagaacaattcataaacttaatataattttttttttattttatatagtgatatttaatgaataaatattcatataatcttctctcctgtttctctgctgacatttctttcaaatgtagatagataaaaatttggtccttaattaatagaaaaagggaagaaaatattgaagcatgtaataacatcaaaataataaatcgaaagagccactaatatggctaatattctgagaattgtttcaggtttttaaggttgatattctagatcaagatgacaacttcagttatatttggaagattttaaattttctaaatataactttaattaaaatgtttttactaattatattattctactttgttattgcaagctagctgctaaattatgacttttagattatatttgatttgatggattgaaaatagtgtataaatttgtgtctaaaaaacgtgtcaaatatattaattttcctgtaatgtgcttatacatttacctcttaatttatgatcagaagaaagaaatgtgttttagtttaatcatcactagaaaaatgactctaatatgatgattatatattaatttagccaattttttttttagatttcaataacaaatatagtatttatttaattaacaagaggatgatattttagcaagtgttaattgtgtatgtgtctcagttattaatagaaaaaaaaaaacaacatgtaatttcaactacatagattttaatttaatttattattttctccatttatataatatacatatataccaacatgggtcatag

SEQ ID NO: 194742 - DNA, 3751 bp, Cannabis indica
ggattttaagctgtcatgtaatgtattctatattgaatgtttttataatttatccttaatgttttcttgacttggtttcaattgaaatatcatgaattaatcaatcaatgtttttgattttgtgaaaattgaaaaaaggccaatgtgttagactacaaatttatccgtgttgtctataaagggtacaatgaaatgaatggatatttggtgggacaaaggaaatcaaataaatattatattttttggaagagccttaattattagctaattttaatgttaatcatatcaatcaaagtgatatgtttcttagacaatgaaacaatgtgtaaagagacttgtcttaactattggcatggaaatgagttgtaaacataataagacaaaaaaaaatttaaaaaatttttcgacatatatttttaggtacaaaagttaattaagaaaattgtaatacgaggttaatcaggcccgacccaaaattgtaatacgaggttaatcaggcccgaccctgacatgtgcctaaggcccacttagtccaagggtccaattttttttttttttatttaataattatatttcttattaattttaaaaaatatcatatttttttttaagtataagcccaaaaatatatttttcttataacccactaatttttaagtcggtcgtgaaattaataatatcacttctcaataaagtaacatctttcttacactcattctccagtattaagtatctaaatttattttttttacaacaaaattacttataatatcaacttttgttatacgataaatatttgctgttaattattgtcatattagtttaattaatctagaatattatttgaggtaaaattatttaagttgcgctaaaaatttcacctaaatatttttggttttgcaaattttaaggccatctccaaccaacaataaaatcctatatataatgtgatttttttacaaaatgctccaactaagggtctgcgtctcaggtcccgagtcagggtttagttatggattcaagtctaggtccaacgtcatgaatctgttccaggtctagggtctaggtagtcgtcacatgttcgagtccaagtctaggctgaagtgagggtctggattttgggtccaagctcaaggtcagggtcgaggtcaggatctagggttagtaatagtatcatatatgatataattaaaaatatatattttatttatttgaaaaaatactacagtataatacaatatcatcataataataaatgatattgtacattataaattataataatacaatacaattcaataagttactatacaacataatatcgattctaaagtatatgagacttaagataaaattaaatttttgtgacctaaaataaaataaaattgaaataaatttttaattattatgaaaataataattctattattttggtgtagtaataaaaatttttaaactcttaatagctttaagatttaatcaatcatagttatatattaaatatctttaaaaagaatataaaagtagagattgaggattaatctctcaattttttttcttaaaagtacactttctactactacattaaatattattttattatattcttttattatttaatattttatttatattctgataattttttcataatgtcaaagtgcgagtgtgcgggagtccgaaacgcacacattgctcgcctcggccttgttattaacaataattccttaaatataatttgaggagtgttaattacaatctcctatttcaatctcttagtcaaccttcacgttcgaaattacatgtcgaaatattatttttagttttttttcataacggtattcgttatagttacagtatcatttttataaattttttaaaaattccgaatagtttacagtaccgaaaacaaagttcctgatattccagtttacaacgcgcgttcaaaaaacttcaaacgtattttcggtaatgtaaactattcgaaatttttcaaaaatttacaagaatgatgttgcaagcataacgaacacacccataaaaaaattaaaaaaatattccaacatatattttcagatataaaagttaactaagagtttacaagaggagcttgacggtaagaatttatataattttaagtagaattttaatactttggccacaaatatcttatcagtaagaaaagactcaaaagagcttactagagaatattccacaaaaatcactaaattattgaaaccttgggaatttggcaagatccacacgtgtctaccttaggttagaaccttcgagtgcaacgacatcgcaccgtccatcccacatgccccgagaaatcgtagccatcgcctactgaactgcctcagattttgacacgtggaacgcacatggccagaaacttgggaatggattaataaaagagaaatgctaaaaagtaattatagtctctgtccttttctactgttcatctagtaattggctgccacgtgtccacattgctctattgtttcacgcgtgactaagagcatctctaatttttatcactatatataccccttcttctcatttctaagttctttaacacattatccgcaaacgtattttcataatcacgaattcaaaaaattaaagcgaagaaatctcgatttacgaaaaaaggaaaaaaaagcaaggaatcaccaacagcagctcgaattcgtctcaatcggtaagaattttactatcaagaattttcttccatttatttcttcatgtttacgcgtttttgaacgattattcgttatcgaaagtgatattgatcggctcaatttcttactcctatgaagtattttgaaatgaatttaaactgtttttctttttcgttgtttgttgctttaattgattgatttaagtgaattatatggaggattattatgtatagaaaacaaaatctgtatatatggaaaacaaaatctgtaatggagattcctaatttttttttttattattatataatttggctagcctgaaggaaaaaaaatattaatcagaaaaagtatctgcatctgtgccactagcgatcgaagatcggaaaaagatggcgttgaatatcactagccagatcgcgacgatggctggatcaacggtttcaggagagtctggatcaggttcgtcgtcggcaatgtggaaatctccaagatgccggattccgagaccagagtccgttgagagcggagtatcgccgccgcggagtccgtgtaggtctaggcaattgagtccttgccgatctccaccgcggagtccacacaggtcgccggtatatggcggaatgcggggggatctgtcggtggcgtgtcaggcgttcgcgacagatttagagctggctccgccggctgtggtggagggggattcttcctcttctgtgagtgaatacagagaagtacgcggtgcgcatgataagggggagtggggtgccggtttacgtgatgatgccattagacagcatcacgatgaatcacacagtgaatcgaaagaaggcgattaatgcgagtcttcaagcgttgaagagtgcaggtgttgagggaatcatgatggatgtgtggtggggcctggtcgagggagactcaccgggctcgtacaactggggcggttacaacgagctaatcgagatggccaagaagcatggtcttaaggttcaagctgttatgtctttccatcagtgtggtggtaacgtaggcgactcttgcaagtacgttttgttattattatttttttt

SEQ ID NO: 194743 - DNA, 1141 bp, Cannabis indica
caatattaaaaattaattataatttatatataaaaaatttaatccgtactcattttcgatctgggctaaaataattgcacctccctgtaaattttattataacattacctaaaattattttgaaaaaaaaacttctattttatgtttaacaattctattgttgtaagtgtacataaattttacaaaaaaaaaaacttataataatatcttgtaaaaaaatttattaaatcaataatctattaaaaaaaaaatcaataattttaacctgtaatatatatttgattctaccggttaaaattatacaaactttttcctactttttcacattaataaaaatgtacatataaataaaaaaatagaaaacaatattaaaaaattaattataaatgtatatatatatatatataaatataaatataaatatacctgtgaggcaaagagttttgcttgtttacacatatcgataattttggtaacaaatgtctgcatttcatttttgtaaatatcattatcagttctgagtacaattccgggagtgttcttgagccacaatgggaaaccaccgtagctccactcggcacaaacataaggcccaattctcaaaactccgtacagccctgcttgttgtacgagtttaaagaatttcacgaaatcgaggttaccggaaaaatcgtacttacggcggagtggctcgtggtgatcccaaaagatgtagctctcaattgcatcgaggccaccttctttggccttttgaatcaaatcaggccacatatgttgggtgcttctcggatagtgaatcgacccagataaaatgatttgtcgttttccattgatcatgaacgatttagcgtcgtatgttacatttttgattgtcgttgttgtcgtttcttctgctgctaatgataatgggattagtaatgaaattaaacttaataataataatgatattgggaaatgtgaagaaatagaagccatggttgttttgcttcgattatgagattatggattttgtttagggttttggagagtattttatagatgaaatttgaaacaatattggaatatttcaatctctatccaaattttaatacggatatattgttggttattgtaactaaaatccaataataattaaaaaaaa

SEQ ID NO: 194744 - DNA, 1878 bp, Cannabis indica
agagactctcaatctccaagaaaccttcagatgcaaaaacaaagaaaccaggtttgtcacctcccccattgctggtttaactgaattgtgctagaatttggtttttctgtttgatcattaacctttaaaaacaaaacaaacaggtacaataacacgagcacaatcgcttaagcctccacaaataaatcctaacaggagaagtatgcgaagaaattcagaaagccagctacttatgataagtccaagactaaaaagaacatcatctgggcatgcctcagattcggagctcccttagatctttgttttacaaaaaatacagaacagtttcggtttcagtcgaaatctgagatatgaaagacgaaaagcaaaaaaatgtatatttctaactgaatatgcattgacatcatactttagagaaccaaagatgtaaaaaaaaatcaacttcttatgataacatctgaacacagcagaagtttccttcttggtatgcatttgtggcctttgtttttcttctttctttcttgagcagcaacatttctattctggtatgcagatgtttgagggccatatcctaatttgcctgataatctctaaattaagcaagttagcactaatttataatgaagtagcttttatgtcgaaatgacatcgttcattcctgattcaaatgcaaaaattaaggggtataaaaccgattacaatttcaaaatgattcatgaaaatctcaaacttgaagggctttttataattttctttttcttccactacatgaaataaatgtatccaccccactaccaccccaagaaggaaaaaataaattcttgggaaagaaatgagcaaaacaaactgactgtagaggtaaagattcttaaccaccatgaaataatgatccctttggaagcttttctcattacaccatcttcagcactttcaagactccaatagagtttgcagcaactaccatattagactttcttctccaacagacacttgaaacaaactgtccactatcatcgccaatctcatgtccagaaacgggatcaactgatccaaaagtgtgagaagttataggcattggtagagatttgtgataactatacacctgaaacaagcaaaagataaaacacaactggttaatatcataatgtttgaacttgaactttaatgggattcttcagaaagaactaatagacattaatcacctcatttgtttctgaaccacaagctatatatccatcccaaacagataatccaacaaagttctgaacaagcaagtgatgaatgttaaaagctcgagtaatgtaatttgaaagaaaagactaaagatggaatttaataactaccttctcattaatatgaccggtaaaggataagctgctagcatcgtcggatgagattggtttgttgagattccaaagctttaatgtgttgtctgtggatgcagaaacagagtttcagcatccaagtattttacatagcttactgcttttccaatgaccggctaaagtatacaaagggaattttaacgtgggaagatcatagccatagattttgtaatcagcagacccagtgaccaattgattactagagtgatcagagaactggacacagcagacattggcagggcaatagatagttcccactgaacttttctgcacaaaccaaatcaattaaagggtctaacttgtaatacaataagcaggtaagcacaagaaacttaatgttaaaagagagagagcatacatcgttaacgttccacagttttacagaacagtcatcacttccactagcaaacattgttggattagctcgagaaaagtcaacagaccaagccctcttctgatgctcactgtattgaaaacattctttcccagtagc

SEQ ID NO: 194745 - DNA, 987 bp, Cannabis indica
ataataaacacaccaaatatagcataaatttatttttttttaatatatttacatgtgaaaatgataatgttaaatagattcaaaattatattagtggaatggtgttgtacttaattgggaaataatagtattaatgtcagagaaaattaattgtggcaatacgggaaataaggtcatccacacacacccaaacacacattaaattcaaccatatatatacaaacacattaaatccaaccatttatatatataataaactttctattataatttagtcaatttctttgtccaaaattaaaaacacatacctaaatatttttttatcgtaacagtattcagtatagttacaatattattcctataaatttttaaaaattttcaaataatttaaaataagtttaagtattttaaacacatataataaactgaaatattagaaactttattttcgatactgtaaattatttagaatttttcaaaaatttacagggatgaaatatattctaactataacgaataccgctataaaaaaatgaaaaaaaaaaaatattctgatcacatgtgattttaaacgtagatattgactaagagattgtaaataaaaaattataattagcatttttctataaatggattgtaataaactaaaataaaattttggttttctattttgtgagtgtatggtcataattcctaaatttgtattgttttttttttgggtttggccatagaactttattttgttataggccaaaaaaatgaaaaaaggacagtaaagaagacaagttttgttatcctaaaaatgaaaaaaagacaaattgcattagttggaagagtggaaaatcataagagagaaggtcaaatattacttataagctggctttgcatgtgaatttttcttttgttctatcatctctttaagaaaatcaccaaaactatcaaaaacatgaaagtggtggcaatacctagctagtataaattataata

SEQ ID NO: 194746 - DNA, 2246 bp, Cannabis indica
aacagcgtcggtggtggttaaccgctggttatattctcggattagagagagaatcgcttagtatataagccattgaagctaggcttactttcttgggaggagagaagagatagagagaaacaacaacaagttctagagagagagagagaagggagaaaaatagaggctgagggctgtttggcttcgggactttgagagacacgagagctacggccatggctgaatctaacgatttcgtttctgttgatatggagaagatctatctcggtggaaaggtttgttcttttttgggtttattcattattattattatttgattttatttccatttctttgattctttttccctcccttcctatccatctgggttttgtgtttttaagttgtttttttttttgcatttgggtccaacggttgaatcagcttttgcagaatatgaagcttttgtcttttgggtcttttgattttcccggaatatttgggaaatgggaattttagttaataagatttattctgcgttccaactgttactttatgccctttatcttgtaatcgattgaaatcaaacgggattcgttttctgagttcatttcacttgtgggtgcttgacttttctgagtttagggatacaataaaatttgggttgagatttcgtatcccggaaagtggaaaacggaggggatatccattgtttttgtatttggaatagttcttaacttggctttgctgagctttttacttttaagaaattgaacttttaggtagcgtaaatgccagatctatacatgccttatttgctagtttggttttcataccatttgccagttaggtttattccccatttgttatttaagcataacacacagaataaaataaaacagctttccgtttacaaaggaagaagtatttgtttaggaaaatgagcaggtttaatcatttttgcagtcttttactgtaaagccgtgtttttgagtctccctttattctaaatattattacttttttaaagtgagaagtgtcttaatttgtttatagcaggaccttttacactcttaattttgttgctatcgtataatgcgttccttccctatttttcttattatttccttggtttgtgatgcttttaattggagagaatttggactctccgctggtttactatccagtgacaaaatcaaggatatacctttcttcagtagttatcttgtttccttttttattttattgactagtctagctggtactctggctttccatgaatgaattttcttgttttattggacatttttttagttttaaaccaatgtctttatatatgtgagattccttgcttctcttttgaactgtcacacgtctcttttcccttttttcttcaaaagatacaaatgacgcaataattgcaatgttaaatacttgtttgttttatctgtctttttgaaagtttaatataaaaaattgtatcttgttcggcttagttgcctggaaaggggtaaatgcacatgggaagttccaaggataataatcccatagagcagtgttgaatcttagcccttacttgaaggcttaaaatgcgatataaatgttttgtcttatcaagcccacatcttttctgaaagtacacattatatcctcaaacaagttagcaaatcatgcaatttgtttgaagaaaaatcatggtagtcaaaactgttttaaatgtatctatttgaggttcatagttgatcttggcttcgttagttcaatcttctactcatctgttataattttctcatctcgcttctttcaggaacacgtaattaaaactggccgtggcaatgtgtctgttattgtctacggggaccaagacaagcctgctcttattacttatcctgatatagctttaaatcgtaagtacaatggtttcgtaatctccttgttcctgatggcttgttcagagtgcagtttttcttttttttagttaatttattttatgtatgttttatttttgtttgatcgttgaaggcttaatgatcaccaacaggcacagacacgtatattctctatttcgtaaaactaagttacaacctaacaaaattttatatttcatcattatgttatttggcagatatgtcttgtttccaaggattatttttttgtcccgatgcggcttctttgctgctccacaacttttgcatatatcacatcagtcctcctggccatgaggtcagtgcattttttggttttagttaattgaccttacttggcta

SEQ ID NO: 194747 - DNA, 1389 bp, Cannabis indica
cttatatacattaaatattgacttaataaaatatgtcatttagctcgaataataattactttaccgccgtacgtgcaactgctaaatgatcaataacttgataattatatctattcaattaatagctagtcaatatataaacctcaatcaattaatttccctttatcggtatatataataaacctagcaagaaattactgagacaaaataattgagtgcaaccgaaaccgaacgtacaccaaaacagtgttttgaagttaatatatgaatgaattatatgagagagagagagagcgagagagagagaaagaaagaattgttgagtactggaaaaatgacttgttagaagaatagatagatagatggatggatggatggatggatgggatatttgagaggtttgtcccacgtgaggagtcgcacgtggctcaaactgcggcggttggaagttgctactgtcatcaccgcatatatgtctgtttgcttcacgcaagctgttccattttctcttctctttcttttccaattattcttaatttgccgtggctttaaagtatatatgaaccaaatacaccccactcactctcacctcccctcactttctctctctctctctctctctgtatatatatttattaatttatattcaattaactatatgtttgaacaatatatatatgtctttctagtactgttatgtcagcaatcagaccagaatgtaatcggactaattttacatgtgatgctacatttttagttagtttcacatatctttcttgtgaattacaattaatatgtctgaattataacctacaatattatacatattcaaaaaaaaatcataagcttttaaatttgcaattattaaccgatcatgactataatatctaccgccataaaatcttttgctagatttaacaattattgatagacataagttaaacatgtccaaatatatacaagttccagagtatacgtaatagattcttttaattattaaacatatatataaatttataattaagaagccatgttctcatatttgtcatacttttggtctatacattatacatataaatattttgcagcatacattatagattattaatatcttaaaataatagtccctacatctacagtacacaaattcttagacaatataaatgattgttgcttacgcgcgctgtttacttgtgattataatatataatgattttttttttatatatattttggcattaatttgaatattgtaatatgtaacaaccagttcctttgtaaatgacccaccaccaaaagctaaccgcgattattaaaagaaaaaaaatgatataaaatgacacgaactcaaattaatttacagaaacccctaattctctctctctcctc

SEQ ID NO: 194748 - DNA, 517 bp, Cannabis indica
gttggattctaaaaactaatcaggtgaattcccactgctattcaattacaatacatttgcccaattttgtatcaaaatctgaatctctcaaagtcttaatcacgtttagaatgattttacatgtttattttggacttgtatgtcaaattgtaggtgttagatatgccttttttatttattgagtttgacgttcttttgcttaactacaataaattcttgtcaaaattattcattttgattcaaatcatagtgatgagttttacttttcttacttttcagcatatatatatttatatatatatatatatattctatgttgatgcatgttcgtttagttttactttagaaatttgttagtttatttttatatgtaattggttgatgaagctttgtgagttatcattttctatctcctttggacatttaattttctctcaatgaaataatgtgttactaaacaactttctcagcttcaactaacatgctttttatatagaagcaatatatatatatatat

SEQ ID NO: 194749 - DNA, 1879 bp, Cannabis indica
ctttgtttgttgacccttgcaataaaatcatcagcccttttcttcaaatcctcattgggcaaataattagtagttataacctcatcatcattatgaaaatcctccaactttttcaccacaaccacaatttttttctcatcatcatgtacttttgcccaagtgatcattttctctctcttcttcttcaatgcatattaatttcttttcctcatgaggaggagctaaaactacttggtatttgataatttgcttagcactagtgcttatgtactcttcatagtaagagtgatcattactagtactagtgctaataattggagatgacttattattttgtgaggatgaaaagattttggactctccaataagggcaacaataatgagatttcccactatgaaaacaaatttggagctaaaaaagagtgaagggagttttgggacatacacaaataataagacctccattgaagaagttatgaagggaagccatagagggctcaacaagtatagacttgctattgttgtcaaggcatagaacaagagattcttcaaaagctcattctttctatatttgttgattgccttaatcttttcaagcttgattgggtccattttgatgggtttttttttttggttttcccaaaatggattggaaatatgggttatggagtaaaactaatgtttggcaaaaggactaattttcttagaaggaagggctcaaggcctagataaaatatacatgagggagatttcatctgcctgaccatataaaaattcttaagactgccttatatataggtggggatagttggggttactttggtaattataaatattaataacatgatatgctatatagttatttgtatggggaggtgactttttttaaaaagcattaatgggagtttagttattgctcactttgtatattaggctacactttactttccccttctggttactttattttaaaaaaatatatctttgaacaaatggggtttttctttccataaattaatcacattaaatatataatgaaaaacaaaatttccaaaatccatatccaatatagtacatggttttatatatcatcattcatgactatgtatagatcaagatagtgattaattatttgtgattttgtttattatcatgcatttcttgatatttacttgatatatatatatattaattgagcagaagcttttgggatcaacttcacttattgggtgaaaaacaaaaagagtaaactttaattgatatattatttactttttctctccacatctaataaagcataatttccacttagaaagcatttatagtatacttttttcttcttttgtttgtttaaagtattagctagttagcttttttcaatcataatttttattagtagacggcacattgtggaatgccacacaaaaggttacataagagacatgagaattttgttattataagtccttgtcagaactgtgtcatatctgattaagcaattcagagatatatattacacataatacaattatataaatgtatatcgattatatatataagcttttggttcagatatattaacccctgtaatccgagtaccaagcttaaagattattatatatatatatagtactaatacttttaattacatcttaatagtcatgatatatatttagatcactactaagatatagccaaaggcaaatcttaccaaccctttatctctaactcaaatacttgacaaactttttttcaatttaggaaaaattatactaaggtttcatccaatactaatatattgatcaagtctagctagtatacacactaaaaaaagcttacattttgtgacaaattttagtattaaatattacttttaggg

SEQ ID NO: 194750 - DNA, 994 bp, Cannabis indica
taaaaataaatatttaatttatgtcgcttgtaaactttagatacttacattgttatttacccttattattattattattcaatttctcatctcaatccttactaagagcactaaaaaagttattctacctaatcttttagaatacattactgaaatttaatataatttttacgttatattatacattttttttttatcttggaaataaaaaattctaatttgggacttcctctatagaaccactagactaggcatataaccactacattatattgtacattagcttctataatttgttttaatattatatttataaatattttattaattaaaacactaaaatataaatgataagtaaaaagaagaaacaatgataagatcattgctattcgtcgagatctttgttaaaaaatagtctcttagtgtattaaactaatataattttgacacattaattaatttgagtatttaagagaaaaaaattgtataaatagttaatggagtctaaaaaagtaggtttttaataatataaatttaattatttgagttgtcacactaaaattagtttaatacattatggaacactaatttttaatagaagattttaattcattataaatcacactaatcttaataattttttatagtaattaaattaaaatatgtaatattcgatattaaattacatcgataatattataacactttagattgaccatatgagatttaaatgcacaatatcatataattatttttattttgaacaaaagataaggtaggcataattgtgctcaataacaaacaactatttctcataatttttattgataagcatgataaattaacaaaaataaaagatacaagactacatcatcattttgggattatgtctaatctcaatacaagcaaatgtatgttaggggattaggtttaggagtgatcttatgtttttcttcatggctccgtcttcaatgtataaagtcgaccatcaaga

SEQ ID NO: 194751 - DNA, 1788 bp, Cannabis indica
gtaaaattttttatatttaattatatatacattacatatagttatatttggtatagatgattttcatatattagttgtttataagatattttttaaaaatttatagtgtatatttttttaatggatataaataattggagaaagaattttttggcatatatgaataattaagtatttttcatcaaataaaagattaaaaaatgagaaaattaagaaaagattagataaaggtaagtgatttgaaagtgtcctgtaaccgtctcttatcagcaaagcaaactatgagtcacacaacccatacaaattattaacttttataaatcatcaataaactgaattactggttcttccatttggcaacaacctccaaaaatgctttagtagaagcaccatgagggctcaaagtctttgccgcagcttctttcagtttcccaattcgatttctgagctccttcccttcttcaccctttataagagatttcaccactttggcaatctcctccttctcaacgaaaccgttttccctagccttaggtctaagcgccactttcatctcttcactcaaaacaatagcattcattttctgctcagcatacagtggccaagcaacgactggcaccccattcaccacgctctccagcgacgagttccaaccgcaatggctcatgaaaccagctgtcgaagggtgggccaagatttgggcctgaggggcccaagggtgcataaccatcccaacctctttcgtcctatccaaaaaaccatcaggcaagaaatcaaacgacggcttttcgtttcggtcaaagtaagtggtaccgtcttctttcttgacctggaacggcttcctcacaacccataagaatctttgcccactcatttccaacccaagagcaatctctttaatctgctccaacgagtgggtcccaccgctgccaaacgaaacgaacaacacgctgccacgtggctgcttctctaaccatgccaagcataaactcgacgactccgcatcattctttcttgggctcatattcaccatcggcccaactggataaatcggcggctcggggtttcgtagaagagcctcgatggctccgggctccaactccttaaacgagttaagaatgattccctcagcttcacggaatcttttggcgttaccgagaacgagcttgtaagcgtcgttggttcgatcctggagtggatcgaaaagctccgtgcccggaatcggaacacagccgggaagcctgaccggctcggtcagatgtcggtactcacccgacaccgtttcgtcgaggtgaggcatgtggagaaacaaagacaagtccattgcggtggaagtgtagaagatgtagggtgccacgttgaactctcgtgcggcgtggaaggcttcagtgccgaacaggtcgacgaggagtgtgacgcggctgaaacgagagaccaaagactttaaaatggtgcgaagggaggggagtgagcgagtgacggcgagggttaggaaggtgacgaacttggtgtcttttgggagatcgtccatgttgacaggtggcaagtagatgtggtcgacggagtcggaaggaagggactcgagtatggatttctcggtctgagtgggcggtacgtctgttgggatgagaaacgtgacggagaagttgtggtcggtgaccagtcgtctagcgaaatctacaagcgggtttagatgaccaagccctggagatggaagaatcgctatgtgagcctgaggtggatccatatcaattacttattcgtttaattattctacaatgtactact

SEQ ID NO: 194752 - DNA, 724 bp, Cannabis indica
ttgtagatgcatttttttcagaggtctcaaagctacattaattttccattaaagaaggggactcaataattttcaggttgccgtggagcaattcgcaactcagtgacagtacaaagggtatccttctattggtacgtactaaaattattcaattaattataatcataattactttagatattatcttatatataaacgtgacttttacgacattgactcgtaatattatgattattaacaggtgaataagtacgtacactaaaaccttctattctagaaaaatatataaattataaagctttatggtttcatcattcgttacatgcaaaagttattcaaagaatcaatgttatttcctatacataattatatttatatgtatatacatatatatatgtatatgaacccaaacccaaacattaatatagatcgattaattagttcttaaattaattgggtagttgtcaacttagtggccacggaatgcactcttcaatcccattaccagtggagaatcttaattataatatataaataatgtatataaacatctccatcacataaaacggggaagacaaaaataaataaacatatatacctattattttataaaatgttaatattattttgcaagttaaatgacaaatttcatcttgtatttttaaaatagtactaaattgtattataaattaattttgtcttattaataataacttaatgtaga

SEQ ID NO: 194753 - DNA, 2904 bp, Cannabis indica
taacattacatgcacacgcacataattaatattgacctgcaaattaagtaattaaaactttggttttttagtttattaagcatatattccctattatattgtatacataataataataatattcaatttgagaacatattcccctttatctcatattgctcatttcttttttatatcgtatgttggagttgatgagagtcaacgtgcatgattttgatagataccaccaatttcttgccttttattttctttataaatttcttttgataaaatatgagggattgttaaaagaaaggaagctttatttgtacttcatagttcattcactctaatatcaaataaaataaatttaaattaattttaaaaaattacttttatttttttatttaaaaaattcgcatattaatttcaataatttttttttttcatatatatttttttctactataaattaaatatatattttatataaaataaaaataataaattagtgtacctttataaatttaaaataaactcatatgattttttatttaatttttaagatgtattaattcacatttcaaaatgacagtgataccaaccttgatacttatttagcaaaattacacaccttaatatatttagcatagagcatttttttttttcaatatatattatattttgtttgttgtaggatggagtataatataaatatttttcaagaatgatttataactttctaattttttattaatagaaaataatgttaagtaatatttattaaagattaaacaaaattattttctcagaaaaaaaaaggttaaataaaattaacattttaaaaattatgatatatataatttaaaattcatatgataaaaaaaacaaatgaaaaataaaaaagaaagtatttcaataaagtattacaattgagaatttattatttttgaaaatttaatgaaatataatgttgtcgttttgggaaagtaaaagatgagataaatggaaaaacgacaaagcgtttggcttagttctaacgcaacgcggttgtgttgtgttgtaagggaaacgacataccgagcaaaattgtacggatgatattggattaacactctaattaattcgttatttattgatagtatatgtaataataagtaaaaaatcaaaaaaagaaaaaaattaataaattataaaattcacttcttctgtgttctcttggtcactcctaaacgccccagatctacgatcgacactcttgtactcagtcaccatcatcggttggtggatccgcgccggaggatccttgagtcttgagccttgagccttgagccttgaggttggttacctttcatagatattttaaactttcttctttttcttagaatttatcagagtttaggttcaattcatacgagtgtgtattgtattgtattgtattgtatgggttttcattttcattctgggctgttcttaaggagtggagttaaaataagagtaattgatgtttggatttatgatatctttggtccaaaaatgaaacatggaagaaaataagaatgagatggataatgttaacgttaaggttgttgatgatgttaaggaagttacttgttgggttttatttatttcttaacagaaaagaaacttcttacctttgactttttgatcaaacatactcaatacatattttatataagtgtctaataatttggttgaagaagaagctacaggatctctctggtctgattaaagcttccctgcccatgaaagaaaatcccaacacattaacatttgaattagtcacttcaggatattcaaaactgggtttctttcttcgatcatcatcaaattaagataagattattgtggttaatctggttctgaacgcatagtgagaacaacaatgaggaggagacctggaattggtggcttacagacggcagctgctgctagggtttgttctgaattctcatcttttatgtttttgtttttgtttttgtatatgatatatgattatgagatgagagtagtctcttttcaaattggaattgataattaggatcaataccgagtgcttggagaaaatgtggccaggattcgaactgatctcatgaaggagcagcttgccacttttcgctcccaattagaagatttcgctcgcaagcataaggttaccacctcaatcccaattacaacattcagttattattacaatcttaacttcaaataagtaagggttgatgatgtgtgtgcagaatgatattcggaagaatcctgcgtttagatcacaattccatgagatgtgtacaaaagttggagtagaccccttagcttcaaataagggtttctgggctgagctcttgggcattggtgatttctactacgaacttggtacgattacgaatgtctttatggattttaatttaactaagaatctgtactgtacataaagctgagattaatatgttggatggtactgttgggtagacaggtgttcaaattgttgatatttgtctggcgacaaggcctcacaatggaggtttgatcaacttacaagaactctgcaacctgcttcgtcggaggcgaaagactgatcgagaagctgtctctgaggatgactgcctaagagctataagtaaactcaaggtaatatcataagtgttttttttcacaccttggatttgtttaccgtgtttgttttaggattttcatgcacaaaaaatgtagtgcgttggtttcaggttctagggagtggttttgaggtgatttctgttggaagaaaaaagcttgttcgttctgttccaacagagttgaacaaagaccataatgaaattttggagcttgcccaggtccaagttacttctgtgtttattttcctttcaatgtcacataacttatttgctctaagcattaaatagctca

SEQ ID NO: 194754 - DNA, 1230 bp, Cannabis indica
tctaaaaatttagatttgtttaattaatcgtgatatttagtttaatttctaacctttatttaaaataattttatatttttattgaatttttaattatttttctttattttttaagaaatgagtttataaatataaatacgcttaattttttcttcaacaaatcttagtttgtttaaattatttattgaatttttaacaattttagtttaattttttaaaatatgtgtttataaataaaataaagattagaaatatttttttatgaataatttagattttaagtaaacttaatatttttaattaattaaatattttgtgaggttttcttttataattttcattaattttttcagagttaattagtagaacattataattttaaattttttttttttaaatagaatgggcaaaattttgcattggtcaaagttttaactttgtttctgcttgtaggttaatttgaagttggcctacacatacccccgagcaaaatcaacagctctaaaggctaccacgaccaccaattacctgaagaaggcactcaaagaggcctaaaaagatgctggattgaagggccatcaactgggcgaggtgaacaagcaacttgttgttgcgaataagtttattgatgacttagagcaggaaataaaagatatgccatccactgccaagcttgaagaggatcttgaggaggaatccaagaaggtacgagagctaaccgatgaaagggaaggactccgtacactccttcagaaccaataggccaaaatcaaagaactgattgaggctctcaacaaagaggtcggggagaggactactttgcaggaaacctttattgctaagcgggaggtgtatcaaaaggaggtcgaagagtatgaaacagttgcctgagaggttttctatgaattctggaaggcaaaccttgagggcaattttgactatctgaaggacgacatccgtgctggctttctcagctagtgcaaagcaaagaaaactgaggaagaaacaaggaagactgatgaggattcttctgccgcttaaaatcaagaaaatttatccgctcaagatgatgttcctgtcaccccattggagtaaacctttttatctattcagtctacaagccttttattcgatacagtatggccgaccaagcagattttaaacttggaattatatttacatttcgattaagataaacggctcgctgaacaacttttttttttttttttt

SEQ ID NO: 194755 - DNA, 481 bp, Cannabis indica
gggttcaggattctcgaactctttattagccaagttatattttttatgaaagaacaacagaaaaaagtggaattcaaagcaaaaagtaatatcacaagtttagatagtcgtggaatccaaatagtaagaatatagattggttttttgtccactgctattattattaattattaataattgttttaagtgacaactttttcataaaaagagaattaagcaataataacataattaataataaataatcctcaactgaatagagtagaaagttttggtaacactcttgggcgagcatataatacaaagtctttggattcgatgtgctccaccaccaaacctatccctacttatatacaaatacacatattacatgctacatattctaggagaatgaatcaaatctgcgacttgacaggaactttaataattttttttaaccgtatttaaagaaaatttgtattcatgacgtactttattaaca

SEQ ID NO: 194756 - DNA, 1629 bp, Cannabis indica
tcaaaaataactttattttaaattcaattaaaatgtgcccacttatataactccacattaccaattatattctcacaactacacaagttagagttgaatggagaatcagagtatctttagattatagaggcataatggtagagttgttagaaaaaaaaaagtaaaaatgaaaaatatagaaagagggggagaaaataaaacacaacttaaaagaggtataccatctaatttcctccttaatttatatttattaatttcaaagatatttctataaataacaaaaaataataaaaagtttacaaaaatacaggtttgcaaatttttttatatttttggcaatttttaacttttttattttacaaaaatataaacacttatttcatattgctactacataaaagtaatgtataattttaggtatttgagtaaaatttcctttaaaatagactttatccaaacctcaacaacaaaattttaattttcctattaatgaagaaaaatcaaatttctttaaccagtaaaatttcttctccaaaacttatcactttgtttattttatcaaatcatgataaacattactttatatctcttaattccagcgtctcgagttaattaaggtaatttttttatttaataacggtaaattttgtctaagttagaatttatattaaattctatttttaagaagatatatcttttatactatgatatacctcttattgtttattcatttccaataatttagttattgttaagaagataatttaacgatctatattttcgaaaaaataagcaaagtaacataatataattagagtataattttgaagccaaaaaagattagagacaactatagttcttgatttctttatataaatataattatttgaaaacctaacctaactaacaatgtgggagaagaactttttttctagacacactgcacttagcactagttttcactcttttaactttttatggcaccaaagtatagacacaacttttctattaggttaagttaattaatcataataattataataaattaaacatataattaatcttagccgtaaaattaaagcttggtaaaagacaacaccaaaaagtttataaagaaagtaaaacaagtagtaataatattaattaataattaagaaatattaatcaaagtttgtgtgggccctcttctacgaatattcccatgcaaaaagagcttctcttaagctttaataatcatcattagtacttacttaccactactacactactaacttaattagtaggtgaaagtcaattaattattttgttaattacttacacctctagctgtttaaaattataataataataataatagtaataagatttatcttgtattttatttggagcattaatataaagtattagtagtttagttttaagaattttaaactattaacttaattagtaggtgaaagtcaattaattatttgttaattactttaatgtataaacaactctctaatttgtttagagttgtaatttctagattatataattttacggcctataacgtggttcaattggcacttgcctgtaatataattggtatggttgacttctcatctataccagataatattttatgta

SEQ ID NO: 194757 - DNA, 2157 bp, Cannabis indica
caatagctcatgtcaagacctgaatgatcaagcaatgttaatccaatttctgtaacatgtctatgtctcctttacattcttccattttgctcatgagtgtgtggacaagatagctaaaatttgattccttgatcagttagaaaattttcaaattgatctccttcatcagcttgcactcccttcattggtaggttaaattgcttctcaactagtcttttaaatcttatgaaaacttcaaaagcttgagattttagtgttaggggaaaaattcaagagaatctgtaatcatcaagaaataaaatgtaatatttgtagttgtctttagacacaacatgggaaggtccccaaagattagtgtggataagctctagtggttgagaggctcttttgggggataaggaaaaagaaagtttgtgatttttccctagttgacaagagttatagaacttgaggtttttaagagagtgtgctatgattgaaatggacagtattttgcttaaggttgcaggtgctggatgtcctaacttacagtgccacagatatatattattatgcaaagttttgttatagacagtaggagacaaagaagaaaaaccatctttattgacagaaaaatggttacaatttgagattgcagtagaagttgagttacaacatgtagtgtaatattttgttttattacagattgtattgcacgagtctataccaaaagtggaaagataatattcgagagagtggctagacaatttggagtggtcatcacctaacaagtacaaatcattcatgaggatccctttgagtaggacaacacccgattttttgtccttgacataacaacaagatttgtgaaactcaagaaaaacatcatcatctctagataatttggaaatactaaccaaatttttagtaatggatggaacatgtaagataaattgaagtttttgaatttaaagaagggagagtagttttaccaatgtgagagataagtaatttcttacaatctcctatagcaacagattcctgtccattatagggagtggttgaatcaagattttccatggtgaatgcaacatgattagttgcttcagtgtccacatacccgccagcatcatcactaaagtttgggagggtttgagtgacatgggcttgatgatcaaagccactactttgttctatcagattgacttgaggttgggatgagggttgctttggagttaccctattcttgtcaaatctgtaatgacagagtggtgcagtgtgcccatatttcatgcacaattggcacagaggtctgttagttgaagaaggtctaccatagttttgaggaggcaatcttgatggattctcattattattcattctcctagaggcaaatggatgtctataagggtcatttcttgagccaaattaaggtgagattagcaaccattttagtggaaagatccatcatgaatgtgtgtctttcaaggcgagtctcatgagacatgagaagggcttggacttcttcaagtgtaagggcgtcacttcgagaggtgatactagaaacaacaagatcaaactttgatcccaggccattgagcaaatgaagaatgagatcaagatcagtaatggagtgaccaacaatagctaaagaaccacaaattgacttcctcttgtcaacatagtcagagatgttaaggttacctttatgaatgttggataactgtccttttgagctaaaataacctagctttggattgacttgaaaacttttgcgcaagagccgtccaaacaacatgggaggagttgtagttggagacagttccaagaatcgcttaagtcatcgaggatcgaagccaagaaagtaacaaatgatctttcttttgctattgaagatacataggattgggatcaccactgatgagtttctgtggaggactgatactgctgaacaatatctcatcgaggtcatgtctaatgatcgtggaacaacttgggatttccaagcaagaaaattgactcgattgagcttgattgtaagggaagaagtcaaagaattcgagaaaggattccattaaggagcaacaacatggggtggcgcctgaggtcgagcattagtgacaccaattggaaacgagttgtcgcccatggatgtgagtcagaggtgctctgatacca

SEQ ID NO: 194758 - DNA, 1253 bp, Cannabis indica
ttgtttattttgtattactgctaaaaattataattttatgatcataatgtagtaaagtgggcttttgcccataattagtctggacaacttgctatttcgtttatacatagaaacctcttttgtaacgattagaaagtctaaactttattttaattgaacgtttactttcaaaaaaaaaaaaataaaataaaaaaaagaacaataatggtcattaacctttcaattaactaagttgcacaagtccagtcgtccacttaaaaatctttattcttgtatatagtagatagataagatatgagtcatatgacccgtttagcctactaagccaccaaatccaaaacagtctcccatttccatcaaactaaaatattcatattaaccacagcctcaacaaactccaaatgtatttttttatttaccaagtggaagtggactagcaatgttaataacattattctatcattaataatcatttgaaagataaacacactaaaaaaaaccatgaaaaatattcctaatactgcatattcaattcactgcacatgctcatttcttacactctgttataacttatacacacatgtggcttaggaataaatgtctcttttctatatatgatatgatatatatgatagggggctgtactaaataaataaataaatatatatttccatccataaatttgtatatgttgtaaacaaagttaaaaaagagaagaaaaatcattagatagaataaagcataaagtatggacacatcattgagcagtagtgggaagttgtggaaatgaaaaaaagaaagaagggaattttggcaatcattaataagagagtcaacgtggtgcttcctctctatgccttcttcttatatttatttaattttattggctaataagtatgatcattattagttattcaattcaaatgctaaattcctacattttaacccttcaaaagtaaagttacttgttaatatttttttaacagtgtttctttctttatattattgtgtattgtaaggtgggaacccatggaaaaggagaaaatctaacataattagagcttagatatttcaattatttaggaaattatattatatatttataaacaaaagaataaaaaaggtaaagaaggtaggagaaatggtgagtgagatgttgtgtggttagggtgttgtgggttgtccattcaattttgatttgagaagaggaagagagcctaatccattctcaccacttctcttagctttgccac

SEQ ID NO: 194759 - DNA, 1844 bp, Cannabis indica
atcaaggcaggaatatatacatgaatacataatgaaaatttaatatgtactagatatcatgcatcaaacaaagaatatatcacccatttaatcaaagacaaattaactgtttcatgtaaatcaattgagactcggaataattcttcgctctgtagaaatattattatgccttgtgctaattttcagttctaagaattaattttaaaaaacaaaaaaacatacgaacatgtatcttgaatagagacgatcaccaataagaagcttgaaaggccatacaattattttgttggccgaaatcgaaattaaaagtttgattgggttggtttaaccaatttcattgtttggttaattctgtacaacacacactactaccactactaaaaaaaaacaatatatatatatatatagatatagatgccgagatttctttcgtttgttttcgtacatctagctagttaattaattgacaaagctatattaataagaactcacctaatttggaaattacatagaaaagaaaaagaagaagagaccaaatatgaaacatgtaaggagaaggagagattaagccctggcatcattattaggtagcaagctagctaggctgcgccggtaacacatgagaaggtgaacatgcggtgacttttaaagcgcacaagtgatgatctactcctcttcggagctctgtctccctctccccctaatgatccaaacccatgatgaaactgttcactccccaccgagttatggcgccggtgatgataattattaccacttttcatcatcatcccatcattaatttggggttgatgatgatgatgatcagtcacaaaaaaatcagctatgttgtaaccctgttgtactgggacatgattactactatttccagaagacaaatactcgtattgtcttcgtgttctgttcttcttgatcgccctataaacaagtggtatcagaccctccattatctattataattagcagatcgatataaaaaaaaacatggatatatatacaattggattgggttttttgtttagttatatcgggcggtttggtagcacgtattatcaactttttattatattaatttgtataaatatatatataataggcctatctagttgatgttgaaagagaaattatggacggcatggccttggcttatgttatagcgtgctttgtatattgcaagtccaacacgtcatgcattttgatttcttgactttttgcatagaaatagtagtaaattttggagatcaaatttatatcttatgtaaaagaactatgactgctatctaatatttatatatttataggtatacaacatgataattttgtatttagacgccacccaattgaaaacatatgttttattagttgcattatatatttagctatataattaggccacatattcgtaattatcaatatgttattcttatacatgaatcaaatcaaagatatggatgagtattaagatatatgtataaatatatgtctatatgtgattatttatttattttgagaggatatatatgtatgtatatacatttaattgatgattttcagcagcatatattatatccattaatttgttgacttgttaattaatttgctcattcaccttgccaagtcaaataaagcacatatatttttccaatgggcaaagtttatgcgatcgatttgttagcccctatcaatcaatttctgaaacaataaattattatattattattttacttaatttgaccgtgcaaattaagaagaaaagaaaagagagaaaaaaggtgtattatgaattgatacactaatagaaggcatatattattattattatcatt

SEQ ID NO: 194760 - DNA, 796 bp, Cannabis indica
actttttttttttttaccaatttaaatcacaattgattgattggttttcattactaataatcatctgtttttcatttcaaatttaataaataaaattataatcttccaattcatttttaaaagtaatttatttccttattactcaattcctttttattagcacttggttttatactatataaagtataattatcaacaatatatatggaatatattaaaattagtgtttttttggtaaataatgtttctttattctatgaatttatattttatttgacagaaatgatcaaatttgacacaatttttttttattatgtgatcttattattattcattttcatatatttttttaggattatctataactttttctttaatgttataataattttaaatataatataatataatatctatattttaaattttatagtataatgactattgaacattattttgtaccatgagttttatgttttgtttttgtgtaaattatgacttgttttgtactgtgtataacttgtttatttggtatcatatatggccatttgctatatatgtagtggtttgttttggtatattacatgaattacatgaggtagcagtaacaaaagatctactccacatatatagtaaagataagttttttttcataaaataatgttctcaaatatttttttcaacgtttaaataaaaatgcttggtttaatttaatattatcattaattagtatgttaattaaattttatatatttttatgtaggttcatttcatttactcacttggtcattctaag

SEQ ID NO: 194761 - DNA, 2029 bp, Cannabis indica
gggcttgaaaattatatccaaataaaaatataaaacataattaattaattatacaaaaaaaaaaatacagaattatatgtatatatatataaagttccgaaaattaaatgatattaatattgctctttaaattattgtattatttttatccattatccgaaaacgatactattattctttttggtggcaagtaccgattgcgttgcttttattaattgacaaagccttttattcttcttcttcttcttcttctttatttttattttttcttcaccagaaaagtatagttaggaatgtttattacaacgtgacaaacttggaattatttgaaaaaagaatatgagagaatttacagaagaaaaaagaaaataaaaagaaaaaaagaatatcaaaattggggaaccatatgcatatgaatctatctcctttttcctatttttgtttttttgttgtaattaatgaaaaataaaaaataaataataaaaaaggtaatattaatagtatagtagttatctagttttgcaagttgtagaacttactgtagcaatggtgcgcggcaattggaccccaaccacccccacaagtaacatcacactttaacaatatgataattaagaccaagattattaaaaagcaagctgagcaatacaagaaggttatacattaatattattagtaactagttataattaagaaattaaactgatattatgttttagctaagatttatattcccactaattagtccccatcttctctcaataaaaatatatatagaagaagaaaatagacccttgtataattaaacatatgtataattgtaggactactactactcatcatcaattcatcttgtgatgattaaagaacactactgccacgtggtcccactttaatggtggatgtgctaccccttaattgcatctagtcaaataaagcggctcctaatcctaaatatatatactgtactaaaatattgatatagatagatagatatctccttatatatactaattaagatcatgttattgcttcttatatatactatgtagcatgccatgcatgcatatgcatatatgtttgatcatttaagacaaatcttaaaccccatcacttcgtacaaaatattccccttttgcgaaatgaaacatgaattaattctcatgatgagaacccttttgtgaatgggtaaaggtttgatatatgtaattaattaataaaggccggtattcgctaattattattgttgatgaattactaatcatttagagattaaatagattgaaacaaaggtttgaaatgtggtctagctagcaatttataacttcaagaaaagacaagatcataatttgactagtttaatttcgcaagtttagtccaatataatattatatatgtgattaatccatatagatcacttcattcatcattgctattgaacatatatatgtataaatatatataatagtctggtaaaggaaaaatattcttaagaaaaggagcttagataatagaagaatgatccttaaatcggaccggatacgctagctcttcaaatatataaattaatcttttcttgaggtgattgatatatactgatccatgattaattttgttatattcttttgtacggaccattgtaattaccagtcaaatcatagaatatgaaatcgaataaacaataactagctatttaagcatatgctatgataaaagtactctatgcatgcaggagaagattgttgccgaaaaataaataaattgtaattactaaacaattaaatatatatatatatataaggtgatagggttgtgaatggagagcaaattatatcattaaaactctggtttaataaaagatttcccctcacataatatatatatatatatatatatatatatatcttgtcatgtaacctaaccaaaaagggaagatagagatcatgtgtagtaagaatggcactagcacttaactaattggctttttcatgcatattgaaaatgctaattgaagtgtcaaacattataa

SEQ ID NO: 194762 - DNA, 2221 bp, Cannabis indica
ttggaattgatgttttttttgaaagttggagtctttttgccacctgagtctagctcgagttgtgtggctctattgtttgtaagagttctgggttcaaaccttagctggcttaacaaattgctaactacacactgtttcttatttaaatataagtatctgatgcattctgtttgatttttttttgtcttgattgtaaatggatgatacatttaccacttcgtttcacttggtaaaaaacagaacaaaaagtgtgttcaaagctgtgatattattttcttgtttagataatttggggaaaatgattgtctatgccatttcaacttggtgaagataagtgatatgaaatattaatcatgtgtagctgtgttgttgctaacatctgtgagttactgtatcattcaaaatgctaatttatctttggattacagaacggacttgataccaagattgagaaatcaaggaagcagatgaaggagagaaagaacagggccaagaagatccgtggagtaaagaaggtaaataaaagattggctggtttatgttattggattttagtttttaatcacattttttcttatatttgtatcctcaatttgttttcagacaaaggcatcagaagctgccaagaagaagtgagaatagagaatgtttcgccagtgttgaagctcataagcagcaatgggcgcatttattctcacattaggtgcattttgaaattatatatcttttatatcattgtggatgtcgggtctcaactaatgtttagttttttcttttgagagttttgagtaatttggagaacaattttgtagcaagagatttcaagatatttttcatcattaagctgtgattttacaaaactactcctaagtagcaacagaattttagtgtggaatttcttcctatcgttgttagctgaattccattgtcctatgtcatatgatactctatgcccagtcatgttaggaccaatattattaacttgataagtacgtaatatctcatgattaaagaatggctctatttctcaatggaaaactacttaatcatcgggtattgttgtgttctaacgatataaaattcattcttatcaggcccttatgatatgatatcgtgagtgattgtgttttagcatttttttaaatattgttcgttggaacctaatgtagatacctccagggatttgaatcttgagctatctcacattcaggtctttaagccaactatgacattttttttgttgagaaaattagcctttgaaaacaccaccaggggccgagacctgaatcaatttggaaagccaggccactaaagtgtactgcatttacaacatatatagctaaaacatgtgctactctattattctaggacaataattaaaactagcaatcaaacttattacaagccttaatatcagaaatgattaatcccaagtatagcctcaactatttctggttcaaagagctcacgccaacccattggagcaccttgccaccttgccaaaacctgaagctccatttgatgaagaaagtgaagcataacaattaatcttcaccttgccaaaatgaagaaattggagccactttggagtcccatttgcatgtgtagatacaggttcattccttttcttgttcaccttgaaagctagacagaaaatcaatggcccaataaaccactatatcggtaggaataatcactttctcatggacaatcttgctgcatgggaaccaagttcttcaaaagatcatcataattaattcaatctcacaaataggaagaatggaaattaaattaactatgaaagcatggaaattagaaactggagaaataacatcacccatagaaaaatacatatttggttttggtgttgcacacttgcaaaacaattattttttaaaaaatactaaattatttttattccattccattgtagcattaaaattacacacacaaatatgacatttcgtggttacattggagatgctctaaaaccgaattttgaactcaaaattgacttgccatttgtcaatgcatgttctttttttttttttttttttttttttttttaattttatatatagctttaccaaataggtttgttcttgtgtagctttacctaatgagacttattcgactttctttgtattaaaatataattaatagtatggtcgtaagaatgcttctccaagatgtgccatgaagatcgatctaaacaaagctt

SEQ ID NO: 194763 - DNA, 3001 bp, Cannabis indica
aagcaccactatggctaatacaatgctctttccatatattcaaccaaccttaattcaactcataattaaatatttttatttacattccattaccatatacgatgtatttggctcctttccttcattcatattaggcagtttattaataataattaggtatagatgccttatatatgtatttaattataatatatattattattctttctctagatctctctctaaaagaaacaaaagaaaaaagtaaaacctcttttacaactattagttttttccttagaaaatgatgagaagttagttggttcttgagtagtcggcaaaaattgcttcaattaattaggcacctttcggtcccctaatccttgcatggcttaagccgcaagactcatttcaacgttacagatatatataagcatgttataacctatgattacttcttctaaatcattactaattagtcttatttaattaattttgaaaagtcaaaactcgatccattcacacaagctgtgcccaccttaattattatatctaaactattatgcaatattacataaatcataatcttacacaactatttattatacttatatgtaaatgtgaatatatttaattaaagggtttaacttataattgtttttttttatataaaatcaaaaaaatgacatttataaaattactaaaatcttataattaattaagcttagttatttataagtgtaatataaataccgcaaattactaacatataaataatgtgagacaatgacgaaatttttcatttatatatttttgataaaatcatacaaaatataacatttatttaattattaaaaccattttgttcagcttaacttaaaattcttgtttcattgtttttgacttgccacaagcattcaaattataaagttcttttttttatatgaatgaagagtttacgtaaaagggttaaaaccaaaaaggcgattagaactactagaattgtctaagaaaaaaggaatctgataagtaacctcagtttgactgtacaaactttcaaacattattagatatactatatagcttaagctagtccctattattttttttattttttatttacttacctagaaaaagtgatttttcaattggatataggagacagctcacgtacacgtacacgtataaaataatataaattaaataaaaactatatttttttggccttataaatataagtcgaaagcattacgaacccatcatccaaaaaaacactaaacataatttcttatagttttggttcgagagaagaaaatcattctcatcatcatcatcaaaagaaattaattaagcgattaattaattatgaagaacagcaacggtaattacatgcctccggttcgccattattatggcccaattaatccaaatgaaattagatcatcagagaaggtaagaggctataccactaataataatacgacgtcgtttaatggtgcagagaagaaagaaacgacaagcagtagtaattataaagctagagagtaaggcgtcgatggatatcaatgaaagtgtgaaaagtgcagatgctttcatcgaaaaaagtttaggctaacaactcttgattcagaggctcgattccattgataattaccaccaaatgcttgctagaggcctctaattaaatactaattattattatatcatataatatttattctatatgttttttttttttttttggtttgcttatgaattaataatgtcttaattaataatctccctcttaaggaactttgatgtatattttttttagaggggatatgatcatcatgatcgaaataagcatatattatatgagtgtgaacaataattaacatgtacaacgtaccttttcataataagcaaataatacatgaaattaatattatatgtatattattttgtgaattttttttcatcattatgatatgaggacaggtttattttctcaataaataatgagatttggtctaataatctctttgattagtatagtggacatgattctgaacaaaaatcagatataaattgaaacattgtattcgatacccgcctcctctgcctagctagctgttttgcttaattttatactaattatttcctatatatacaagacgagaatcatttcacatgaattaagttctgttttgtttctttctttctttcttttatttttttcagcttatatgtcaggtctatataattagttacaatctgatggactctttggtatgaagtaatgttttaatagaaattgtaattttttacatttatgtgatttttctattttaaggacaggattattattactatgaaaacaaaattaatctgtatatatatatcttcagttttattattctagttaaatcaaatttttgaacaccataccaaacgcccaatctacaattttcaagtattttcttatttagttttaataatagtaattctttttaccattttaataatctatgtttaaatatatttaagtttttaaggatttaataattcttcttatttttatgtttaattatttatttttataattatcaaaaaacgacaatatattctgaaagagggaagcaatactcaaaaaacgacaaatgataagagggtgaatggtcagcgactgattcatacaaaaacgacataatgatgttttctgttttggaagggcagaaagatgtttccgtttccccccactactttccagttctgatttcttttttgttgaatgaagtctgtattttagcaaaataataataataataataattataaaatttttgaaatagacaagctcaaaaaacgacatcatcatctttattatatataactacgctttttctaaacaaaaaaaaaaaaaaaaaaaaaaaacaaataaattgtttaaacatatattcaatcaacaaatattacctaaaattatttttaacttaatttattagtacaaaaataaaaagtcattaatattaacaactat

SEQ ID NO: 194764 - DNA, 824 bp, Cannabis indica
tatatatatatatatcatcatgagtggtagctcttcgagaaatgaaaagagagctttgcatgagagattgcagcgacttcgagccatcaccaactccaccgctgtatataatcaattcattataatatcttttattttgccctaatagttataaaatttgatattatatataaaattttataaatttataaaattctacagattcagaaagcttcgattatagttgatgcgtcaaaatatatttcggagttgaagcaaaaggtggcaatattgaaccaagaaattggctctaattcctcaatctcatcaattcatcaaaatcacttgcctgtggtaagtattaatgatttattttgtatatatttattattaagtaatattattgttaattaattaattattgttttatatatattttgattgatgatcaggaggttggagtggaaagcattgaaaagggttttgttataaatgtgttatcagagcagaattgccctggtttgcttgtctccatacttgaagcctttgaaaacttagggcttgatgttcttgatgctagggtttcttgtactcacaattttcaactccaagctattggaggagaagtaagtatataaatatatatatataaaaatgttttcaactcatttgtatttagttttaaaattaaaaaaaaaaaaaaaaaaaaaaaaaaaaacaccatcacgtgtgaactaaaaacatatatattattttagaaagtaattaataacaaaagatatattacagtaatttagaaccacatgtagaggtatttcctttttggtgagagtctttaattttac

SEQ ID NO: 194765 - DNA, 1937 bp, Cannabis indica
gtagactaaaaatacatttagtcaacacaaattgtaaatttttgtgacttaatacttttagttacagaccttttagttacaacataggagtcataatttataatttaccacagtttttttttcactttttagtcataaattttgttgtgactaaaagtagatttggtgtagtgtattgattattattttggattgtacactgtagtataattaagcatgcaactttttacttctacagttgtaatggtaccttcacgagtctttcatatatagctagtggggaaacaacaaaaattgtatctttttttcttcttcttcttacttcaaaaaaaaaaaaaataacaaaaaactggcaatgcagcaaatctaaacccaaatttagctagctaggtggcaaagtgtcagtagtggtggctagctgcaataaataacaaaggataataatgggataacgtaggacccatttatttattataataagtaactctatgcattattataatataaagcgtcatgtggagacatgagagcgttatacatataatatttctttcatgtgttattaggaaccctacactatacactatgtatcactatactatatatctatatatgaaattaatatcaacccccaactgatatctatatatttcatctatagaggggtccaaagttgcttctctcaagtaacaaagtgaccccataattcagttgtacttgcaatcacaccaaaaccccataatggactcatcacatggaactatttatttccatgtactaataattttgttcacaggcttcatttgatgataatcataaattcatatatcaatggacaatcgtgtgagtaaagtttgttagggcatcacttcgtaaaatgtaaataatttgtaatgttgaaatttaatttttaaacaatttatttcattaaccttcaaattataactcatatttcatgacacagtatattattaaaaaagaataatataccttaaaggtttctcaaaaaaattaaaataaaaataataatgccttaaaagttctgtaaagtagctcatctattgatactctttttttttatcactttttaactaaatttgtaaagcttaatatacctatgttaaagtagttattgggagtactcttagtagaatttttcttttattatttttttggatgtgaattcattatgtagaaattgtgagttggacctttcagttgaccttttctatattattattttctttgggatatgatcacactctgatttaaattattgaaagatatcagtcataaaaaataccactttagataccaaatcattattgttctaatttaaaatattgatcgagtctcacattttaatttaatagctactaaaaaaacttaacataaactgttaacaccactaatgtgcctagtaaaaaagctctatccaaatatatctttcaagatgatcatgactatttttggtcaaagcttgaatcactggatcactagtggtctttacttcatcacactatatatatctgaatctcaagtatttcactacaatgaaaatatattttttggaaactctatttggagagactcaatctgctgctaataattatagtagtagttgtgaacacaccatgtggccgctaataatcaacggagtaaatttatttaagaagaagtagcagcgactaatatatggggcctttggtatgcatttttgggaaatagacttagattgtttgcaaagtgacgaagggaatctaattaaaacttaaaaaaaataatattattatgtttggttgtgcggaaaagtattagtatgatacttggaaatattaaaattattttgtttgattaatataggaatggaatgtgattttttgtttctttttttttttttatttttagtaaaatactaaataattaacaaaaaaaaa

SEQ ID NO: 194766 - DNA, 832 bp, Cannabis indica
ataaatatgtatagaagtttcaaactgtttccatcaatctttaagtataaaagtaaatagtcatataaagtgatatagtgtcaagatttatgatttagaggtttatttaaaacatttattttatatgatttagagttaatcactaaaggaactagctagcaacatcaaaaacattaatcaccaaaaacctacaaatcaaataatacttaatattttaattcgaaaaaaaaaaagaaacatgtgtatataaccctgatgttgataaaataatttaaagtacatcattttgaactacaaatgttccatattatttatttatttatttaatatcacataggtttgatccttatttcattttttttatagatcatttttaaatttaatcaatgaattaataataaatatgacaaatatcccattaattctaagatagaaaatacaagcatataataaatatatttatatattaattattatatgatcttaactgatattgttgttattaatgggagaaattaaatactatccacaatatatcaatcccatcaatgactgtcgacggaaaactctcttttgctttccaaagaataaattacaacctttcacttgtgttttattcgatcatgatgcatgtatatatatatcactatcaccttttcaacaatattattattattaaactatttgtttttttattttaagattatatatccttagctcaaaaatcaagaacaaaaggaatattttaaaaatatttttttatatgttttattaataattttactgaaatttttatttataaatatacaattttaaaattataaaaaaataa

SEQ ID NO: 194767 - DNA, 1811 bp, Cannabis indica
agtagtggccttaatattctattaactattttgatttttcattattaattagctaggtctcatttgttttctttgattttccttctacatttatagagcaaaatctttgtccattgctcatttagacaaatgtcatctattaaatatcacttattgtgtgagctgttactttcaggcttaattttgtccccgtttgcaggactggctttgaagtgtttttgggccttgaaaaatattaagacttttattctaacaatatgtggtatttttgaaattattacaaaataattgtgtacttttaaaaataatgattttttgtgctcttgggctcattagtgggccccatttgcagacaaccccaccttagcccaattcagcttatagttcaataatttatacaaaatcttgtatttttcttactatgtgcattttgtcattttcttttataattttcatattttctaagttctcacaaccccataattgatgcatatatcatcttgttgatttttcagttttttaattgtgttaatcttgaatttttctatttttacccataatttttgtgattatgttttcttcctttttaagtaaagtttttttgtgtatatgtatatatataaaaaagtgcatcttcattttgtaattttttttctttaagttgaaatttttttcgtattgttgttctggtgttatttttcttaatttagggttttatgaattagtgattttatttataaattttctacgatatattgttatttataagttgttttgcaaatactttcactttcttcatttcgtgtagtgttgtttcgttattgcagttgaaggcaaaaaaacttaattcctactgttaacgaacttcaaaactcatcgaaataggcttgctattcacttttattgtgagggagtaaagataacacaataaaaggtcaaaacaagcacaaaattcaaccaacttcaaaattattttccgagcttcaaaagtcgctttcaaaaaccgagccattaaaccctaatacgaaacgaaacatcggtagaccccattataattgcatagacaatgtagtatagtataatatagatttctcaatagaaatatatatctatataatataagagagaaagatagaaaatgaagcatttaataatttatgtccttaagcataagatcatttaattgtttggttaaaatgtccaaaagatagggggcaatcttcaagtggatcagagatgtatgtctataggtttgtgttgaattggaggcaaaaattagacaatccacaagtttgttaatattttcatattattcatagaattttcatattttcttattagagaccataaaacaacaaacttgtggccttgtcttctctgacatgaatctctatccctacctgtggaccaattccaagcaactcattcactccatttttgagattgggataaaaaaaaaaaaaaaaacaggtaggcctgaaaaaccccatccattcatggtccaaaaaaaatgatgtatgacattgtaatttattattatatataagggtttattatagtttgagatttttcttttagtattagtttcaacttttgtttgaaaatggtaaaattataaatcggaatcgttcgtttggtaaatttgtaaaaagagaaaaaaagtgttgataattttgtcgataataaacttgaaaatggtacgaattttggttgctagttacttgtgatagattgaggactatgcttgaaaatggtaagaattgtaaatcggattcttatgtttggtaaatttttaagaaaataaaaaaaaa

SEQ ID NO: 194768 - DNA, 698 bp, Cannabis indica
tatatatatactatgttactatataaaatgactggttgtaatacattaaattacacactttcatatataattacatataatcaatcttattcgtacgattaaaagtgatgtagtcctcacttatatatggctacaatttaatacacatttaggtgttttctttgtctttgtaattttcttctcatatttaattttagattaatttgattactatgaaagttaatacaattaatttaacagatttggaaacattaaaagaacttaccttattttcaagaattagtttaacatttttgttcttaccattaatagagtaaaaccccaaataagccttttcattaattagagttgttagaaaatcctattgaccgacaactctcccaagattacttgcttcatttgagttttgattaatctttgaaaatggtatatatctttaataggggtgctttatggtcatgctcttaaaccaagtaatccttttcttttttaatccttaaaaaggtacctcatggagccatgctattgtacgaaatataaaatatacactgggagggacaacattattaacaggaagtaaaatttaattaattgagttattagtgatggaatgtgctggactaaaaatatttttttattgttgtccaattttgtgtacttatatatgaccattttaagcttatatataaattaggata

SEQ ID NO: 194769 - DNA, 919 bp, Cannabis indica
actgcaaaattgaaagtgcggacaagtttagaatcactgcttgtatatcttcggatcccccgggcaaaccttggatcttcatgggaatttatgggccgcctgtctatgccgaaaaagaagttttctggaacgatttgggagattatgtctgcaattgccaacttccggttgtgatgatgggagatctaaatggcacgttaactgatagtgactgcccgaattactccagggggtgtaatatcgctagacactcgtttgaccttagaaggacggtgcagagatcagggctcattgatcttggcttccttgggactaaatttacttggttcaagaaaggttccacttccaccgggggcacttgcttaaagagagccagacttgacagggctttggcgtctgttgattggggacttgcctggcctaatgccattgtgagccatctaacggcgtcaagtttggatcacagccctattctgttggatagttgtggtgggaggcactgcaccaaaccgcaatttaaatatgaattgatgtgggaacgcgattcgagagtctactgggttgtcaagaaggcttggacggttcactctcatgataacccaatggtaaacatgtaccgaaaactcaaagttacaaaaaaccatttgaggaagtggaacatatcacactttaggaagctatctactcagatttcagaggctcgttccagacttttggagatagaaagcaccaacttagttgatgaagcacaacattctgaagccaaagcggctctaaatgaagctttagcaagagaagaaacgttttggcgacaaaaatcgagagtctcgtggttgaaggagggagaccgtgccactaaattcttcatggctagtacggtaactcgaagaaggcgcaactatatccaatcattgaaaaa

SEQ ID NO: 194770 - DNA, 1052 bp, Cannabis indica
attttatttatttatttaagaatgtacttttggatcatttgtttctctaaaatggttaaataattacttgaatatggatgcatatattttcagatatgaaaacatgataacttacaaaaaattcacatttttgttaataattacttaaatgatgtattttttaaaactgagaatcttaattttatgcatattgaattaagctaaaatttatatacaaacactcaaaatgatataaactcataaatgtatgtttttttttaacattttaatataatatatgttttaaataaaacaaaagaatgactttaactaattaaattaaatatataattatctttcattatttattctatggtaaagaaaaactccaccaaataacttttatttacaatattataagttaataccctttttaaaatataactagtataattatagaataattagagataaaagtaattaattaataattaatgctgaataatgacaaaaaataaaatagtaattaaactgtaattatcaacttaactaacattatcatccatgtaaaagtaaaaacccactaagtgaaaaatgtacacttttatatatagtggtgactggtgagtgtcaaaagaatattaattacctttcaaaagaaaaatagtaatttattattaaagtatcttttaaattctatttttatttaaatttgtttttttatcaaagttcaatggatttcggcagtgattttcagaaattcgttttattattttctcaaattttgaaatagcatatatataatattctcttttttgtcgttttatatatatttcaccatcgatcaattttaattttattattattcgttttaaaatattacatcatatgattattaatttagtttttggcttttgtggctgccattgccactaatttgaatagtacacgattaaagaattcaatatagatgtgaaatgtgatttttttttttaaaaaaaaaaaaacgtaaaaaaacaaataataatatatatagctgtgtcacataataatgtatatatatgatatagtac

SEQ ID NO: 194771 - DNA, 1633 bp, Cannabis indica
cctttcattattaagcatatatatttttacaaaattataagtacatatcctaaataaatagtattctaaatgcatgttaattattcaccattaaaatactgaagacattaaaatagaaatgaaagtaatcattttaaaaactatacatgcaatccattatatcaaaacaacatattcaatgaaaatttgagtttgaaaatcatatgcttagacaatcaaactttagaaagaagattccccactttcagagctctctgtgtgtgcctctcttgtctctctcatttcggagcttaggctccctttggctctcggctcccctccctctggacaatatgcttttgttcaatatgttcctggtgcacaaataattcccaacaaacccaatgaagaaagtgtagaaagaagtgaccccaaatcgaaatacagtaaatgaaagaaacacattctcgatcggaggctatgaaatgtgacatcttttgagtttcaaaaatcttttgggaatttgtttcagtattgaagttgatcctcactagtccattaagaggattccacgtaaatcaactttccatctcaaagattagagagaggtagagctctatattttttatgataggattgttcttttgtactgttagatcgtttctctgcattcaattttttatttctttttttttttattgactatttttggtttttttggttggaattatagtttgtaatctctaatttttattgtattgcttatagtatttctatgcttttagtgcatgatctctacttttaggtttttcttttagtttttaatatattttatttttatcaattttaatatcaaaagaaaatctgaatcttaatttttaatactttaattaggtatcgagttcccatcaaattctatcaaaatataaattttagcatttcaaatataaagaaatcgcaaaaaataccaaaaaataactaaaaaatcatatgcatataagttcttttttttagtgtagcataatagtatttttacaatcaattaatagcttaaaaattctaggttgaaacctatgacctctttctttttctcatcattctcttaccactaagctagccttagtggcttatatacatataagttcaatgcatatatattagcgatttaattgatatttgacatgagttaaagttttaaatcaacaaaatctttttgtggtcattttgtataacatcaatgagatgtcaaaaaagattgagaagaaaaatggagggagagagaaagatgaaagctactttagaaaaacaatgagaatggtgagtgatggtaaatcttttgatacattttgtggtgtttatttatctatggggatggagatgagagggagagagaagagacaaaagaaagaaaataaagagaacaggtgagttgtgacttgtgagaaggataattttggagaatataaactcaatagcatgtttttaaaataatgatatattatgtgatgattttgatataaaatgtcacatgaatgaatatagaaactcaaaattccccattatatgttttttgaagatagctagtatgtatctgattatggaagaatcatttaggtgtcgccgtgcacacatgcactctcatagtctcatgctt

SEQ ID NO: 194772 - DNA, 1185 bp, Cannabis indica
aaaaaaaaaaaaaataggaaaagaatccgtattatttattctattttttactattttgctagtataatgcttattcatctcaaaaatgaaaagaataatgcattattaaattttatttagttatatttctatgtttataatataatgatttccttattatatatgcattacatcagagtccattgttgctaagttatattatgcttttggttttattattgtagattgtaataagactttgatggagtctttgcattttgttaaacaatctgctaatcgaatcacacattttctttgtagaaattttcaattattgtgttttaggggaaactacgatttcttttgcgattaatttataaatatgattattatttgaaaaaaaataatgggaattaaataattaatggaaaatgaattttttttatttgtatagcactaagcaagcaattaactttgaattgctttccctaaaaaaaagtaaaagcaataaggaaaaatgtgtaggatctagtttattgaattaaactagacactttatattctaatgtcccaaaagttcatttcttttaacttcaattgatactaactattcttttaactttgattgatactacttaatatttgagtgcagtagtgtagtgtagtcacttctattcttttagggaggaaatccaaaataagaatttctttgggccctgtatctctgtaatcagacatatcttttcataaagaaagataaccctacaattcagttctagttcatactaacaataattaaatcaatgaacaacgttaaacacgttttaatgtttttctttatgaaagggcaccattaatttaaagttcatgtctaatacattataatcatattggattttggaagcattttgagtacaaaaaaagaaaatcatacttttcaaataaagagcaaaagggacaatattcctctttggaatattatatataatatcgactctttctagttacctttccaatttgtattggattattttcaagggtaaaaataattacatataatataaccagcttcactaatcaagatcaaacacattaacattattacaatagcacgcaaataataaaataaaatataatcatgttcgacttttttttatgatttcttcataaacaagtttctagatttttggtaatcaaatattaata

SEQ ID NO: 194773 - DNA, 2504 bp, Cannabis indica
catttataattgcaatatcctacctgacaaaagatgaagcataagcagggaactacaaattaacatatggttttgggcttggggctacctacaactacacaagttaagtattgtataggcaaaaacatatatttatatgcatgaaacatgaatcgttagtgagtattctatgttatacagtgagttgagccatgttcttaccagtattttccacatgaagttccctctcgaaactactaacaaaatcctccatggatgccttgtaactctccattcctgggacatgcattgcaagttccaaaccaatactcatccattttttggccacatcaatctggccaagcttcacaggcaatgctgctcggttccaagcggttgtagccagccattttccctcttcaatgggatactcgccgtcctttaaacccaccattattcgataagcttgcttatacatgccatacacagcatcatcatcatctgcatctcctctgcgaacattagctactgcaatgagctttcggacaataagagccacactttgatattctggcaaaggagaagaaaggaaagtagtaaggcactcatttagagcaaaggcagctacttcgagattaggccggggaccctgcatagcattaaggccaatctgaaggaggtatttggtttcgcaagcctttgaattagcaaaatttttcacaacaagtagttgtgatcctaaatcattcagccttccttgtatatcgtaggcacagagagtgtatacgaagaaaaggtcgacctcgaagctgttaacttggtcatcaataagccgaggacccgatgaaattgacttcagtaactgcagccacggtaagaataccataataaagagtaaggagatgttccacataaatagagtaattactaattaaatatagtagcacaagcttaaattctacttgttttaccgcaggtaatatatgtattgataaatcaaacatatatctaataagaaatttgttgttcgataccttccctgctctatctagcagctccatgatttgtttgacttctgtatcagtcaatgcaatcttcctctgatcctccgaagctatcatggcagatacagacagtactattgacttgcagatcatagtattattttcatctactttcccatcatcaaccttaagaccaaaaagttctgatgctaatctcaagaaatcagcacataattgaaatttcatctccttcccactttttatcccaaagttccaagaactcacagtaaaccaattccattctcgtcttccaacttccccttttccaaagaagcaatctggcccaagttcagatgccctattacaagcccattttacaaactttagaatttcctgctcgttgttagattcttgacttaaaatagataccagcgtgcgtagaactacaacttctgttgttggcatggattttccagagacatagaagttaaggagatttgacaaagcagcaacagccacgggaaaaacatggcaagcaatggcttcgtgggctgcgagggaaagaaagtctggactaaaatcaacgcaggtagtcattacttgaatctgatttagtgaaccagcctggtcattcttttgcagaaagattttgaactgcatgaggttgaagaaatgtcaaagatctgaaatgtaaacaagtttaactgttaaataaaagacattgacaaagtgtaccttcaggaaagcagaagctacgttgggttcaagctgcagaaatgccaaaaagcattagaaaatgaacattatctgacttagattgccgcatttgctaacaagaaacagccagccttcaagaccttacgtgcagcttagttaaaaataccttatcagattcgttgatgtattctaaagcttggtcaagccgagagagaccaaggtggcagaggcccaaaactctatagcacttggctcgaagtgttctattctctatatcatacggaatgtaaagcattgatttttcaaacatttccgcactcgttacataatctttggaacgaaaattatccgcaccactgcgaaaacaaattataaataattggaaatcatcaatcggcttaaaagcacttgtatgttaacatattaatcttcatcttatctttgttcacattcgactccaacactaaattaatatacttctttacattattcaaggagttccatgccaactaaactacaaggttagaacttagaaccaccctttgagccatttcaaagaattaacatagaaactcaccaattccatagcaccgcatgcatcgccgttctctgcttcgcagcttcttcacctgagaatagtgctatgaccctttcatctgacactagctctgaaaccacttttgccctcacctttgacccctcgccgctgcttccgtccttaccaaccactctatgagccaccctaacagccgcaccggcactgatgctgcacctacccattagtcccaagaacacttcctttgc

SEQ ID NO: 194774 - DNA, 1546 bp, Cannabis indica
tcaatctcaatcgtacagtaagctctcttctttagtatactgtttgtttagtctttagcgggtccgaacccgaaccataaaccgttatttttcccaattgtcgtttgttttgttttcttttgttttcttactttgctctcttaagaaggaaaatggattccccgcaggggccatcccatccataccatacctctctccaaaatctgaacacataacctctcatctcctcatttggggtctttatatactaatcagacagaatcttgaaggtgggactacaaggactaatcctatcatctccactgcatgagtatttacattttctttttctacaggtttggacttctgggttttcttttgttctacgttttctttgttgggtatcatttgttttgcacgttggtccatcattaagatcctgtcaatgaatataaaatttgagtgttcctgtgtataaagctttcttttaattttttgggttgctttgttcatctgggcaatccttaactctgtgttctgctcattctattgcttatgaccaatgcagtagattctgcatgggtagcttttaatgagattaatacatgtttattcatgttttgtggttcttatataattcggtgccaatcccagtcctgtattttgatatctgtcaaagaataaaaaatgtgaagataaaactactcaccaatctggacttgaatcattgatttgcattggttggcacttgaatagagcctttgagttttcatgtccacaattgatatgcaattcatttaatctcattatggacaatcattaactacagatatattttatttttgtcccaaagttctttgctttatcaagatttttcttatttatgacacattgccctttgtgatatctagtaggacaggttggtaagagaaggagctcaactaccccctgtcctttcttggtgagtgttttattgtaattgatagcgtttttggatctgaatattaagaatataaacatctattttattttattctgatacttgatgtttcataccatactgctcttaaatgtccatgctttttcttggtttgttttattctatccagcaagttgccgagatgtcaagttattcgggtgtagttgtttctgatcagtggcttcatagccagttcacacaggttgagcttcgaactctcaaatctaaagtaagtgtgttaacaaagttattgaatggattctagcagtttttgtgaatttggtaatcaatttagagttaaataagggatgtgttctgctctaatgtgtattttggccccctttttgttctttatttggtcttcagttcacttcaatgaagaatcagaatggtaaatttacagttggagatttgccgtctttaatgttgaaattaaaagcgtttaaagaaatgtattctgaggctgagatcaggggattcttaggtgaccaagtttctgacttcagcaatgagattgaatttgagggcttcctcagagtgagttcatctaaaattctatgtactctcagccccccctcctctctctct

SEQ ID NO: 194775 - DNA, 1104 bp, Cannabis indica
gggctcggcggcagctcatcatcttcagcggagcgagagcagtcattcccttcagaataagaataatggtgcccaccgagctctttcctcagtcgccgagttgttgattgactcgcaaaccagctctgttaggagagtctacagcactggtgacttgcaggttaacagttttttatattatttattaaattaaaacgaataaaaaaaaattataaaatttcatattgtgttatttttagtgtcatcgtgtttgtggagttctcaaatttattttaaataactgacacaaaataggaactcgaactatgtcaaacctaaaatctcgaatcgtgttcgtgtcaaacccgagcgacctgaatatagttgtggttttatatatgagattaattatatatattatttataattaaacagagaattaagatgatgcaacatagttatcgatattcatcgagtgagagcccaatatcgagtgagagtaatgcaatcatagaagggatgaacaaagcatgtcgttacagtccagaagagaaaaaagagagaattgagaggtatagaagcaagagaaaccagaggaacttcaacaagaaaattaaggtaattaattaattaattaattaatttctaaattattattattattattagtggtgtatatagtaattactactttttatctttggacttgaacaatccaatccattatacttggtaaatatatataggtggttaggtacataagaatctatcgtatagattgtactttcacgtctaaattcattaattaaagcataatggctatttgcttttcttttttttatggattttttctttttttcatttttattagttttttagaaattgaaaattttactaaagggagtggactaattttaaagaccaataataaaatagaataattattgtgattttttctaaaaaaaaaattaatatacataagtcggcggccaaagaaaccccctttaattaaaagttcaatatatatcccaaattcacaaaatatatatataaaaactgaaaaatataattattaatataaatgagtattactatttactactcctaacgaaattaaattaatat

SEQ ID NO: 194776 - DNA, 1452 bp, Cannabis indica
ttaaaaataaaattaaatttaaattaattagtacccgattgtatgcatgcctgctttactttttggtatttaagagagttttttagtttaattttttttatgatcacatacgttgtagctatttatgattatattgtaaatttttagaaaattctgatgaagaaatttacaaagtcaaaaataaactttatatattttgttgtaagtgcgattattttctaatacgcgtatagtaactaattttttaaactttatttttgatacagtaaactatttagaatttttaagtgattttcaatatctataacgtatacaatcatcaaaaataattaaaaattattctaaatatcgaatcagataaaaaaatctactaaaaaaatcatttagtctactccacaaattttctataactaatagggtcggttataatgtcataaatataccttctaagaaacctatatgaatataatttttgttaattaatatatttatagagagggattttgctttaagtcaaagcactttttcttattacttaataatttggcggtgaccacgttattttggtccttgtggccatctatcactatcatattatatacatataaattaatatatctttttttaattagtgttttttttaaaaaataaatttatttggaaaataataaaaatgctcttttgaattataacaacaaggaagacgtgatctcacatttccacgccacactatagctatacacatatataattaaagtagtacttttaaattaaaatatgaaccaaaatatattaatattaatgattaataataatattgcttcctctaaagctgagactccccagtccccatcattataataagttacaaaagcaatgtcatggatttatgatatgataattttccaattacaatatattatgaaacaaatgtgattatttaattaatatttagaattatttaaaaaatatataaaatgttaaatatttttatgatttttataattttaattatatatattttttataattttaaacatattaaatgtaaaattgtaattttctcttaatattttagaactatatgtaattacaatattttccctaaaaatattaatgtagatttttgtctccaaatatatttcttacatgagatcattcattacatgcaacatcatcatatatcggtgatatacccttcaaaatcatcattaaaaaaggaaaaaatgtaaatattaaaatttgatcatatttttcattaaaaaaagttaaattttgtgaatgtattaatttgtgtaattaatatttttagtatactagaaagaattaaggattatatatacgtattaattaatttatgaagtatttgtatttgttttcttttaagtaaagaaattaaaaaaaaaaaaaaaaaaaacaaaaaaaacccgtaaataattctacgtcaactaa

SEQ ID NO: 194777 - DNA, 1988 bp, Cannabis indica
tgcacgtccttatgcttcctatggaaaggcatgtcaatgaatccattgatcttctctgagttctctttaattccctaggagctgacaataaagtgtaagaacctcttggacgagactccaaatgtacactttttggtatcaagtttcatctcacatttttagaggactaaaaaggcctatttgagatctatactatgttctccaaacattttagactttacgagcatatcatcaacatatacctccatattcctccctagtttgtttttgaacatcttattaaacagtcgctaatatgtggctctggcattcttcaacacaaatggcatcactttgtaatagtacacccctttatttgtttggaagctggtgtgttcttgatccgcgacatgcattttaatttggttgtagctggagtacgcgtccatgaagctcatcaatttgaatctcaaagtggcatccaccatctggtctaatcacggaaggaggaagcaatctttggggcaagctttattaaggtccgtgaaatcaatgcacattatccaagtgccattgggtgtaggggttaaaatttggtttgccaaccatactagatataataattcccagagaaaatcattcgcaatcagtttatccacctcaccttcactacttctacgcttagaggatctaagggcctccatttttggcgtactagtgttgcatcgtccttgatgttcaaggcatggaaaattatgttagggttgattcgtgtcatgtcagaatggctccatgctagcacatcattattttctttgactatatctataatcttcttcttcaccactagatgtaagtttctccccactttgatggtcatagtgggatatgtatcgcagatgttgaccttttttacatcctctagaggtttaattactctttatatacccattctgaggtccaactatcttcaaaatcctcctggatggcttcagcttctgcttgagtatccatttcgagaggaatagttgttcctcccaaagcatgaacaaagtctagatggaaacattgtagaaactccttgtattgttctaatcacctctggctacaccaacgcacccattgtcatagggaaactttatgcccaagtgtcttatagaagttactgccccaaagtctaccaggattgatagccctagtatggcattgtaagttgtgggaaagtccaccagttcaaaggtatagtgttgaaggtgcaaacattgttttctcctttaagcatgagttagacctagatttttctcataggtatcagagcttccccattaaagccttgtagttgaatggggcaaggtgataagatagctccgtaagcccaattgcctggaatgcaaatttgacaagatgtttgctgagcttccattgtccacttaagactctgaaaactctcttgttggcaatttgggcttctatgactaaagggtccttatgatgaaaatgtacaggtctggcatcatcctccatgaacataatgggtaagttcatagttttaggatgttgggctggtgattgtataactgcacatgtttcccttctccatcaaattccatcaagtatcgtttctgaattttttttgtatttcatgcaatatatagtccttcagagatcgtggctacatgtccgtctactagtggcgaagctagatagggaatggatgggttccttggtctcgatgctagtactgctactgcagcctgggctggtagagtcggtagggtcgaaagttttgatttgggagcttgagagtgacctcctccatgtggagaatttatggtacactactgtttggaacgactaacagtctgtgaacaacaccctatgcaatagagataattgaaatatggacgcattgacccaagtgtccagctcttaccaacatcttgatttcatcctttaagtagatgtgcctcacgtctccatgaaaccttcacatctttcttatttttttt

SEQ ID NO: 194778 - DNA, 1260 bp, Cannabis indica
gtataacagttcataatatatcaacttccaaaaaaaaaataatttcatatatcttgacagaattgtaggataaagtaatactcatacaatattcacttacatattgacttacatattgactatggaaaacgacacttactaaagtatttaatgggtgacgacaaatgttttaataattaatgtgtattctcttaaattaaattcatatataactcaaaactcttcaattttattttattagcttaagtttaattattgttttatgaattataagttatagtggttataccttacattattggatattatgatcaatagtgttcatactttaaatttaaatatgataattaacaattagggtgaagccgttggtagcaataaaattagtggtctcatttatatataaaaaaatatatatagtattttttaaaaattattaaaaaaatatgtatttttatttttgggcctcaactttggtggccctttaccaatgcctagcccgcctttgcaaagacccgccatgttaacaataaataatcttgtaaatttatattattgaattagctacaacatcctctattttcttcaatacttataattaaatttagtatatgatgagttgttagttgttacacactttctaacaaaaacgtccaacttctttgtggaattttattaggtaaataatgtgcttatatataatttattaattaaaccaatatatgaggttagtaaagagtaaaataataataataataataataataatcgtatcaaattaatgggttaagtggtgtggccaaaagactcttgattaataatgtgatcataacttataagattaaaataaacatgcaatgaatcaaattaatgggtttagtgaccaaaagacttttttatcatatgagttttatattttaaagatagtgaatttataaagaaatatatgtatttgtacttgtatagtatcccacctaattaatcacaatattattattgcgacttacataaatttatataaaaaagaacatctaattcatttaattaagtagaaaaaatagaatataagcaaatgatgtggttttgaaaaaatcccaagagtaagagtttatagaggtgtgattatccaatcctataatagtaatctccaaaattaggaaaaaagttggacaaagatctcttattttactattgttattaattattaatatttataaattaatctctataaagtaattttttagaaatggaaatctttga

SEQ ID NO: 194779 - DNA, 1013 bp, Cannabis indica
aaaaaaaaattatcctggagagctgatcaagctatagatgtgtttcacattcaagaattatcctgtctttcacattcaagaatacatatggatgtgttcttaggagaagaccccaataatttacggaacactcaagcacaaattactaaccaacaaattttatccaccaccagtatagcacatacctttcttgttgataaaactggggaatttccctagttagagtaagttaacacatctaacaagaacagatgacttccattaagaaaatcaagaatactgcatgcatccatgcaccctaaagatattcatgaaatacacacatatatatctaaataatatattccattttggaactgaaattctggcttgaggagccattttcccatcttactaaagtcatgcttgtagaaaagaccgacctaaactcaattataaaacattcaagggaacctacctgctaattccagagcccaagccagttgaatatgcaaaaataaaagtctgaaccgagaggtacaaaatttcttcaggtgtgtgatcaatgattgatactccaagctcagctaattcaacaataacatgaaattcagactctgaggtagacggtgattgcagttgtggtgggtcctttaaagaaagctgcgatagaggagatgtgcctgttttactcaatattccaataggttcactctccggcatccagtcactgatcttaacaacattgactttctcctcttttattattgcaatgcttagagctctataagtcccacttgtaacatgcatagattgagcagaaatttcatcaatatcaaacttctgagatttagactggtcatccccatctatgaggagttccaacaagcgttttctaccaagatcttcccatagaaaggaagctgctgaattaggtagaaggaactgccatgaatcattagaaccatctacttgccggaaatgaataggtaaaaacatagagcgattttcaatcctgtaattagaaatttgat

SEQ ID NO: 194780 - DNA, 897 bp, Cannabis indica
aatactttatactcaggtcaaaataaacctaatcaaaagaccaatgtacactgctaggtaaagtgttagagtgaagaagcctttggtaatgtcatttcctctctgtgggctacaatggattaagaaatctaaggacaaagttaggctgccaaatttgtactctgtgaaaggtataaattctgccaaacagaattccctcgagtcacatctaccttctcacagcaattaaaacaagcgcgctcaccaaaaaaaaatatctcattagcataagaaacgagttattcgatatagttatataactaaaaagattgcaaattatttaggagtcatctaaataaaataaaaacaatgatcatattaacaatcacatggaaaaacataagcaattaaactgcttttaaatgggatgtataaggtaacttcgaagaacaatgatattgaaacaccaactctctttgaaaaaaaaaactttttaaattcaaaaaacattcccaagtcactactttatacaaccgtcatttattcaatcaagagtaaactctatattctactactttgatcttgaaactcggagagtagaaagaaatggcagaagtagtgagctacaaacaagtcattttagggccttgatggaaaggagaagactctgaactttctttcttttattttaccttgatatgaaaaaacaagtacaattcagctgcctgctggaaaaaatttaggagaaaaaaataatacaaatatacactgcacaatattcagccaacaaaagaaataaatttatgtttcgggtgtatacacaaaagcacgctgctgagtataagaactagtataatgtaagcaaaaatgatgtctgaccaaggttctgtgctgatgctgatgctgctactcctggct

SEQ ID NO: 194781 - DNA, 1337 bp, Cannabis indica
caattcaatcagatcctcaataactttttatccatcaaaaaataatgtaataaaatcattcttttttagtaattgatgtaactcattatttgttttccatattttataattacatcctataaatatagaaagtgactatttaattttaattgttggtttaataatattgttctcatgaatcggtttaattttgtttctaccaaagagttcataaaaaaatttacagtgttcaaacaaaattctaataaataaaatttacttgaaagacataatattcactacaagtatgaaaagtaggagaagtgaacctctaagctacatgtatacaagtagtaatttcttcttcatcaattctcaaaatttaagtgcaatttaaattaatatacctgctaccagtaatacacaaatacaaaatgctaaaaacattccactacaaaaataatataagggcttattagtaatttacatatggtgtaaaaacttataaatatgtaagtatgtagttattatgtaataatcaatagtcttgtgattcataagaagaaatactctgtaaattatgcaatcctacatcgctaagggaatgtaaagtaagataattctgagactatttagatatgagactacatagttgaagataacttaaatagattaattaatactacctatacatataaaaacactcatataaaaaaaacacaatctctctaagaaaagcattatcttttgaattttttcattatgtttgaatatttcatttggaatgatgatttgtttaactttaaatggaatctaatattatgatgatttgtttaactttaaatggaatctaatattgataatactataatagtgattgggtattcatattgctatcaaaatcaaaatatggcaagaagtttattgtattgttttcttttttaaaaatgaatccaaaatacaaatatatacacgtatctcatatccacctaccaaccaagatttaaacttaacaaaatcagagaagtgcaactaccgtcctcgacaaaaagaataaaaacatacagagagaagagaccttcgaagaagggcgagggtggttggtagaggcagttttaacaggtgctgttcgagataattttttttgcaactggtggttgttatcgactccgtaacactagtactataaattcgtgtttacgaaaactgtacagtcccttaggacccgtttggaacacaagattagactgaaaatgattagattagaatggactagactggacaagattgaattgtgctaaaagtaatcatgtgtttgtttaagaataaactggactaatttatttaatttatttttt

SEQ ID NO: 194782 - DNA, 815 bp, Cannabis indica
tttaagccagaaaagtaggctacttgtgtggtgcatatttcaggagctgcttagctgtgaaacaccttcaagtagcagtagcagtaggagtagttgttgtcatggtcgtcttatcgtccacccaaagaagaggcaaaggtgataagagttgtgtgcttcaagtgtcagattggtgtggccctactttcatttgtggccattcgtatgtgcatcgattgggaaaacatacctgtcttctatttctttgtggccttaaaataatatacgttgaaaagatcttgtctggtctgacggacccctctaattttggaattcttctatcacttactttacctacgatataccctaatttagttttcatttaaatagcaatatttgcaatttgcatcatgactttcagtatttccaaggccaaatgcaggggaggctttaggctataaattatacttaatctgtataaaatcaattaaatataatatcaacctagaaataccatcaacaatatcacaatagtcaacacaaaaactggccttttattcttattagtatcacttattagtacttgttactttatagatttttaatatattttagaacttattaattaacgagtgttgaaagtaaatacataaacacactcaattcattaattaatttatttttaaaacttattcttgatattttctttttcttacattcttaatttattatcttttcaaactgttaataacctaacccccggtatccacatcaggtgtagagctttcaatattctcaacaaatcatttatgctattactattaaagaaacaagat

SEQ ID NO: 194783 - DNA, 1298 bp, Cannabis indica
attaatgtcttacttcttgtgctattgaatatccagttaagaccttcaacaactcaaaccccatcatatagtacaaccacaaacagagttgaatatacaaacaaaaatagaacaaaaaattaattcaaattgttaaagtgtcaataaatgttgctaatttttgctacaacctgctaattattgcaacattgcaagaagtaataaaaaaaaaaaaaacatcgcttatttttaattgactaatattaataatctcatatcgcaacttttatcgctaagtatagataaatatcactaatatctacaacacaaatatccatgattctatatcgcacaggatgtcgctatacattgataaatattgccaaacttcatccctgacttctaactcacacacatataataaaaagttacaaataacgtcgctaaacatcgttaaaaagtgaaaaaaactagaaaatccagttttactacagttgcattacagacacaaaaccatcaaataaaaaagcagaatatttgtagatctattcatatcaaactaaatacaactaaacctaaaaacaattagtaaagaaattacatatctattattttttaagaaatgtgttgctacattggaatttggattggtcgtatgcacttgatgtagagtccagtggttcagcaaagttgagaacttcagcaaagtgtgctccgacaaggttggattgtgtgtgtgactttctagagagagaaacgagaaagaaaggggaaaattttagatgagtttgattttattatttgaggagtatagttaaaataaaatatacaaactagccatatgttttataatatttagaggggtggtatacttagggaccatgcttcatatttaagcatagttacccaattttttttatatcaaagtgtgttcgtttaaaattttggatgtgagtgaaatgtgcacctcagtttagcctccatttaaaattcaagtgtataaaggggtggagattaaccattaaaaagcaagtcaactgtatataggggtggatattaaccattaaaaagcatataggtcctgtcctgcaaaataacaaatttttccaccttaaaaacggtgttaaattttttttttgataaatcggagaattgtattgcacaaacattctttacatcctactagcaccccatcaagggcctaaaaatctatacaagatcagatacttttttctatacatttcatctataaagcataaaaccaatctttatctacactcttgattttccttggcaaaaacatggcgatccgaagcttt

SEQ ID NO: 194784 - DNA, 1595 bp, Cannabis indica
caccacggcgaagccgttcccaatcattccgaatacgcactccatcttcgtcttgcttgatctagcgactcttcctcggcttggagtggttttaaaagcgacttgaacttgagcaacaagttctaatctttatgaaatgagacccttgaaaaagtgaaacccacctcacttcctcttttactttattttatttcaaaaaaaataaaaaaaaagtaaaattaagattttgactataaacaaagaaaaatttggtactaaaccctcacaactatcattttaacttgcactatttgaatgtcttggaatcggatggcgattcacaaagactctggggcattggcttttaccatttacatgactttaatcttgtaatgcttgcaaaagaaggttggcggctctttacatcaccaacttccctagtcagccaaatctataaagctaagtattaccctcggtcaaattttctcactattgaccttggtaataattcaagttttgtctagtggaacatttggcaatgacaagatcttgttaaacttggtgctagacgtaccataggctcgagaaccactactagtattctttctcattcctggttgcctaaccctgccaattcgtttgtgacttccactcatccaggcttacgtcacaagatggtcaactctttattcgatcacagcaacacatcttgggattatgagattattcaaaatatgtttaatgatcgagatgtgtctctgatactatgcctacttttgtgtttttctgctgatgaagattgctgatcttggataggggaaagcactggcagattctcagtaaaaagtgcctataatttactgcaaaagtcaagatccctccaaaagttcaaatttcatttggcgagcagtttcaaatgcgcttcccacctatccagcttgttactaagcatgtgaatatttctccaacctgtctgatctgcaagggccacccagaatctataactcatgctctcaatagtggtcctttttgcctaggcttgctggtgatatgctcaactatctgatttggaaacaaactgtcgcaccctcatgctatgttggacaatttggaaaacatcaacactcaccttgacttcattcaccacacaccaccgctcggcaccatcacctagtaataaaccagtccgaaatgcttcttgatcagaagattgaacagccttcgattgtgcaagataacttccgcaaatgcatacaaaaaaggagcattagttgacttgttctgctacactttttcatttcttacacttcatattgcacaacacagttgcaataatgcaagcgtttttcaaagtatatattgagagtatatttacaaaagtggagcaaaattattgttttgcacatttactgctaaaaaaacttaattagtttatgcctcatacaactcaaaatgttaaatacttgtaccactatatattctcattattatttttaatgaaaatgctacctcaaatttgggcaactttattaatttttgatagttgggcttaaccaatctaaattaaatattttcaccaaatctgaaacagacatgttgaaacactattgcttcag

SEQ ID NO: 194785 - DNA, 1358 bp, Cannabis indica
cccattctaatcctagatgacgtgtttcctaccattatgcctatctagtttggtctttcagatggttttcttgaagatgatgacattaacaattcctaacatttcttgttggaatatcaaggttcagggagtcaccaacccctgttgtttggttggttttgacctaaacaccttttttttttcgtatttctcgtcatcaccctggttgtaaatgcgaagggtgtgatctttaatttctttcactctcaatgaaagtaacaaaatattgaccaagattttcagcaattgaattaatatattattatagagctaaataaagaagtttaagatctgagatttttacgtggttagtgcgttaaagaatcttagttcacaagtcactctattaggatattgtttgctacaacaatggaggtcttcgaagattttagcagtatgtaggcttaagaatcagattccagttacaatgaaatgatagttttatttgcaggagtcatgtgatgggcatgattagtagtccattaggtatatttcaattgtttacttgataatagagttatcagttgatccctctgcatcaaaaccataaaacaagcctaaagtgagtggtaggtagagaagagctgacttgtccacctttgatgtgataagaaattacatgagccacctaaggacgcaagggaaagtgtggattattttcggccgtgaagaggaccaaagtctcagagggtctccatgtccccaccccgactgggctgatggttgaaatggaagccttgaagaagcatgttgcacccaatgtggggagtgaggctacgcctttcgtagtagagctccttgacgtggtagttggtaatgcctctgaattgcccttagagacttgggcaacttgcagcagtattgacgcttttgccctagcccatgctgccaaacaacaagcgattggggcaagactctgaactttttcactttaactttcgatgttgcacgtagctttcttatctttgcacattgcacatgtagctttgttggtggagagggctgctggagaaactggtgcattgatcacaaagctaaagcaggctaaggcaaataattgcgacttgcacaatgtcaatgacacctttctcaccaaacttgctgaggccaagcttcaaatttagagcttgaagaaggagaaccagctgttggaggccaactacgcccagcaagctcgcctcattcgaggaatgagggctgttcacgacctctaccgtgagaccatggagaattttcctgggggagagcttttcaaatcgtccaacagctcccatccttaaacacccgagacttatagccatcttcttttattgtttgtt

SEQ ID NO: 194786 - DNA, 3161 bp, Cannabis indica
ttttcttttttttttgttttatttaatgtcagtttagtattagttgatcattgtggcagaaatggtgaggttatgtgatttgccaaaggaaataattgagaaaatcatgttgtgggcacctgctgattctgtgtttcagtttaaatttgttaacaagttttggtattcccttatctcgggcttgatcaacaacccggaatttgtttccaaacaccttctcatcaccaaaaaccagtccactacatccttacttttcaacttgccatccccccatgtggatcatcgcttgatcacattcccattgttgactataacctataatgatgatgatgatgatgatgatgatgatggtaagaaggatcatttcgtagcatccacagaagcttgtagtgtaccgcttatttgtaaccggttgttgaataaaacccatgaggaggatgaggatgatgatgaagatttcagtgtaatacttattcctgatgcaaggtacaaggatatgaatcaatggagggaggcttatgtatgtgatggactcattttgctagtaaataagttttggacaatggtgttatgtaatcctgctttgaaagaattcatggttcttccacgaccgtacaacaacacatttcaatcggctttacctgctatagtatttggattcgacccagtgagcaatgattacaaatgtgttgcagtttggtgcagttacgaaggattgaaagttgaggtatacacattgggatctaattcatggagagagatcaacacacatgaagacatatgggatgacatacaggatgaaatgacggaagttgaggaattatacggcggtttatgttggggaggtgtttgttactggttggttaaggatccatccggtgaggatgataacatgatcttgagtttcaatttgagtaatgaggaactccaactctttcatgtgccagatcttgaagctttgggcattgaatgtggttattggctccacctttcggtgtggaatgattcagtaatgatgtgtttgacaactgaaaacttaatcattcatatctttaggatggatgaagctgaagaagattcttgtaccgaatatgatgtgaaggttggaccaatacacaatcatcacaaagtgttaccatattggaagaatgatgagattctaatgagtatctggaaggaagatgatatgactaatctaaaattggtgtattgcaacattttcacccaagagatgagagatgtttgtgatatggataagagcatattagatagttcagtttgttcttatgtaaaaagtcttgtttctattaggaggtaagtttgtttgtttgtttggttatgatcctgttagtgtcactaccttataattgttcttaaacatttgtgtatgttgttttggaaagtgatctcaatgtaatgttttgtgtttgtggattgattctggttttttgaccattaattctgtttgtaagttgagaagaagatgctatgaaaggtcgtgctattatagagacatagttactttattgttttgcatttctgctatagaagaacactcacacactatttaatatttataatatatttagtacaattgagttaacatcaattcaaatcttgtaggtaaggtaattatagcttatctggttaacatcttggtcgggttggttggagccatagaagtgatttactaaaagtggaagtggagaactactgtttatttgaattctgaaaccaatgggttggggccatagaagtgatttaacctgggagttttttttggccgttcgtcgagcgcaacacacctttgaaccaattattaaaccaaacaataaggaaacaataagactgagatgggtagaaatatgatgataccagcaaaaagaggaagttgaatactagtgtcaatactcctattgatatgttggaagatatgttcgcgatgcctgctatgcaagctcgccaggagtcatgagtcttttatgttggaatgcccgaggcttggggaaccctggtgcatttacggctttgcgagcagtggtttgcaagtatttcccaagttttgttttcttctcagaaactaaactttatggtggttgggcggagggggtgaaaagccaaactaacttttggaatagtattcacgttgattgtgtagggaagagtggtgggttgttattgtaatggaatgaatgatgattgggaagtgtctgtggaatgttttactttgggccatattgatgcttttgtaaaatgtcctggtgttgaaatagttccccatataagctgacctgtcatagttaacaattatcaagaatcagttagttgatcctaactaacctactcagctacacatctattataaatagaaggattcatgatcagaagacttataacttcatacctgatatgaagatgacgacctaccagatgattactgtgtcttggatctttgaaacttggtgtaattgctgatcttgatagtggattttgactgagcttctttgaggcagctcaccaaggtagtagccccaaatttctggtggtgaaccttgtaaaattgcttaaaacacttttacaaaaatcacttgtaaaggagcttattaaagatttctgtgtgcaaaaaaaactggtaatagaaaacttattaaagattaatgaatcttacgtctccattgtgtgattcgagtatgtattttgtattacttttcttctgtacttaacttttctgtttcaaccattttgtagatcttgcatttgacgttgctgtgattaattgattgaggtgaatccaattcaccacagtttggaccttaataataaaatctgtttatagtataattttatcaccatataccaagtgatttttgtaaaagtgttctaagtcacacatgcataatctgaaaataaaaatcaatagcgaaagaaccatttaagcacacaaaaagaagttgtcatagagagagagaggaaggtaagagcttggctcgagtgaatcgcgagtgttcaatttatcccatgttagaccatttcctcaaccacttgtgttcttcacatgaaatcccagtaaaagatttcacagttgcacgaggccaacccggcttgactgcatcatcatatgtcagcactcccttacacgtttcaggcgtcgtcacaatcac

SEQ ID NO: 194787 - DNA, 1676 bp, Cannabis indica
aattcaggtcattataacttctgttggcttatgctgcaggtgcggtctgcaacactggacacatggcttccagaacaggttgcatttatccaatgtaagacacttgtttgtcgaaattctcttttagtttaactttgtaatattctcttatggttgagaacaatatcctgtgtttcatgcagcaatggggaatgagaaggcaaattctttctgggaagcagagctacctccaaattatgatagagtggggattgagaactttatacgtgcaaagtatgcctccaatagtcaactgggatgcagtttcattttatttttaattaatttggttctaatgtcaaatttatctgttgtgatgttgatgtaaatttactttcctatgttcattgatgtaggttttctgcatgtgcattgttattatagtgttataatctcttgtgttaaatatggtcaactctcataggtatgaagaaaaaagatgggttgccagagatggaaagccaaaatcaccttctagagaacaagaagaaaaggctacaatgcattggccaaaaccttctgagagagttggtcatcgatatacaagcagttctgaaagattatccgacgagaggaagaacattcaaccgcccactagaaaagaaaatgctccagggacaagagtgagcgttcctgtccctcctagaggacctgaacaagtgagttgcatctctttctaacccaattcctgttgcatttttccttctgatgttgaagaactttatgctgactatttatgtaggatgtatggattgttaatttcacttatctaatgtaaacttaaaagcaaggtagctgtagtaaaaggaatttattttcttaaaaaaaggattactattgggagggtcgagagaagcaatctaaaaaaggactaagatactgtttgggacgaggaattcgttgttttcattacttgaaagttgaagagggtaatctaatagttggttgtgtactatgattttaatattaatttatgtgtttggttgtgcattggaatctattaatttataatatttccatataaataattggagcaactatagcagtagggttacttttgttcctacctataggggcatctccattatcgttatttagaaaaattataacttattctttttaatatgatagatctacattataattatagtagacattttactagtttttagaagattctgaatcattaataatgccgaaagtagaatttgaaatagccaattgcgcgtgaagataggcacacgtgcaatttaatatttgagtctgttttcgacactataaattatttttttaaaaaaaaacttgaaaacttgtgaaatatctgttataattgtaatgagtaataattataagtgcaaaaaaaataatgtattatcgtcattttgtagttttatatctaatataaatatgtattatttgtacttatattataagataatagaaagtcatttaaccaagaaactattggtttaaggttttctaatataaaataataataataataatactttagagtgtttcaagttaaacccttggagagttcactctccagggttggaaaaattcaaacctggtaccgaacaccaaaaacgttcacatttccatctccaaattaccaaacacccccttaagtattt

SEQ ID NO: 194788 - DNA, 1731 bp, Cannabis indica
aaaaataaaataaaaagaatatggaccgagctaataccagttgttactacaaaaataataaatgattaataatatatatgtaatatttctaccgtacaattttttttagaaaaaaaaaacaagagattcgatattaaaatgttaataatgtcacaatttcatgagcatgcatatgattgtacatataaaacacactaataattatacataatctttttttctgttaataaaattattgctgactttaatttgggattacttaatattttgcatggaaagagaggattttcatgttaaacgtggatatgatatacaaattattgcacaaataattttataccaaaagatacatagaagatagttgagaagggcatcagaaggtgggtgtaggaatctaattccccaactgtacgatttgcagagactcaatatctgctttcactcattttcatggaaaaagctacccctacccgtagagagattttacttgaaattgaaaaagaatttttcgcagccttagacaacttctcttgtcatcttctgctccctgttatatatatatatatataaatatatatatatatatattttcacactgctctcccacaccacacacaaaatattacatgtatatatatagttgcaacatatgatcataaatctataataattaaaacaaatacatagtgccagtatagctaatatagctagctcttgttaattaacttttggataatatataccattgataattagtttaaagagatgtaactattattattgtgttcgtaattaattcatatattcttttaagcaaaactgtgggggtaggaccctagtagtttactttttgttacaagctttcacaaatgagccactattgtaagggggtcaactgcacgatatcaaaaaagaaaagcaaaggttcttgttatgaacaagctctggcgccatatagcaaaataaagagatggtaccacatctcatctgtcatatatattggctaaaacttttccatttgccagtcactcactgtgactgcttccaaataattatccatattattattttatatactatcactaagatattataattatgatgagatgataataattgtaacatatgtgtatacaaatattttaggttgatataattagtttttttttagttagctaggtaatgtatttttttgtttaatttttgaaataaaatttgagattttgatcttcaactaattttttttaactattgctatattaatatatcatttgaatgtcattatatatatatatatgtatttttaaaatttttaattttttcttaattaagtaatatatgtgataatgcatatgttgcaatttactatattcttaattaaaattcacataacaaaatttgagtgtatctatatgtatgttggattcgtaaatttaatataaatattttttatttccaaactttacgaagaataggtgtgtgaatctatttactctaattaaaacagtaagcaatcaattccttattataataatttaaaatataaaataaataaaaataaagttaaaaatatggtcaaaaatatggtcaaaaatatttaaaatattttaaatttaaatttctttatataaaatatctacataattttttcttttattttaatttaaagttaaacttataaatttaaaagtataattaaaaatatcaatcatattttaaatattttaaatt

SEQ ID NO: 194789 - DNA, 1472 bp, Cannabis indica
gaatagacttgaaagcttcaacaacattaggctcaaaaagactgctccacaaccaagtactcgaagcatgaactgccccattagtatcacaaatgaccacccctgccccagagaattttgaacattatcattagcagcatcacaaattagttcgaaaattcgcggagtaggtttcgtccaccgttgtgccactgcctgttgtcttcgatcatttgtgacagtaataggcctgccatgagcagtgaggtgaattttgccacaagagaatcaagagctgaatagagtctctaatagcttgctttccctaatgaagcttgattaaaaaaagttagatccctgaaacccatattcccatcagacttatgtcaacaaagtttctccaagtgccccaatgtaacttctgcttatgaacactaccccccacaagaatctagcacaatgacgatggatttctttgataaaactagcaggctgcttgaataaattcatggaataagtagggctggcttgaataattgacttgataagcacctcttcccaacagcgaaaaaagaccgagatttccaaccaaacagtttattccaaatacaatctttaagagtctaaaagaggccttttttgctttgcccaatgtaacaaggtagaccaaggtatttctcattacaatcaaccacaagaacaccaagcataatagccatttcaattgcacaggagaaatatgagaatcgaaacacataacaaatttttaaaaattaacaagttgtcctgatcctgaagccttaccgtaccaatcaagaagttgcttgaaacgagaacatgtgaaaatagtagcctttaaaaagaaaaggttgtcatcagcaaaaaatagatgagaaattataggctctgctgtaccacacatgagccttgaaaggaccctgttcctaatttttagttttctagtcatttgtattcagcccacatataggccattcttttatcaataaaattgagaataattctcacaaaaactacatggtatcagagcaattgtagtgtaaatattaggatttgaaaacaaatcccatccatatccttcattaaaaaaagaaattagggtttcatactttgtggtccatccttagagaatcattttagagtgatcctttatcctcacctccgacccagggagtttacccggcctgcaatcggcaaaaccccaaatctcagtgtccatcagaatcacgtgtgggccccacacaccacctccatccgctacaagttccgccacgtgccggcgtgtgtaggcatgacaaccttcttccgaccgtttttttcggcgttcactccatcggcacttcgtgcttcgactctgtctcttcatctggggttgtttgatgatttcttcaaacagatgtatctttgcctaatttttcactcattttattattcaatggctatatctcagccaatcagtatcgttagaatattag

SEQ ID NO: 194790 - DNA, 1407 bp, Cannabis indica
ttttgtagtgttggttagtgcttaatgagttagagattaagagctgactctcttatattattctagtggagaaaactctctaatgggaatatatcttgtttaaaataaataaaagctttttgtttggacatcacttcttaatttagtaaaagtaaaagcaatataatatacaattaagatttaactatacaaaagcacctttcataagtcattgaaaaattggtagttgttattcttcttatcccttttgtactatctctattgtgtgttttcatttttcttctttctccacctttttatttaacaaaaaaaaattgtatattataaaatttaatgtagaaaaaaaaaggaaagttacacctttgacatgttagtaataaagattcttacaagtcaaagtcttatatccatgatgtagaggtgtgttttggctttgttaggcattgcaatatagatttctttgtatataattggaaaagagcaagaagatagtaaaggtcaaatttttactaactaggcaagaagataaaaaaaaaaacaaaaattctttatgacaacaaaataagataggttaggcattgaattttttttaatatcatcatatggtataaaaaaaaaaaaacagaatttagtgtctcaaaatttagtcactacccttttggcttaatattttggaaaaagagaaattaagagaaaaggaaggaaaagatggtggaaatagcaaagaaagagtaaaagaagagatggtataattataatataaccaaagaaaagaagaagtaatttacttacacaaattgtcaaaaaaagagagagagaaatagagaaaagaacaaaagaaacccattaaaagcaatccaaaactccacaaagaaagagaagagtaaagcaatgaaagtattgtagaaagtaaagaagaagccaaaaagtgcattatttcatctgagagagagagagtatgaatgaaattgcaaaagcaaacactgaaacactgaacactttttttgttggcctaatgtcaaagtgcaatcctgtcacgcaaacaaacaaagaaacaaaagcaaagaaattcatttttgtttttaaaagaataaatgaataatgagatgagagagaagtctgaccaaaaaacagactacgtttttgggtgtaatagtgagtattaataggacaacagtgagtcttcttgttttctagtttcaatatgactcatcattcattgccagcaaccccattttccttttcttcttcatttatatcaatcatcactactttcttctcacactccccaaaactccatctttactctttcttctttttcaaattcattcacacatgatattattaacatacacaattaattagagagggaagtgaatgaaattggcactctattatattaagcat

SEQ ID NO: 194791 - DNA, 2011 bp, Cannabis indica
acagagtggactttcgaaactgattttaagattgatatttgagagaaagggacattggaaagggtaaccttaaaataataaggattgttattagatcttagtgttgtctaacactagaagtagaccttaccactagttaaaaatattctataaaaattatgatatgaaatttaatacttaattacattaataataataataatatgttatgttggctaaaataatatatgatttggtggtgttggttgtcaccaccgctaaaattattatctcaatatatagtatatacacttagtcttgatgccccaagatgaatttttattggaattgatatacatttctaaaagtctctaaaattttctagtcatatatcatagtaaaaactacagaaaattaatctagagaaaactatgatattagcatttctagaattacctaaaaactacactagtaaatcaagaaaataaagaattctagaattgttgtcttactttactttgaaacagaacaattaaaattagtcagttaatcggaatgtgtattatacatataggggatatttcaattgagaaagtttgtcttagaaagtgaagttgtaaatcaaaataagaaaaatttaaaaatttgtaatctctaaccatgttctctaaatcactccttaactaaaataaagaatgagtttcaaaaaaatgagtttcaagtttcaaccgtacaaaaatagagcattgttatgaagcactcatggtgtctagtactatgatgaagtgttgtcctataattagttagcgattttctataatatttatttaagtaaaacaaataggacctgatattgatctcattggcgatattatatctcataagagtgctagacactatagatgtcctctagcatttttcatataaatataatagataatggatatgagctctagagttttctatttttctattatttttttaaaataatttatatttagcaaatttaaattataaaatatcattaaaataatcaaacactaactaaatatgaaaaaataaaataaaatggttctctaatttaactttttagttattttagttaaaatttggttaaaaaatagaaaatgtgattggagatccttttagctccctataaataccaagttgaactagtgtaaccaagaacaaccaaaaatcaataaaagtctattaacgtttcctacatattgagtctcccattctttattatatacaccttcaaccaataatcatcaatcatcgtcattatataacactagtcaccaaacacatttcaaagactatcactcaacaccaacaaatcacaactatttactatattccaatttctcaaatcatcagtttttaaaaaataaattaaaaacctcaaattatttatctatgttttaattatttatttgattaacatgaaaaaaaaattacaactagtgtctattacaaaaaaaaaaaaaaaaaagataaacccccaatttcccaaggaaaatccattccattaaaaagtattgataactacctttgaatcactctccaaaacaactttctattaccttcaaaaaatgtaaaattttgtttaataaaaaaaataactatataagcattgacacttcccgctgaataaaaatctcctactcttttttttattattataccaatatcagttggtttgggccactaatttaattttggcttgaaaaggcctactttagcactgtgtacaagtatagactgcatagtacaacaacccttttggacaaaatagtgtacttttggttagcttagctattctctagctgctatattaagaaaacgatatgacattggcgttttttcggatataaatccctgccactgatcaaagtgtcaacatgataaagatcgtggcattcgtacaaatgttatgaatattaattttttttcaaataaatttgtagactaatacaaaaacatggacacgtaacttcaaaaacaagcatacaaaaaaaaaaaaaaa

SEQ ID NO: 194792 - DNA, 1284 bp, Cannabis indica
gccttgtcttggtgtctcatgcatccagaagatacttgtgctatcacaggagtatgttgaaaaagaacacacgagagtaaattacataacaaagatactaaataaagtatatgataaggtttctacggcgaaaccatgaccaattattgaaatgtaacggaagaaatggatacttctagtcttgtctctcctacatgtaagaactgcaccaattataagtttataaatgcaacagtgacaagtaatcatcagtctaaatcaaaaattgcagcatgagcaaaattattgccgtaaatataattagaaatgtttcgtgacgattccacattcaattataaatctaatataccaatggcattgtagacaaacagatagcatgcttgctgcaagatctaaaaatgtcactaaaaaatttaagtgccataaaaggcttaacaaaaagcacatagacaaaagctaacttagcaaaaaaagaaaaagaaaaagtgggtgtgtatgataaaacagtttaattattgtgctgttcacacttgaaagaatattagtgcagagataattcagtgaagccaatcaaagtggggttggtgaacctaaaataaacataacttattcctgtattaacatactggaagcataccctacaaaacatcagaaaccacaccatcccaattagggacctacgtgtatatttcttttaagaaattaatcatctagtgagcaacctacatgaactacagatttaaatccggtacagcatagtcattaccatgtaccttgtaaaataattgcatattaagagagatatttatgatcatttgctaatgtaataatttcaatcagaaagtaaactttttgatactcctaataataagtcccttaaaaatttaggtgtgtctttacttattgatgcacaagtaatcacttgagttgtgagacaaaatgcaatctacgcgtataatatcaatcattagcaatgagtacgtaattactacgaatttataacatacttataccacctaatatacacaagatcaacaactagcaagtctttgaaccactctcaagtttgctcccacgatttgaaattgaaaagaacagccaaccacagtcttgtatctttctatatgttttttctcttcttaaaacatgtgagatccttccagcaaccagtgacacccaacttagtaacagtcacaatgaaaagatcctcaaacttttaagaattctcatatctcatttttcatactgctatactctctcagcacttcctaaaaactacctcaa

SEQ ID NO: 194793 - DNA, 2075 bp, Cannabis indica
atcattggggtgcttcataaataattattgtttgttatattatctctgcctacagtcttttaaactttttgtattcatatattttggtttgtacttccatgttttccaatttgctttttgttttctgaaaacagtttatcgtattatcaaatcggtaacagctgaatccatctgagataaaaatgtttattgtcacttggggctagcttaagtggtgtgagaaggagaggggttcaaatccacattatatataaaaattggtgataaaaatatttattgaattatgatccgttaataattgcttcctttccatctgttgttatcatctttctttttttcttctttcatcaattgatctttttcctttttatttttgcagttcaactgctttcttctaatgccagttgtagataagttgcctgctttacttcgggaggacttagaatctgcctttgaagatgatttagatactgtttttgatatcagcaatctaagacatgcattaggccagaagaagagagatacagagattgagctgaaaagggtatatgttttcttccccttggacttgtgaattgtggccccaacctctttttctccacgtttgcttcaatatatattggtggttttgcagataaagaggctcaaagagaagtttcgatctgtacacaaacagctctatatgaatcaagctgatgtaaaacctggtagcaactcccaacagtgattctacatccggacaccccaaatgaagttcgaatacacattttcaatccttgagataatatttatatgtagttctttaatttaagcttttctcattatattgacaactattatattatgttaattgtaggacacagtaagagtgaccgtaaatttatggattcccagctgctaattttgttattaatatatctcctttcccactataaatctagagttgctttagctttgtgtgaagcatccattttctaacaagagttttaaatggttgcttttatgaatgttgcaactgttaaccctctttttaataccatctaatgtgacagggtgaatggtccagcatttaattggtgatgtcataaaatctatttgaatttaacattaaattgacaaattaaaacataaaatcaattgctacgtgggatggtattaaaagggtgggacaagaggtgagatctctagcataaattatagcaaaatgtacatttttctttaataattagtgatactatggatattttctcgttgatagtgctgtgtattaaaagatttctgtagccgctctttatttattccttttttcttcatttgaatagttacacattgtttcttcaacgttgccatggaaggagaagggcatgaaaaatggatgagatattatcaatgtgatcaaataatccagttacagcagcttagatgaatttatgttttattttttaaataaatattatttttttcacagttttaatctccactttcaagtacaatgtctacaattttacagatacaaatagtagtttaatacttattttttatgtacatgacatgagtgaaatctatatagtaatgcttgtgctcttatccacagaaacccttctatcaaagcttttgaagctattattcttagaagaagtcaagtcatcctactacaggaccgatgagaatcatctgagctactatctgagtgttctatcatgactctaggatgatcgatgtgaatgtcagttgctagtgctggaagattggcatgtcgcaatagatactgaacaatccttctcatacttggcctgcaggcaggatggggatgagagcagagtaggccaagattgagcacaaggctaacttcttccgagttgtagttatccaatgtctgatcaacagctctggtaatgtctcctccacaatgttgttcccttacccaatccaccaatactatctctcctgcattcttataaggctcgattggcctccttccgcaagctacttccagcagcaatgtaccgtaactgtacacatctgtacttggggtggctctcccagttcttgttagttcaggagccatgtaccct

SEQ ID NO: 194794 - DNA, 2333 bp, Cannabis indica
tattaatcattccttgtgagaaactacaagggtaattgtcaatttctgaaacacttgaattatgtgaataagaagttcctggccaaatggtaaatgggatttgatcatctaagcttgaggtttcaattgtcaagtgatcatcatttgtgaccccacagccagctagaaaatagtgatcagaagccatgaaatgatgatgatcattgtgatcagtttcttctgagcaataaatcccattgaagttactccattcaccagctgaaatagcacccaacataggctccatttgttgaacttgattaattaggtagaagagaaaagagggcaattaatgtatttagaatgagagagggctgtatttgcttgatgcttatgaacaaatgacagaagctggtatttatagattagctattacataattaatgaacagagcatttcattgacttaatgaatagaatttcattttcattctttaataccaatcattagcagagatataaattaaaagaagtctcattgttttttaaccaattcacttggtcttttccttatggaggcaatttaatagtacaactaagagagagagacaaagaaaaataataattgattaattaaataatatgtatccttacttgggggggtgatgatgcaatcttcaaaggactaaatgtgtaattaagaattttattagttctgttacttgttaattgttattaatgtatgagtataattcttaattgctcatcccaagcagcaacacaggctgtgtagtgccttttaattggtcagcaacctgtaaatattatcgaacagttaatttttcaggcaagcaaggttgtccaacattattgtatttttttttcttaagctgtaattttaagtacgagaattgttaaaagatattattgtatttaaccccttttcggtgtattgtggataatgtctcacgtggaataaatagtagagaattgagccatatataaaaacatgggttactccactcattgtcaattaattttgagatgaaactccattattctcaacacagtgtcatgtcatagtcaagaacggacacactgttagtaacattaaaatgaaaataataagaagcctccataaaataattataattttaatgtaaagtaattataaatatttttataacaattaagtccctataaataaaattttttgaattttactgttattagtgtaattaagtatgggatgttatataatttaagaaaataatttttaaaaaatatcgttaattaattacggaataccacttataaaaggtgctaggcactactgatgttcaatagtaatacactttttaagtactcgtaagtacaatataagatttcataaatgtactaccatagactaaatgcgtaggagaatatgttaattaaccatcgttagttatatttaataaataaaccaaaaattagagaatcgagggagtactaattttttgtttattatgttaattatattggtctatctgactatctctctcttattttcaacaattagataaataaataaaaaaagaagaagattggtacccccaagtccaacaattctctataattaaagtatttggaacatgtatttaattttaacttaaactgggaatctatttggtagtacattttttcttcaaaattaaatacaaaatagaatttttatgtgtttaatattgagcaattggtttgacccaggtgggaaccctaagcaaatttatattctgttcaggttagtttggtaggttaggttaattacagagcttattatttatatataacatgctagttaagtccaattgacttaaagagtaaaatgcctttcaattcttactccatatataatacaaagcctttggtaaacaattttcacatctggtccaccaagaaatttactcctcctcacaacttttttgggtttaatctcatcatatttagggagtgtaatgtagttactcatttgttacccaagcatatatttttgttcacatatatagttagtgattagggataatcccttttgatgcatgccagtactgctttcactggtagactcaaaatttcgttcaagcaaggacagaataaaacattcaaacaatacaataaatatatatatataaatgtaattatatatatatatatttatttagaaggggtagaaactattttcttctacataaaaaaatgagcatagacaagagccccgctttgtccttcatttggtccgtcacttctgccttagcctttttgtttgtaagtttcctccattcttgtgggagtccatttttttaaagaaaataaaaa

SEQ ID NO: 194795 - DNA, 3452 bp, Cannabis indica
tttttccaagcatctcatccacgctatccattcttggccaggtaatgccatttggccaaactcttatctgaatttacttttgtggttaaatgctaaccgagatcgcaatctgcttcataaaagtgttgaagctgtttgtgcggcagtagtttattttatttggtagaatgagaatgtttgtattttttgagcaaaaatatttttttgatttcttatgtgaatagtttgattagagttacacataaagcgagattaagacttgttaataggaggaatctctctaagagggaccaataaatctttaattttgtttgtaacatgtaagtaagtctgtcttttgttgttttgtggatgctaattcatgtagaatttgctatgttttgattaataaatttttctcctttaataaaaaaaggataataaaaaatagatgaaaatcttcccatatgaattaaaaaatagatccctcccatcaatccaagaacctactccgcccagtttacccaaagcttagccacattactgcccaaagatctaggttcaaattttagggcgcacaccccaaatctgaaattttatatttgaaaaatcacaaccctagtggtggagatcggcgatggcatgggagaaggctatagaaagtggtttatgttggtgatgaagagcttgtcattgtcgttagcctcgctgctcgtcgtcgacgaaatctgaatagatctgccacttgtctctctccctataagtttggcccttgtttgtagacaggctcgttggtcgaagcctcactccacaatggttgtgatctgtgcgtgttggaagtctgacaagccaacctccagttttagattttggatcaatggtggtggaagacggagaaggagagaagacaataaacaaagagcttgaaaaagaaaggtggtatattgagcagctagggatgggcttctctattagtgttgttttcatggccatggatctgtgctccacgaagaagaagaagaataaggagagagcgacgtgaacaatcaagggagaaaacaaataaaaaagaaaaacaaaataaaaaattgaatttttattttattttttaataattttattatttaaattttttaattaaagttattatttgaaccaattaaccttcaacatgtggcattcttgtcagcacttaacatatctgttaaattaggtaccgatagacttacaaaaatggtgaacttgggaactattactgtcaattttcaaggttgagcacttatctgcattaaagtaaactttttggggacttataccacaatttttccttttaaaaagataaagtgtgtttcataatttttgttattttattttaaaaactaaaaatagaaatgtgtcacaattttttttcttatttaagtgaggaatgagaaagggatgttagagaaagtgggttagggtctagggttcaggtttggggtcggggttcggaggctgggcttggtgtataggttcgaactggggtcttactcgaggagctaggggtcatggtctaggttcggaacggttgccggtggtcgcggtcctagtcggagacgggggatggggttcgaggtccggacaaggagttggggtctgggctcatggtcgtaatcggggtctaattgcaaggttgaggtccaaaatattgatgaaaaaaaaatacaaataaactataacggaacaaaaaaaaaagagtttaaataaatttgaaaataacttatttttatttacaaaattttaattctcattttaaacaataaaaaatgaaaacattttctaaaattaaaaatatttttacttttttaattaaatttatataaaatagatacttgctcatccaatcaataaaaatagatatattatgaatcaattgttgttgaataaaatatgatttaccaatcatactcccaaatttgaatttataaaaatattttttttttcttctcaaaaatatgtgcttagtaaagcattttgtaatttaaatttgagtataaatttagatgataactaatcattcaatttgatatagttaaaaattagtgtatataattagtaattacaccttataattattagaaattttcaattttaaaattaattattaaatgatattattttttagttggattacaaactatgtaattatcgcaacagacccaagcacactacctaataaatttgattaattaaattttcactttgaaaattgaccatcatcatttcaactattatatcactaatggtcaaagcagtctaaagtgtatattttttttttatatattttattaaaaaatattttaataaacctgcttgaaaggtgagcattatgaattatttttcacatacatttctctagtttttatctctaagaatctgagttataaattgtgtgtttatttatacttaaactcataacttattttgtcatttaaaaaaagtggtattattgtgtgtttactaacacttttttaatcagttttttatttttaaaagtaaaaaagtgaaaaaaaatttcaaagacatgttctataaaattatttttacttttcaattttttaattaagaatcaaaatttcaaaaacaaaaaaaaatcattttcaatatttttttaaacagttttttttcttaatcaatattttggaattcgatcagacccagacctaaatctcctcacggccctggagctaaattcgacctctgacctgaacccgaatccgaccccaaacctaaacccgacgtaaataaaatcaataaatgaatataaaaataaacgttacagaacacacttttattttctgtttttaaaattgaagtagttacagaacttattattattttttaaaaacaaaaatttttaaaacaaaaattttacttttattttgtgattaaaaaattaaaaaataaaaatgttaccaaaagacacgattcaaaagaaccaaacacactaccaaataaatttattaactaaatcaaaaacccccccaaaacctaacttggcgggaaaatttgtacgcatttctccatagctgagctgaggcgatttctcccaaaatttatatcctagggttttggaaaatgttctccgccagccagccttctccagcggtggtttcatgtcctctcagttggcagacgctggttccgctccggccaaggtacgtaaccccatattacattttaatatacgcaaattgcaaaaaaattacataattcttgtcagctattttaatcaatctcataccaaaccgtaccgtaattaatatcacatcttttcttgtcattttcttaagaccgtgcttatcacattttttttccttctctttctttattgcatttgcagcattttgtttgtttgtttgtttttcttaattttctttattatttattatttttgtctacctctatgtgtaactttctctcttataatttta

SEQ ID NO: 194796 - DNA, 1067 bp, Cannabis indica
aaaaaaaaagaaaaggaaaaattaagagggctgaaagctgagaaagcaaaatgaaattcttacccgaccacaaaaccagaatagccatttatatggaaactctgcattatggtatcattgttgtggaatataatttccatgaatcccttgtaagtaccattaatcacagaaatgtctcttcgaggtggtctattaagaggtctattggggaaatcaagcttataaactcctttaagtttatgcttgtcagcaagcctcattggagtcttgggattgagaaaagagatgccattaagtgtagctcgtcgagaaccaccgattgttactagtggtaaactcctaataacatacgtatcagtgatattaatggagccatagtgaaatgaaccttggggattaggccgagctccactggctgatccattttgcctgagattattaaaagcagagaatttagaacaaagttgcaaataattcaggcaaagtctatgcatctaacagcaccaaaaatggataaagatgactaaaattaaaaaaaaaatacgagtttaacttatctggatcattactattaagcataaaaagtaaaagataacagaaaagttacaagaacaaacctgacactcaatgcttgattcatcgaccttgttttgtcaaacacatcatttggtggatcggggagaggaccagtggctggacctttagaattagagtagtgcaggactgcaactcctgtgaccctttgccaaatagattcatttacaaacctagcactggcaacaatatagtaatcggtactggcattctgatcagtggtcaacaagaaagaataagactgcccaacatgaatatcgaagtcagtgtagttttgttgcatagtatagtgtccctctgtttcggctaaaagtatattgtgactctgaattctgaagtttaaacttgtagaaactccaacgttgtgcacgcgaagtcgataagttttgcctgcacaacatacaagcatcatttcaaacaacaggcaatgaaacatacaattatagagacagccatcatttaaattgtaaagg

SEQ ID NO: 194797 - DNA, 1025 bp, Cannabis indica
tctttttttttaaaaaaaatgaaccaaattatattgaggtttcttatattatttattgttaaattaattttgatccacaaaatatgtttcatccaaacccaattagggtttaacgatattaggactggccattatcactgtcggggtttaagcttcaactactctttccgccatagtttttctcttccaagctttccttgtctccattcaacttttcaggacaaacgagaaatcctattgatcttcctccgattcatttctggcggaaaatttctccttttctccttcgaagttttttttctgaactttgaagcaagaaagggctcaaatttcctcaaatgtacacaaagagagccctaattctcaagctcaattctctcacggcattatcaaaggtatgctatccacgatacacttcaaattttcttgaaaaaaattatcttttgagaaatttcagcactgccgctcgaatagccgattcccaaatcgacaatggctatcaaaatgaggtttcttctgaatattgtcaaaactctagtgggtttcagagtgaaagaccaaactttacggattttgaagacaaagtgaggggacaaggctcaaatccatatgggttttatgataaagaccctaaaaatggttttgtggaaagtacaaatggagattgccagaatcatggcaggggttatagggagagttctaacttgggaagttttaacaatcagtatgggaaaaatggaaacttaagtgggttttatggtcaaaataatggtggaaatggaaatatgcagaattcaagtacttcttatcaggtgggatcgagtgaaatgaggcaaaacttaggtgggtttagtaatggaaacagtagtggagcttatgggaaaaatgagagtgatttgttgcaaaactcaaatgggttttaccagaatcatggtggggtttctagggagagctctaactatggaagtgttaacaatcggtttgggcaaaatgaaactttaatgggatttatggtcaaaataatg

SEQ ID NO: 194798 - DNA, 2722 bp, Cannabis indica
tttttttttttttttttggttcgaaattttcaattagttgaatgtgctctactctacgtaccccatatataattttgaaggcgctgaacaatggaacaaaagcaaagggttagtagtcatttaacttaataataactgcatggaagtttcatacatagtcgatatcagagcaaaagtagttcattttgtgtattatccaggtttttttttctttttggattgtcctgaacataaacacttactttctcaaatagaaaatcatttttggctggggtatatcctgcaggaagaattattgggatatagatcaatgacaatgacaagtttaatcgattcagtactctagcacctttactaataacaatgcgatatgggatacaatgcatcagtactggatcctcttaaaatgcatcaggggttactaacttctaaatattaagaacaatggatggcgtgcatacctaacactttagtagtcaacttcacgggcctcatttcttctccaaacctgtgaagacatgccgaaaagcaaaacagaataaaaggacactagcatacatccacagaggagataaatttatatttatatgcatacatccacacgtatgattgtatgtgtattgtatttgtgtatatatatatatatcctataacattttaaaagtaccttttaactccttggatgggaacctcaagccattcggctgcaattatttatgcaaactgtgagtgtaaattcttgaatgctttgttgcctcaaaagaattatcataaattcaatcttaccaaggtcctcaatatttggaattgtggcagacactgctacaaaacgaacatgagacaaggaactcgacttcaacagaggattccgtgcaagcattttcattctactgacgattgcctccaaagctgctccacgtggatcatttagcagatgaacttcatcaataagtagaagtgatatatcaccaaaaaagctcaatccaccatcttttatgccatgccgagttaccgcatcaaatttctaattacaaagggtaaaataaccatttagccagcccccaagagtatcatctaaatcaaaacaatatatgaaaactttttcgaaatggctgttagaagaaaattcgccctcacttcaggagtggttaggatgatgtctgcttcttgtatattctttatgctgtaagattcattatctcctgtcaactctagacaatttataccccatgatccaaacttttgagtccaatgacgaagtttctcttgaactaaagccttagatggggctatgtagatctgcatatgaaagtaaagaaggtagaagcaataagtagtaaggtagaatttgacgcaaccttaacacaaattatacaccatgtcaaagaacatgaatcttttatcctcttttcaaaggagagcttccatcggatttaattaggcatcagtgcctgcctggatcagggtaataacatacttttcaaacagaaaaacatttctggattgctacaaagatgtctagccccttgtaattggcatcatttcctatcagacttacagtcttaagagttccctttacatgaacaaacttcgtcccctcagagataaaccgagagagaaccctcaagatgcagagctcgaagagtactgttttaccacttccagttggtgccgaaacaaccatgtttatatcggagtggaaacagacagggaagcattcattctgcaaagagttgaaatatctgcatgcaccacatagtttctaacatgaagaatacatcttttggaattctaacctatatcaaaactgaacaattcctctttgtctaatgtgtaagatcacgaacattacctgaaactaaaagtcgattggaatggaagtggtaaatcaaacacagacttcattgaatatggatccataatcacactcttttcttcgatcactgaattgatgatagaaaaaaattaggaacaaagtttaatatatgtaaaatcaaagcagataatgttcaatgaagcgaagaactgcactcgacaaatattattccgaaaagcgaagataattgatacctagttttttactttcatcaaaaaactgcttcttaactcagaattttaaacagaacaataaattaacgaagtaaactatatttattctgtaaagctccttacaattatcacatgcatgtttaaaattcgatattacttcccatttacttggaatttagactctcttatttctacaaaaggaaaatgaagaaaaaatttcacagccgaattacatgaaaaggttcattaattctttcaatgataagatccaaatcaaagaactgctgataaaagatcgactcaatatcgagaatgagaaataaaagacgaaaatcgctgattaatttcgcagattccgcttagaaaatcgattagaacagtgaaattccaaaatctacaaatgtgcatttgttcctgacagttgatgatcttctcttaaatttggcaaaacgatcataaatttctgattgagcacgttgatgaagagaaaataccttgttgaggaggatttggtgctcactaacagtagagaattttagcaggttcataaatgaaattgaaaatgatatctacttataatctgattcagtgagctttggcgggagaagaaccattaaactctggtaggacgcgggatccaatttaaagaaaaatgtatttattattattatta

SEQ ID NO: 194799 - DNA, 2994 bp, Cannabis indica
gcaatccatcaactattcagatgggtcgatataatgagctcttattattctttatttacttcatacaaaaataaataaaattatttggtaattgaccatataatcatgttattaatgtaatgatataaatattatcaatgataacaattaacacacgctgagtatatagcataatctgtatacagctatgtaattgcttattagttatagttctctatgcttattcccaagaaatatataatattagtggacaatgaatttcagggcatagttatatcaagttgacattcttggggtggggtacttgcctatggatgacaacttataaatcatacacatataaactcgatccacaaatcttaaagattacagatatagtgtggttcgattgaaaattttctaagcacaaataagcaaaagatggttcagaacaatctctaaccttgttcatatattgatgaacgctgagtgattcaaaggagtcttagaactgttaggctttgaaattcactgcaagaaatgatgatgaaaaggaaaatcatggcctctaactcttaatatgacagcagattcaatttaaggatgctttccaatcaagtgtttttccagcaaacattgggacgatttccccaaatgagaacgagtatgaatctggaactttccaaggactcttgctcaatgttatttttgaggtgtttctagggagtccataaaaatctggcccattaaagcttgtaaatgcctctagcttgtcaagagccccagcctgagatgagcaatacagagatagatgtaatttgaacaacttactataatctaaatacatgaaactggatcatcatgtagcaaaaacataattctgctgcagtggaatgactttattatacaaacaagttggggatatccatcacaacaacacaaggaaaactatagcctaagaattatgtaggaggctgatttggaagttgaacccgcaatcataattcataccctggcataaaaagtcctatggaaaaggttaacgagttgacaaagtgaaagtattacctcttcgaagactttggcatatgctgatagtgctacaggagagttgtatataccagcacacccacaagcgcattctttgtttcgtctatcatgaggggcactatcagtacctaggaaaaatcttttactcccactggtgacagcggaaacaattgtctgtcctaaatgagaaacaataatgaatcaagcaagtgaaagaaacagactaaatacaaaagtttaaaacaaattcatcctgttttgatagcttaaaactacttgggagtttaaccagataatataattacttgagaattattcccagtaaaaagaaaatattaatatcttccagagtaactagatacttcacagcacattatttattacctacgaagaagttaagaaggacaatgtgtccattcctatctacaatgaatgaaaagttgaatagaactcactgtggatttctcttttgaggactggaagacaataattatgaggctgtaatccaccttggaatatagaatttctattgagcaatagatgctgcggtgtgacagttgctgccacaaatcctaacgaacaaaaactaaacaaagtttagatttaaaacaaaatattagaaacctgaagtactacttggtgattaaacaaaccttctttgcatgactccacaaacttaacagcatctgcagtggttatatgctccatcacaactttcagcagaggaagcctctggattaagggtcgcaaaatagtgttaatgaaaaccttttcacgatcaaatacatcaacttcaggatcgtaacctccccatgaacctgaaatgaaatagagcatgcactgtgagtttgaagaaaagacaaattgtaccaaatgcagcgaaaacttaaacaaaacataaacgaaaaacatcagatgacacgattcagaggatgatccattatacgctcacttaaacagtaatattaccagcaaaggcatattctgctccaccatttgctcaagtacaggtagacatttcccaaaaagatctgtaaccccatcttgagaatttgttgttgcccctgcagggtacaacttcacaccaaatacagctccacttttccctgccagtgtaatcatcattgtcatatgtgatataaatttcaacaagaagagcgggtaaagattcagtatgctggaaacaatttgaaatgcaaaatttaactctacttgaaatgtaaatcttgagaaaaatgtatatgaattgctatatatatgttagacttacttgcaagcttgatctcattcggactagttgtatctgtcaaataaagtgtcatgagaggagtgaagtcactaccagcaggcagtgcacttaagatggactctcgataagccacagctgcagctgttgtagtgacaggaggcttcacatttggcatcactattgcccttccaaagtggtttgcactgtgggtataattgacgtaagactttttctatttatcactgtaagtcaacccaatagagagcataaataaatggttaacgatgcaaccaaaccatgagtttttttatcaagtcacctgtgaggaataacagctttgaggaggtctccatcacgaaggtgaagatgccaatcatcaggacgcgttatagtgagctccatccttattcccttgcacttcacctggttagatctttcaagctttccaggcagaaaggcctgtgttagaacagttagtgcatgatgaaacccccagtgaaacaagaagtaatatcatatgaaaccataacagttcgttaatctttagtatgaaatatttttcgaaaagggtcaagttcattaaagcatctaagatatatcccaagctaaacttgagattttgctccaagcatccagaaccattattcagcaaagtttactaagatataattaaagcagtttacaaggaataacaggacaaatatagggaagaaaga

SEQ ID NO: 194800 - DNA, 914 bp, Cannabis indica
aaaaaaaaatggaatctttgtaggaatcattccaagtttagaagggtgtggataggatactctatatggagccatagtataaggattttggaccaatgtttaagagagttaatggaatagttattatattattgatattgatttaaaacccaaaacttactatagtgatgtgataattaatattggatattaaatgttgggttggtacataataataaatgcaactactattttggaattttataactcatttgaccgactagctttatgttccatccatatgtgtgacactaatgaggggacaaagtttaatttacaagctattttaagttctctctatagttttgtgtcacctataggctatagctcaatattgaaaaaataattcatttgtcttcttcttcttctaattaatattaatattaatattataattattattaaaaaaacccctctactttccaaaaataaaaaagcttgcccttttcatggcatttgaacttaaggcatatagttcctaagagcaaattacaatatggtattgtatttgttataaatgcaataattcaatttaatagtgttgggttcaattcaagctactgcgaaagaatttatcgaaagagtggaacgagctttcttattaaaagctttaaataaattcttaaagtaaattagtttaagcaataacacttatctctgtagaagtagaaccaaaattttacttggtataattacaatatgatgatatatttaactgactaaagctagttgagatcgagaactttcttatcatgcaactcctttgcttcaaccagcatcatacttaggcccgatttggatattcttttgtttttaattttaacttttcaaaaagtttttcttggaaaaatttctaagttaattttttgttaaaa

SEQ ID NO: 194801 - DNA, 1962 bp, Cannabis indica
ttttttcaacaattataagtctgaacaggtcgttacactagatgcaccacactcctggttcatacttccttcagcacctccattgtatcccattaatgaagcagatcatgggactgatctcatatcatccactacaccagcaactcaacaacttgcagaaccatctccccaacattctggttcgactccacaacaggtatgccactttgaccttgataataacacctctcactcacccctgcaccagctgtcttttgatgaatcacaggccactacttcggttgatgcacatacgtcttgcaacacaccaccagctccacttcagccatcacatcctatgataacacgagcaaaggcgggaatttttaaacctaaggtgtatcttggtcatgctcaatttgacctctcactccatgaaccttattccgttgaagaggcactttcacatgaggggtggaacggtgcaatgcaggatgagatggctgccttgcgcaaaaatcgaacttgggttttggttcctcgatcggctgtcaccacaccaaatatagttagatgcaaatgggttcacaagctcaagtacaatcgagatggaagttttcaacgcttcaaggcacggttagttgccaaaggcttccaccaacgaccgggagttgattttgctgaaactttcagtcccgttatcaaagcttccacagttcgtgtggtattgactattgcagcgtcctacaattgggaaataaggcagctagacgttaacaatgcgttccttaatggtgttcttgaagaagatgtattcatgatacagcccccaggctttgaagatgccactaaacctcatcatgtttgtaagttgaataagtcaatttatgggctaaggcaagcacccaggtcatggtatgatcaactcaagaagactttggttcactggcactttgaaaattctaaggcagactcatctttgttcatgatgaaaacatcaaagtttgttattatggttcttgtctacgtggatgatatcatagtagcaggtaacaactcggctgaaatagaaagcttcattggaaaattcaataagatcttctcattaaaggatttggggcagctgcattacttcttgggaatagaagtttttagggatgatacagggatctacttgtcacaaaagaagtacattgctgaactcctacagaaacacaacatggccaacatcaaaccgagtccaaccccgatgacagcaggaaagccactctccattcatgatggtgatcaacttgaaaatccctccaactaccgtagcatcattggagcattgcagtacttaagccacactaggccagacattgcttttgcagttaacaagttgagtcagttcctcaaatgtccaacaaccacacactggagtgccactaagaggatccttcgatatctcaaagggacaatgcatcacggtcttcatattgctcccagcataaatctgaacttgcaaggtttctcggatgccgattgggcctgctgccccgatgatcgaagatcggtagcaggctattgtgttttcttaggagattctcttatctcatggtcgtctaagaagcaaacagttgttgcaaggtcaagtaccgaatctgaatacaggtctttggcacatctagcagcagagttgtcctggctgcaagaattgttgcaagaaatgaacttcaaaacgtcaactacaccaataatatggtgtgacaacatgagtgcaagcgctctagcatcaaacccggtgtatcacgctcgaacgaagcatatagaactcgatgtgcattttgtgagggataaagtcctacaaaagaaacttgagatacgctacatcccatcacatgatcagattgccgactgtctaactaagggcctctccccaactcgtttcaagttcctaactgacaagctcggattgacggagtcaccacttcgcttgagggg

SEQ ID NO: 194802 - DNA, 2527 bp, Cannabis indica
tttttttgagacacctggattaggtagaccctaaccgcggactaccatagcccaaacccggactagattcaaattcctacttttattctcattctcattcttattactaattctattctgatgtattcattccttccgaccgaacgcaacctaagttttttttttccataactaaaagtactaataagttaataattgtatgattacagagtccaatttccttaaaaagcagtggtttcaaactcacaagccacactaacttataattacttaccttcttgctgagtggactctgctaattttatgttcatcgaacggaagatcatgaagaatcataacaacatcatcaacccctttgagaatctccagttcttcgtaaggttcatcaccgcgcaaggatacaaccaaacgcgtgcctggaacaaaatcggtatatattgtattattagtcagaattaggatatatacatcttccttctctagctaaataatccgaaagttttaccttctggcaaaagcttgtgtgcaccagatgataactccttaagatttaccaaaaccatagcatttggcaatggctttgttagctgctccgacaaaggagttatgacccccatacttatgtctatcaatcttttgagagctaatcgctgatcgattaaaacaaaaacatattaagacgcgaagaaaattagaacacagatcatatgactttgtctaatacgaaaaaatgcagttcggtatatttcttacagcgttgtcatcgtcaataggtggaagttgtctcaataagatggagtctactgttgccagatcctataatcaattaaacgaaaacttatcaaatggatattcagctttgcgaaataacgatttcacacggttataaaatggaaaatatatagaccttaaatggcatcccgacgacaagctttgctgctagtgacctgtataggagctcgggcatctggaaaagggacagaaacagttatattttcaggtttctagaatcgtctctcccgtgcccgaaaagaggacaaaagaaagaaaatcgaaatggaaggatgttgtgcttttgtgagctacctttaagttattgagagacactgacatgagaacagaaccatcacggtgcagagcacctctatagtcaacctcatcgccctgtaaaaccgaagcatcaatttctgttaaaaaagttttaaactttgagcaatatgccatgcgaatctctcgatattaaaggctgacctccttctgtagaggcagttgaccagttcgtcgttgaaaatcaaaataatgcctgtgcttctcttcaaatggagcctgaagcgaaatcatattatcgagaaagttgaggtagtgtactaaatattgatttgaagagaagtctttaattaaatgaagggatttgaagatcttaccactccttgctgaagatcagctgcttttgtacccaaattggccaaccttctgcagggatcaatttcctcctcgggcggttcagtgagtgaaaccctgatagtatcacccaaaccatcctgcaaattcaattcaaaattcaattacaccagctatggtgatatgcatgacatggatcttgcttaattataaattgtaaaaagcgttcgaaacatagtgatggcttttaggaaaacaacagaccgaaatcaaagaattttgatggctttaaagttcgtgacatattgaagtgcagaaatatctgtgtaccgactccgttgatcgtgaatcagaaatagaaaggtacctgaagaagggtcccgatgccaattgcagatttcattcgtccatcctcaccttctcccgcttcagtaactcccaagtgaagtggatagtcccagccctggacatacatttcagcaacaagtagacgatacgcctgaaccatgacaactgggttgcttgctttcatcgaaaacacaaaattatggaaatccaacttccggcaaatccttgcaaactcaaatgcagattcaacctgttcgatggtgaatgccaagccaagtatcaccattaaattttgttgtacaagaaaaacaagaataagaaaaaaaaaatatttaccattccccttggagaatctccatagtagctcatgatacgatctgaaagactcccatggtttgtcccgatacgcattgctctaccatatttcttacatttctcaaccaatggagaaaaaacctggtgtgaagtgagaaagaccgattttgtttcagaaatagaaacaacacatatccatgtctcatacaaccgagaaatgaacatcacaagttcaatcggggcaatcacatgtatgctaaaagaaagcttcaatgaatttatggacaaatgatttatttacataaacaatgatcacaaatcgattatgaatggtatttaaacctgctcaatatgctcaagttctttctgatagtcgtcgtctgtgtactcaagcgtctcaaaacgtgagtcccgtcgtgtcagctgtaaacaaactgcttagacgataccagaagaaactgcc

SEQ ID NO: 194803 - DNA, 1220 bp, Cannabis indica
ttacctttcagcctaacttgattgttaaagtgaactcaaaatcattttaagccaacatccgaaaacaacagattaagatcaaactacaacgaagaaaagatggaaagaaaacaaaattgaattcaatccttacctctagatgttgtgccgcatcagtactcaacccaactgtcgcagcagccaaccctatcaatcctcccttcacaatttagtaaaaaaaaaaaagaaatacacttaatactcaaacagcacactcttaacagccatgtgagaccacaagaagatccaaatgcccaattccaaatcacctctcattcacataccttcctgtgattcgcttgaggcgaataagtaaattcatgagtcaaaagattgataattgccgcaatcttatcgtgatccgcattcgaagctaaactcttcacaacattctcaacctaacatacacaaaacagtacaaaatccaatcagaagatccattaccaaaaaaaaaaaaaactcaaaaaccctagtaaacagaaatcaaacctcaagagcagcattcttgcgtttctcataaagcttatccgcaagattacgaagaacaaaggcgggaaccacagataaagcatcagccatgtgaaaaccctaactgattcagaactgaattttttctccaactccaaagatgaccgaaagagagagaaaaaaaaaaaaactgagattgagtatgagaacgactccgtgaaaatcaaagccgttttcggatcttttcttgctcgagtcgaaacatctctatctatctatttagggttttagaattttggaaaacactactatttttttttattttttttttccaaaattagaaatcaatctcagtcttaattttccattatagatctggattcgtttccaaaaaaaaaaatcgaattattacgaactgtgtaaaccctaaactttcctttttcttctcttgaatctccttcttcttcttcttcttcttcgttcgtctttattttattttattttattttttaattaaatttaattaatttaatgggttctttttggtctgttaagtcgtccagtctgtctatctgggtgcacgagtgatctcggaaggtgctaacagagagtcaaagtagaactgttctgaaattacgaaaatacccctgtcctaatctatgattttgttgtgttttgggtatgtctaaattcggtattttaatttttttttt

SEQ ID NO: 194804 - DNA, 2219 bp, Cannabis indica
ttccaagttcttcacaccaaggtggttgtggtgcgccaaagagttggttacatactccgattcataagcttatcttcgattttgagtgccaccatagcatacttcttaactgaaaagaaaggtttcaaaaggattgaaatcattcttagttattctctgcttattggagccatagtccttgacaccatatcagttattaagctcattttctctgattggattcttgtggtgcttaatcacacttggaagaggtatgttccttcaattatcttaaaaagaaaaagatggtccagattggtttttcaatataatatgattagctattgtttagatgagcgaccaacttggcttttcgatttctctgagctttttcaccttagggaatttcttgacaagctgaaaatcatgagattctcgagctcatataaggtcacagaagatctacaagaattcatctttaaaaatctgaaagaaaaatcaaagaaggcaaacactttcaaagaagcaacagaggcatgtatagaaagaggtggtttggctcttaaacagagtattggtcaagattttgctagctatatcaaactcaaatggagcataagcgagtttcaatacaccgaaagcattcttttgtggcacatagcaaccgagctatgcaacgaggacactaaaatttctaataatgataattataaaagcaagtctaagattctttcggagtatatgttcattaaataagaaagtcgatgggaatcacaagggattaccctccccttgatacaaaatagctaaatcgctagcaactctagcatttttagcaatgccgtccgctaaagcattaagactacgattgataaaagaaaaacgaacaactgacagagttttcaaaacattaacaatagaaaagaaaatattcgacgccttccaatcaggagatcttgatcttgtaattaaagattggactgcaacttttgcatcagaaagaactagcacttcatgccatcccagctccaatgcccaagttaaagcaaggtgaattgccttgaactcggcttctagagctgaagccgtttcacatttgagggctttgacgaaccaggcaccagtagtataatctactgcaattgcagccactcccgcgcttccccttacccatgaagcatcagtaaaaaaggcatggcaaactcgattgctaggagtgttgatacctgtcaactcgagactaacagcaggggtagatgtgtctccagtcaacccccattagagcgattcaagaattagaactaattcaaatctcttgggcatccatctatggacttatgattcttataagtgtactttgtctttattcgcatattttttgggaaaaactattctaataggacaccaaaaaaaaagatgcattttattagcatatttaatactcatcaatccacttgagacattagttatttaggtttatacatatgctcttagaattatcacacttgacttttctcaaataacgtgagattatacaatttacctgatattttccttgcggatcacataattcttactatcaaatatgtaatactaaccctgactctaccattcgaccatgatcatgactcctagttgtctcctaatccttacttgatgcaggagacggacttgaactccaaccctgatctagactcaaactcgaaactaaaaccaaacctagacctcgaaccttgactttaaccctacaccctgcacctcaaaccctgagactagatcccaaccctgacactgtaccccaacttcggacccaaactctaaacttggatctgtaattgaaactcaacagtgaccatagtgtaccctagacttaaaccttgaccttaaccctgacctgtgacccgaacatcgacctcgaccctctataccaagaccaaaacccaattccaaccttaattaacactgagacaccgaccttgaccgcaatcacaatttttctatgatacaaacctaagttcataaatatacttcaatacaaacgtatatagatcattaatttattatgcattgaataatagaatttgtattctattaaaatttatgaacacaataattaaacgatgccaaattcaatccaaatttagttaaatgattatttaatttaatatcctctttatatgtcatgtcaaagtaagtatataaaatagtatgactttcataaaactaaataaataaatatg

SEQ ID NO: 194805 - DNA, 4096 bp, Cannabis indica
atggctgcctatgtgatgatgtcctggtaattgttgcaagggtttaaaggctacaacatctgttaagacccttaggaccggaattcattcgtggatatgctggctaaactcgctacaaacttggagatcattcaatacggagtagtgcctgttgccaaccttaaaacttcaagcattaaagcacaggagtaaacaccattgttgatcattcaaactcctaaatatggcccatctacaagttcttaagtttgggagagcttccggtagacaaagctatttcccggaaggtttagtactaggctccccaatatgtgatactagataggaagctttaccacaaggggttatctgtgccatacctgaggtgcatggctgggactgatataagtgttatcatacatgagattcatggaggcttttgtcgagatcataattctggacaaagcctatccaagaagatccttcattaagtctacttgtggcccataatgaagaaggaatgtatagaatatatccaaaaatatgagcaatgtcaaagatacactaaggtttcgcgagctccaccgatggaatcacactcatgagcagtccgtgacccttaactgtttggggaatcaatttagtaggatccctccctactggtaaaagaggagttaagtacgtcatagttattgttgactacttcaccaagtgggtggaggcgaagcccatgaacagagtcacctccaagaaggccttggcctttgtcatcaagaatatagtatgctgccttggacttccacacaagattgtctcagacagtgggaagcagtttgatagtgatcacttcaccgacttctataatcaacatagaatcgtgaagaggtttttaattgtggctagaccacaagcgattggacaagtcaaagccgtgaataagatcctgaagacaaaaatgaagaagaaactccaagcttgtaaaggccattggccagaggaccttccgcgagttctctgggaataaaaaacaacatagagaacttcaacagggcataccatattcgatgacctatgggtgtgaagcagttgtccaaatagaaaccacaatcctctttcatatacgagacacttatgaccctacccaaaaccattcattgctctaaaaatcattagacttaattgaagagctccgagaataatcacaagtccaactcaagatgtaccaaggaaagatcgccaaacactttaattctaaagtcaaaagtcgtacatttaacgttggagatctcgtcttgagaagagtcttcccagcttcacaagaactgggtgtggggggtcttaggacctaactgggaaggactctatgagatacaacataaagtgggaaatggaacattacaactcaagagaatggacaaatcaaaaatcccttgcacttagaatgcagaccatttgcattgttactaccaataggctgggggtattggggtctaacattcctctacagttgtatgtagttatttgtaaattttctttcttaatgtaaacttttgagtacaatgaaatgagagaattcacatgtttgtctcccacacgagctatgttttgaacaagtgaccaagaatttggagaagtccaaacttcttagatcatttgggggtagtatacctagctatgtgccctcaaaaacatacgagtgccttacttagtgcttttctatttgatctttacatttgcatgtaattttgtactagtactttactttgaattttttttaaactcttggttaaaaatattgcttgaactttgatacgtctttaaccctccttcctggaaagagggagtgcttaaagtctactgcatgtccaatctagtttttacctttagtcttgggactgaagccattgcttggattctagtgcatcttcaaccctccttcctggaaggaaaaaccgcttaaagtctattgcataaccaacttggttcttgcaaaaggcacatccaatatattttcagcattatccttgaaaagggaacattgtttgaatactattacagtcgcctcggtccgttgaacaagctgacagatttcctacaaggagtgaggtaaataaacacatctagaaaccctctgtggtccaacaactctcttatcacaaatttaggaaaattctgtcaaatgttgagccagctctgttactttggatcgaggaaggatggtctaagtgatagcaaaacctaagcctcgtctccaagaaaggaacctttgcaagattttgttgtatgcttagttcccttccctcagtaatctaagtaacatagttttgttatagtattttgcgtaaggcaattaactgggaaacacgtagacaaagggtaagcttcgcgactcctgtagtaatttgggaacaaagtttacaacccttctgtgtaaggttaattcgccaagggtttgtgaaatgccacgataaggactttggcaaaagttgacatctatagaatgtgcagttttgcatacttcaaaatagttcaacaaagtagttacaaagttagaaagatcaaagagtatcattttttggtcgttggaactagaaattttgcaagatcctataaaacaatctactgagtggcataataaataaacaaggacaaaaaagggaagcaaataataagtataaaaataaagtaaacatgcataagtaaaatagatgtctctaaagctaatacagacgacctcacagttaaggcataattaaaattgtctctgcaaaactaaaattaaaacaaaaaatgaagggagttgttggataaagtcattctttagtctggtttagaggttgttcctgagcctggcttgaggggatttccttggttgggacgatgagctgctcttcaggctagactgggggtacgtcctgagctgaagttggaagttctgatggcttgtcctggggcaggccttgaaggtcttgggcagcaatccctgaagagactaccacttcagccgaatgctcctactccaaaccatcaattaattctttgtcaaacttgttgctattgcctttgtaaaattacttcataagatatgactcatcgtcgatagcgagaaccttctgggtgtattcttcttcatttgccccaaggtgcccaaggatggaatgatctttcttccactgacaatgaagtagcatagggtaccatatccatagatcgaaagcaaagcatttcaacccaagcccctgcattaatagtgtcgtagaatgattgtgtagcagtctctctagccctcttcattgctgctagagcaataaaaacctttatgccattagttggttgatgggctagctgcttctggagcttggtgatagtggccttgtggttgttgctggtagtacaaatactttgcagaacgagagtttggttatcatatttgaagctccaagactcgttctctctcttcaacttttagataaggactctctgaactaatcgtggacaacaactcctatgcaaatgcagatggtcacttcagatttacatggaaatcgacctacagactattattcctttttctgacacataatcagatattgtctcccgtgccaggccatggtagtacgcgtacatacctctagaaacacctttttgcatgacaacttgtctagagagtaatttataaaggagaaacctttggacaacacgtgtctctgatccaaacggtactacttaccatccctgtgcaccgcatgatcaagaagattcttcaaggctggacggtcatattcgaagttgtattttcctgcccttgcaatgagctgtggtacaaaactgtaggtgggtaaaaggaatgcctttactcacgtgtaagcctataaatacccctatttttatgtgcaaagggtgaacaaaaactttatactggccgaacctttgcaaaagatcctacaagctttcttcttcttcaagagaaacaaaaggagtgcagagctaggttttatactgtaaacacttaatgtattatccaaataattgcctaaagggccaatacacctgactcatggactatggattattaacacccaaactaacataaaaaaactacttagtctattatttt

SEQ ID NO: 194806 - DNA, 2488 bp, Cannabis indica
agtgcccaagttgacacctagggtaggcccaacgccgaggttgacattttgccaacctaggtcgtttttgaggaatttttttgagaagacttttgggcatattctctgttttaagtaaagatttagattcaactatttttggggagcaaatgaaacttccaggtgaccgaaaaccaacgcccaagttgacacttagcactaggcccaacacctaggttgacatattgttaacttgggctttttcatcagtttctcaaaagtgtttcaggcatttttttcttcatcaaaatgaaaatataagaaaacttagggagaaaaccacaatctcgagagcttggaaactgagctcagtgcctaggttgacctggtgctgggcctagccccatattgataatcaacctggtgtgctggttttgatcattcaaatgcaaattcttctccaatctttctctttgaaatggtcaaaacagggtagaagctctgaaataagcacccagcgcctaggttgacaaatggcctggtgtgctgggttttgcttattcgattatgattattttttgaccattcatctagtttttcataataaattagagccatgaagttagaaaattcaaattcataacttcatatattcacattttcgacaaggtgattaacttggaaatcaggtagttttgagtctcctgtttcgacagaacaacaacatctccgagaactcatgaccaaccgccagaatacaaaaacaaactaaatgatgtcaaaatatcacttaggcatcaaaaaatacatctttgacacgttttcccactcacccaacgtccaggttgatgtcacatgtcaacctgggcgttgggccctgagcaaacttcagtaaaatggccacaactccctcaatattactctgattgacgggattaaacttgaatttttaagctatttcaatgctttagcaagtcatgtctcacacattaatctcaattctaaagctatcgactcaaaattttaccctcaatagagttacaaatttaagctaaaacttaagcggagcgggttctgccgtcgcaacccgaactccaaaaattgacgatccacctcaaaatttaattttaccctcaatagccaacatgtatttttttttttcatattttttggattattttattcatatttaataggcactccttcacctatagatagagagcccctctagctcatttttcatatttagaaagtagccacaaggtcagagcatctctctctagtttctctctctaaaaattagagcatctagactaaactatttttctgtaatccatctcgtaaaaataaaaactcgaagtagacatagctctattactactgtgatagaaggagtgaaatactataaattcttgtgtctctatatttatacttaacatatatatcattctcgccaatatagtgagtgagcgtggcttaaaaatttatgtctagatttctaagtcaacaagcacaaataaaaaaaattcaacaaagacattgttatcgatggtcacctttgaaatgctaataagattttaagcaatattagggacatgtaacatctctttaaagtataaacatgtatcaagccttgttagtaaataactagttccaacatgcttcatagttaactgatttcaatcaccaacaatatcagttttcttacaattctattctttttttttttttttgcattttgtttggatcgatagtgatatggcttatttctccactgctacaaacctagcctcatgatccagagtgttaagtgtagcttcaaagacatgtgctcttgttggtcctttgatttggttgttgttgtagagtgcttcccatgaaactcttctcatacatattatagcaataggccactgaatattcatacttgccacatacctggtaggtaggctttaaaccaatatttcagccacctcctcttcctctgaaatgaccaattggacctccactagtattgttctgatttcctctattgtaacctgaacatctatcaccattgatgttgttgttgttgttggccagatttgcagaaaggttaagtggatttacagacctatttcctagcttgtttgtggtggaaaaagatgtaagtctctccatctttctatcaaaactaaatagcatatgtaactcttgccaaaatgttgagggtctagcttctatatgagcagagcgatgggcagattgtccagatctaggcaagaaaaaagcattagaaacaagaattgttcttcggtattggtcacttggaagggccagagtatcgactcattgtctcttttgtcgatgatagccaatcatggagcaccttttctaactatttgaatcttggttctatactcatcccatcttttgccttagagtgtgaaccataaagagcttcaagaactcgagcaaagagcggataggagccacaacccagactctgaggcaatcccatctatcattg

SEQ ID NO: 194807 - DNA, 1718 bp, Cannabis indica
agcaaccttggtcattggcacaacctcatttcccattgtaagtgccagttattctttagttaacagttttattttgacaaaacaaatatgttggtatcaaaaaactgtcttcattttaattatattcgaataaagggacgtttgtggatgagctgaagccagaatctgaagatcgcataactttattgttgaaaagattagataatgaagagaaacaaagctatccagacaattacaaaacttgcgttaattttgctcaacttctgacgaatgcaattgaagttggtatataatatatccatttaattatccttcttttaacacagatttttgttaaacagtaagtaatattctaatttttcagtaacagttaaaaaggatgcacatcaaggacgtacacgagctggtggagagagtcttggaggatcgaatgctatcaccatagaacaaaagggtgaacaaatatttattactaatcccaatattgatttcgggtgttgtatactaactttttactttgttcagcacaatcttattgttaaaaattatagagtaatttgtggcataattatttaagtttaattctttcaattacaaataaatattcaagtttattttttggcggtaataatacctaaatgtcaaatcattatctatgtgtcactttatatacaaatttttttaaaaaaaaaattaaaaatttatgaattaaacttaggtattattgatgccaaaaattaaatttatttgcaagtgaaaattaaacttaagtatttatgccgaaaattactcaaaattatagtattaagctaccaaaaaggacatcgttataataagttaccccttgcagctggatctcaaagtgaccgcttaatatttccacctaattacgccacctgcttcaaccttttccagactgtatgcaaggccttgctggtcattcttggattaggtatatatacatttggctccaaaaatcaacatactaaatactatatgtggttgtatttttcttaataacttagtttctttctgtccaacatattccttaatagggtctagaatgattaaaagaataaaggaaaagaaagagaagcatgtgtggtcggttcaaatcatgaatgaacttcttaaacatgcctctatgtacgagtacgaaaacactggagcgagtccacaggcagtagtgccaccccacaaagaagatggtgagaccgagccttatgagattgttgaggatggagatgccacttttgctgctgataccataatcggttcaaccacttcttctattgatgatgatacttctctcaaactaaacaacccaaatgggaatgataaaggaaccaatgttaatgctacagatgaggagaatgaaacagctatattaattgcagctaaaaatggtgtgactgaattggtggagaaaatccttgagctttttccagtggctatccacgacacgaacgctgagaaaaagaatatagtattactagcagtggagcatcgacaaccgcacgtgtacaagatgttgttgaagaggaaaatcttgaaagacagtgtgtttcaacaagtggacaacaaagggaacagtgcgttgcatctcgctgccatgttgggagactataaaccttggctaatcccaggcgctgctcttcaaatgcaatgggaaatcaaatggtatgaggtaagttttcgatcaagtactcctctgttgg

SEQ ID NO: 194808 - DNA, 2514 bp, Cannabis indica
actgcttccaagcatgcatggaaaattgcgcccatctctcattttgaattagaatgtcatcgtattgtttcatctcaaaatattcagcaacaaagttttatctcccagaatgccaatattctcatagtagcgatacattcctaatggcaaaagctcatttctaccgattgcatcaaatatcatttagaaatactctgaatgatgttataaagcttggactatgtgtaggaatgtctacacattctataacttcttcaaaatcatattctatgtatactggatcatcatagaaatagtaatggaacaaaatcgatattctatgtatactctgaatgatgttataaagcttggactatgtgtaggaatgtcaatgtttattctctttcttcctcgccttcttgagctactcagggtcggccctgaagaaatgggggcctaagacaatataaaatttcgggcctcttaataaataaataaatatttaaagaaaaaaattgacctaaaaaaattaagagaattatcccattatactatttgttaacctttttttaaaatttacggtttgagttacaccggtagttgctctggtagtttttatgtgcggtgctatgtgctacgatttaaagagagttcaagctatcatcactttagaaatttgactagattttttttgatgaatcagaaagtttatattaattgctcacaatcaactttacaaattataggcaccactcaaggtccataaccggctatacatcaactcatggtaagtacttacatgttaaatcaattttaatatatactttctttttatttacaaatggtgaaaccactctttatctatttcattcactttcttcggccagaattggcagccaccttggtttgttgcaccattcgatcagcttccacctgagttccttcccacactttggagtttcgtgctctacaaatcgagtacactaaactagtaacagaggcagcaaggatttgcttcctaaatttgcttattttggctctcccaatccatctcagaagtcggggtaatgatgaagcattagcatgccactgcagccaattcttcatggctcttaagcaagtatcagcaactagacaatcgatgaataagtgtgcaaaagtttctgcactttggcagcaaagagggcacttatcttcatctgcaattcccatttgacagagcctatctcatgtttttaacctgttttgtatagcaattcaggttatgaaactatgtttgggtgtgttcaaatgcccctaaacttgttgactccaattcaccttgtcttggcttgttcgaagtatcttgtatcctgcagcaatactgtaaggagtaatagcattaaatgctaccagccccttaaattgttctttaagagcaaccagtctcctctaataccaacttccttgagtaggaggccggtattgccacaagtcttcacttcggatataaacacaatggatccattttatccataggctatcttctttgtatgaaatggcccaaatgtattttcccatggctgccttattccattcatggaccttcttaaagcctagaccaacattagccttaggatgacatacacaatcccaagctattaaacttggtccaccagctatggcttgtcccttccataagaaatttctacatattgcctcaatatcattaactattttcttaggtagtatcattatctgcgaccagtaagcatgaatagccaataatacttagttgatcaacacagttcgagctacaaaagataggttcctcgagctccaagtatgtattctagctgtcatcttttctacaagggctaaacattcattttttgagatctttgcacaaataggcactcctagataatgaaatggcttttcttttaatgagaaaccagaggcatcaagaattctgttaacttcatagtggtccatattgctgcaatagatagccaatttttgtggattcaattagaatcctgaagtttgtgagaaaagctttaaaccttgcaaaaggtagtatacacttttgaactcccctttgctgaagagaagtacatcatcagcaaaagcaagatgattaagtttgagttcagaacacctctcatgaaaagagaaatctgctttcttgccaatcactttcagcacccttgataggtattccatctcaataacaaacagtcgggggtacatgggacctccttgtctcagtcctctactagttccaaagaacccatgtacagaaccattaaacataatagagaatctgggggttctcacacagttcatgaccaatttgacaaaaggttctgggaactataaagcttgtagcatctcttccacaaagtcctattctatagtatcatatgctttttataaatcaagctttatcaagcagttgggcttacctaattttctcccataatgtctcaccaggtcttgacatatcatgatattgtgtcgtataaacctcccctgaatgaatcctcctaggtt

SEQ ID NO: 194809 - DNA, 2955 bp, Cannabis indica
ggatatggtggctcttacttgggctgtcactactattacctgggtagagtttcaagagtttcttaatgaaaagtactacaacgaggtagtccgtagtgcaaaaagaaaagaatttagtcagctaactcagaaagagaatatgtcgtttacgaattatacaacccaatttgataggttggttaggttggccacgggaattgtgccaacaaaatttagcaagaaagaaaagtatatggatgggttgaatcccaagattaaacatgacctgatgattacgatagatgataacaccacctatgctcattggtgggaaaagcactgcgagctaacaacgaagttgagtgcattcagaagtcctaggggactcaaattgttggtggagttacccctcctcctacctatcgttattgtaggggtggtagtgacacaaccactgatgagaagagaaaggcaccatctacatcatgtggctcaagtcagaacaaaaggtttcaaaccaaggtcgtggtaaccgttagggtggttatgaaacccgatacacttactcaaaatttctcaattgtaagaaggatcatctgggtgagtgtaaagggcgaggattttttcagtgtggtttgccggacattacaaaagagattgcctacatttaaagaaagaagaacagaagacgaaagcaaaacccattccagcaacggtgtttgctcttactcagactgatgcagaagctagcccctcagttgatacaggtcagctctcggtcaacaactcttatttttatgttttattgactttggggaaactcactcgtatgtggtagctagaattattgataaatttggtagattatttgatagaaatgataaagggtttggaaccatattgcctggcagagaattagtgatctccaaaaggtgagttaggtttatgccaatgagaatttaggatagagagttgagttctgatttagtggaattgggcttagaagattgtgatatcatacttcgaatggatctcttgtcaaagtaatctactagtattgactgtaaacggaggatggtgatcttccaacaccagggcgagcaggcatttgtgtttttgggatcagttcagggattccaaattctagtaatctcggtattgaaagtaaaatatttgttacaagatcggtgtctagggtttttgggagtggtattggataacacacatcctgaattagttcggctagaagacattaaagtggtttaagaatgtttagatgtgtttcctgattaacttttgggcttacaattgtagcgggaaatagattttataattggcttagcacctacagcggatccaatttctatagcaccttatagaatggctccggcagaacttaaagaattgaagattcaatttcaagggatgattgacttagggttttcttcacctagtgtgtcaccctagagagctctagtgtagtttgttaagaagaaagacagatccctacgcatgtgtattggttatcaggaattgaacatgttaactatcaagaataagtatcctttacctaggatcaatgacttgttcgatcatgttcaagggaagacattattttctaagattgatctctgatcaggctatcatcagttgagaatataagaggaggacattccaaagattactttccgtactaggtatgggcattatgagtttttggttatgttttctggactaactaatgctctcccagcctttatgaatctgatgaatagggtattttaggatttcctcaatatatgtgtgttaaagtgtttatcgatgacatccttgtgtacttttaattagaagtggagcatgaacaacacctttggatggttttgcagagattacgagaacacaagctttatgccatgtttaaaaagtgtgaattttggctgtttcaagtgtcttttctcgaacacattgtcagtaagaatgtgatcatggttaatccagggaagattgaatccgtaaaggattggccaagacttaagacagttacagaagttagaagttttctgggtttagcttgtgattatggtcagtttgttgagggattttctaagatgtcaatgcccttaacagaactaaccaaaaagaattagcagtttttatgcatagacaagtgtgatgcaagttttcaagagtttaaatagcgtttaattacagctctagtgttagcactaccatcgaataaagaaagtttatggtttactatgatgcatcgagatagggtttggggtatgttttgatgcaagtttattgggtaatcgcttatgcctcccatcagttaaaggaatatgaacagcaataccaaactcatgacttagagcttgctgcagtggtttttgccttgaagatctggcgacattttctctacgaagaaaaatgtgagatttacaccgataacaagagccttaagtatttcattatccaaaacgatttgaatatgagactgagggggttgttgcagctggttatggattatgattgtgagatccattatcatcctagaaaggccaatgtggtggcagatgccctaagtaggaagggactcgggcaagtatttaacatgatcatgatttcagccctactagcaagtgacatggtcagattaggtaatgagtttgttgtgggcaaacataataatttgacactacaattagatatgtttgacagaattaaagctgctcagctagctcatcccgaattggtaaagatcttagaagatgtttttactggtcaagctaaggacttcgcagtgtcaggtaacgagatgatgttgtataaaactagagtttgtgttccgaacagtgtagaacttaaaaatgagatttttgaggaggctcataccactccttattcattgcatccttacactaccaaaatgtattaggacttaaaacccttttactggtggtgcaggatgaagaa

SEQ ID NO: 194810 - DNA, 1547 bp, Cannabis indica
ctatattcaatcccctaggttttaagacccataccatagccattggtggacactatttcatttcctttgtaccaataaaaaataagaaaaataaattctacatctaactatacataaaaatcaaagtaataaatgattggtcctacattcatatcaaatcatatcatttcattcatacaactcttctaacatatctacctataaaatgataacacctccattattaatcccccaaataaaaaaaaaacccagaagttagaaaaagcaaagaaaatggtctcattgaagaggttgcttattattctaataacaataataatgttggattatggtgttattattgttgttagtgaaaaaaagcacatttcaattggagctatgagaagtgatttgcctatttgtggtggaagtaaaagtgttccttattcaatgtcttgtcttcctcaaccttctaatccttaccaaaaggcttgtcttaagatttacaggtgtagacaccacacttattaatttcatttttatttttcttattattgtgtattcttattttcttctttcttttaatatagaaaaaagagagagtgaaaaagaattattcatagcataatttgcttttggtttattgatgttatagtatagttagatagatatttattaatgaaaatacattctcatctctcttaacattttggattagttatgatttaagatttcattagaagatgttatgttaagtagggttggccttgagttatattgggtttttgaaaaaaataataaaaatagatagtatagttagatatttgttaatgaaaatacattctcaattctcttaatattttggattagttatgatttaaagttttattagaacatgttatgttatgtgtatgctttaaaagaaatttgtttttttttttttttgtttaagcccctaaactaggtgggtcttaactcgcttttgtctaaagatctgtcttatatttaaaataagtgttgttaagttgttgtttatgaaacgttttattgtgatattaatgtaattatttagtatttggtgaggaagtgtaattgtgaaataatagtgtgatttattagactaggtttagtatcaaaagtgttattttttaatattttaattatttacaatttttttttatttgttaatttttatttatgagcaatattccatatattttggtaactagttaaaaagtaatgtggatgagaaaacattttgcaccatttttaagatattatttggaattaatttctatatttgacatataaagcctagtttaattaatattattaaaagttttttcttcaatgatagataatatgctaagagtctttggaggacaaagatagtgatttttccttgaactttcctaatgaaattgaatcattattcacattcaatattcaatattcaccatgaaattttggataaatttatttctcacttattatatcttttcaaaaaatgtcactttcttttcctatttcaatatagtgacatatatatatatatatagtagttatta

SEQ ID NO: 194811 - DNA, 1824 bp, Cannabis indica
aactacataactctagttgaactagacttgttcatcaaagactacagtcaacttaaaaaagtctacatttatgcttcaactagactttatatatctagatgttaagtttattaactattgacaactaacaatataggctaagacagcaaagaactatccaataaactcaaattctaataaaaccaataaaaattaatgtaaactcaaataaaaactctaaccctaaatgtttattttaatgtaattttattaaagacaacatgacactaaaaaatgacctagacaaaataagttagagccacataggatgttaacgacagaattaaatttgcaaaggaaagtagagtttgagaggtttttccacaaaaagaaaaagaaagtagggttagttgttgccgtaagtgaaatataggggatttggtcgcaaataactcattaaaaattattatccttctcatgattttgatgataaaaactcttaaagaagaattagctgcatcaaaaggaactgtgaaatattattgtttcctagtaaccatcctctcccaaacaatgcttctttgaacgacattgaatatggtattagtataagtaaagagtaaaatagagggaaaaaaaacttaacctttgaataaatacctataagtaacagacaatactgaatacaaatatggtcactaataagatatgagacaaggacgactgtcttttcccgatacttctcgggctctaaatagctaacacctataaaattcgacagggtgaagcaaataaaggagaaactaacaactaacaatcgagttgctaagttcttgtgcaactaaaagctcttctctatgctttctctttcaagctaaacaccctgctttattaccctgttggtacaacttgccaagtatcattctaatctaaattaaaccatgttcgacatgtctcccttggcatttgcctttctacatagtgaagttgaaaaaatttaatccttttttgttttagcaatgttgttctacaatgtgttttcaaagatcaaggcacataaaagagtcaaagactaccataaaccaaccagtccatgaatgatagcttctaagaaattcaccatagatcaaggcacctaaagaccaccataaaccagcccatggacgacagatgattaccaagaaggtgttagtcatcccaaaacaggacaactgccgtggttctaaagaacatgaattaatctacaatattgctataggacacgaacggtgcccaatactttgtatcattcaacatttatgattcacaagccattcatggtttctatacttctaatatacaacctcaagaaagtggaggtctcctataactggatgatgagaaagaaaaggatgaacagcaccaatcttgtccacgaatacaccttcaaacattttttttactataaaatgcaaataattcagtacaaaaaataaatacaaaatattctgttgcctgtgtcaacaggagaggcacaaacaatactcttgtgccccacaattatgtgttgtacttaaaaaaaaaatgtttatcatcctcattacttcagcgttctacgagaatgaggatatttcctatgaagtactttcgggaaaaatgtctttcccaacaaggtaaaagtatatgttaaaatgaaagctataaatactgaaaccatgaatggggaacctgacatcgtcgatctccatggtaatgctgatgtgtccatgctcactgttgcaaatctttcactagagttcctacttctgtggaatgaaaaatagttaaaaacccttctatacacaataaattcaatgcttatataga

SEQ ID NO: 194812 - DNA, 1783 bp, Cannabis indica
acatcaaacttttactattttattatttttttaaaaaaattatagatattaaatagaatcctattaaatatgagacaagtgttaaactgaggtattataagttttattttgcttacaaaaagattgtacataaagtaacaataaaaatattaacaaacgtgtgtcacggtataaaagtaataaatatatataaaaaatcaatacaccatgtaaaagccctatgatatttgagttaacggtgtacaaatgggtcagtctaacccgtatttacataagtctgtttttttaatagaaacccaacacaatctgtataacaatatgggttgtatcaggtctatctcatattttgatggttagcctcagcacaaccgataagcacaaattactcgtgtcgggttttaacgagctagacattatcattaaatgggtcagcctattttctttgtgggccataatataagttcatagaaaaaattgaaactatatcctatttttcaaataaatttcaaatgttttaaacataatatgtaaaatacacatgttaaacttagtcatattgttttattattcttaaggatatttgatagtttttttttttttttttgaatggaaatatggcatttttattagataaaatcagccattacaatgttcatcaactcggaaggtgagttggttacattaaaaatacgtactgacgagtaacaagagcttcaatgaataattgtattttagggttttttttatatattttgctagtattttagggtttttttaaatatatatatttgagttgttaccgtattttataaaagccatttggctattcaatgaataattgtagtgattttagattctatgatttgaaaatataaaaaaagagttttcattttttagcctaaaactcaaaataatattcaaattttatttttgaaaaacactcaaccaatcaagaattcttatgtgtacccccaccattttaaatttcagaaacataaaacaatttttaaatcctaaacaagtcaaagttttcacttaggtagcgtttcattgggcggaataaaaatatagaaataggaatgcgaatgcgaataagaataggaatggaatggaataaaatttaaatgcataaaaaaaaaaattgataaaaaaattattaaatttttcctcatcatggaatggtctttccttccatttcaagaaagaatagtcattccattggaatgacattccaattctttaatatgcaaccaaataaaggaatggaatgaagattgtttcatttctattccattccatttcattacctccaaccaaacaccacctatggtcgtggaaaattgagatttttgactagagaaagaagcagccgagggtggaagatgctagatatggacattggcaatcaaataaatcacttgtcattgcatggttgttgaattccatgaatgcctcaacattcatgaaaacaactaaggaggtatgggattcaagcagtgatacttaatctgacctagagaatttttttcagatttttgagttaacaacttggttatgtaatctaaacaagtgtaccaaaattattattagtaaccaaaaaattgtttataaaaacgtaagaaaataaaaaaataaaataaaaaacgtcaaaaatatcagatttggctgacgtgataagttagtaataatagtaacgttattattgtaaattaaattcgaaaaatgtatattattgtaaacttcccttttatttagggataattacttaagacaccattttttt

SEQ ID NO: 194813 - DNA, 1017 bp, Cannabis indica
gagagagagagagaggtttgagacagggagagaggataaggattttcattttatgttgtggcagaggtaaggttagtttaaccatggttaaataagtatggtggggtttacactagtaacagtgataaaccgttatgatgtcgccacgtgtcaagtaataattgtgaaccgttagatacgcggtgggggtggggtgatcttatccgctggtcgacgaagaagagccgcataaaacgggtgtacgtaagggcgtggagccgggagagagagagcgagagtgtgtgtgtgtctgcgggtgtgttccgagagaaccgagatttagaaatgattcgaatcatatcgtcaagataccgggagaaattgactctgtacgagataatgaaaagggttattatacagtgtgatattgtgtatggaagtcagggtgggggtgtggaaggaaggaggaaagaatctcatggttcgcgttgcacggctagatccgtggggaagagatagagagacgagtgatatttaggggaccaccatatgatggtgagaataaaaagtaataaaataatagagaatgatttgatgtgaagtcttgttatcatgacatcatggccgtccaatcatatatgactgtttcattctcgctggtactcttatcaaatcttgatttttgcctcaacactctttctttctctcccaattttcctttcttttaaaaccaaaaaaaaaattaaaaattaaaaaaatttcacttatcaattttacccattccaaactgcctagatctatttcattaattttttttgttgatggaaatgagatacatatgttgatgctaaaaagtcttctgtcattaatgagataagtatacaactattttatgttgaccttacataaatgccaaaaatgaaaaaaaaattaatgtgcaagctgttgatctaaacagtgttttgttggattttttcttccttcttataaaattgactatgtttatcttatctatctattatctccctattccaactc

SEQ ID NO: 194814 - DNA, 1056 bp, Cannabis indica
caaaaaaaaaaaaaaaaagaaaaaaagcaaaagacatatgagacaaatatggggggtcactactgcaccatatataaacgtacgtgcaccagctagctagtagctaccaataccattcggtacacgattttattgattttggtaactttggaacatatttgtgaatagttaagtgtaaacatttgcttatataatataaatgcacatttatatttactatagatataccagccggcccaccatgtgacatctatttagaaacttcgagaggggcacatggaaggaaagtttggtattcatgatgaatcagattcaagaaaatgattatgtgaagatcaaatatttatagtcatcatcactcatctcatgtttactatatatttatatatatcagctggttctatatatatagtatgtatagatggcttttttggactttgggaaatgtgaatcaatccactttagtcatttataattagtaattataactcgagaggttttgatctctgccatataaaataaataaaatcaaaataaaacaatcaaattcatataagcagtgctgaaaatgaaatattaaataattaaagtttttttttttatataaaaaagtatcctccacgggccacccttataccccacccaaaatataattaaaaaaagaagttggtagaaactacttctattttctcccaaaataattctacacatatcatttggagtttctcaaagtccttaattatttttataagtcttaattatgtttagtgattcttttaaccaacttgtacacttgaactgatacacttttatgtcaatgcaataatgcattgtacaataaaatttatatttggttttttatattagagaccatttttagtaaaatgtctttgaatcttattgctatatattaaaagttaattgatttatataatataaaataaatgaataacaataggtccgcacaaaatatatattcaaatacaataagtttttgtaattataggcataatttagtgttccctcccttaatataaaaaaagttttttttttttt

SEQ ID NO: 194815 - DNA, 2274 bp, Cannabis indica
tttttaattttgtagttgtttgagtttggtgacaagtacagaggaaaatatgatgacagtattggagtggctaaaggatactacacctcagtgagtggttatatggatgagttactatgggcagctttgtggctatacaaagccacaaataaagatcattatttggagtacgttttgaataatgcttatgcttttggaggggtgacttggaccatggaagaatttagttgggatgtcaagtatgttggcgttcaaatcattgcttccatggtacatcttttttattttaacgcccattaaatttatattatatgataattattatataaagtgattagaggatttaattttaatattattttcattccttaatttccatgtacgttaactttctctgaagttactaatggaagaaaggcacaagatcaaacacgggcacgtggtcgaagagtaccgttcaaaaggggagcattacatttgcgcctgcctaaataaaaataatttgactaatgtacgacgcaccccaggaggcttactgtacacccgccaatggaacaacatgcagtacgtctcaaacgctgcgtttttgcttactgtctactcagattacctaacaaccaccggtaagatgcttcattgccaaaatgggcttgtgggcccaaatgaaatcttcacctttgcaaaatcacagattgattacatcttggggtctaatccaatggctgtgagctactttgttggttatagtgcacagtaccctcaaagggtccaccatagaggagcatctattgattcttataagaaaactaagggatttatagggtgcacggaggggtatgatagttggtatggtcgccgtgagcctaaccccaatgtgttgattggggccctggttggtgggccagacagtaatgaccagtttagagatgagaggtcaaattatattcagactgaggcatgtacttacaacactgcacctttagttgggctttttgctaaattgagtaggctagaagttgaaaatttgtctcttaatgctcatttaattgcttctacctagagggatttttttattattattattattattaacaatattcaccatatgtatcgatacttgacacttcatactaaaaaatattcaatagaattttttctttttgatagggaaagatatacaagagataagtgtatgtgtcaaatttttggcaagcataaattgtctttccttagtagagaaaatttgtggaatctattttcaaacaatccaaaagcaacaaagttgtaactatgtctccttttttattaggtcctcttcttcttaactttatgaatattagtagatcttgtaactatattgtctataatgtgactaagtgggcctttacctaccagatgtatggttgtattccagtcttctctatgttggagaacctcttttataatgaccgcgaggtctaattatcttatgttatttaatgcattaatacaaatacacttattttacaaaaaaaaaaaaaaagcaacaaagttgacctactacctcaacacagcaatgtagtacaaaatcataaacttttacttaacataataatttattcattaaaaaaaaaaattcttcaaaattttaaataattgagacactttatattttgtaataactgagaatgtgaattgtgaagagaggcaactctactcctacctacctggaggaaaaacaaggcacataattggtcttgatttagaacgcttggtgcacaaaaatcaaaagtaccataatcacagaactctttgctatgagaaattaagagttactggttatatcacgaacttttcgtgcttctttgtgttagttttgaatgaatcacataaaaaaccacaaatatacacgtttcacttttcatgtttggcaatattcaaagaaaaagaaatgaagaagaaaaagaatacaacaataagcacacctttgtatatcaagacaataataagttaataattaactgaaaaataaaatattttagctaagttctgattctgaccttggcaaaggtttgaaaattcctaatatctatgttttttttcttcctttttggtttttggttttatttattatataataatttttgaaaatattacattaccgacatagacttacactcagctgtcatttaaaagatagaaaatctacttgtgttaattacaactttttatttcagttaatcacatttcaaggaacaataaatagcaagaattcttcttcttgaagcttcctat

SEQ ID NO: 194816 - DNA, 952 bp, Cannabis indica
atgtatttttaaaatggattataataacttgcatctttggaaatcataatggcttgtggtaaaatgaaacggtacagtattactcagtattaaatggcagagagggcagatggaaaaagtggaaaatagagtgatgataaatgggagagatattaatggctaaagcctttggattcttttccatgtctttatccggtagtattatagttctcctttctctcactctataaatatacatgtacaaatatttctatctatatatctctgcttagtctatccacgcagctgaatactttctgacattccactagatttcattacccttaccctatagtgccacaccccaaatcttgtttggtacacacatgtatgtaatgtacacaatacacaatgtgtttgtgttgaaagctatatggccttgaatcttgatatatattataataaaaaattatgtgagcactttcacttggcttggggcacttggccatattgatatggttgggaaaatgtgaagtgataatgtaaggtcactcacaggggaaaaagtttgtcagttcattattattatttttctttctttatttctttcttgaaagcaaattttagcaaaagatgagtacagaacagagtagtactactagtaagtaatagtacttagctaaagacccagatggaaacaaaagaaaaggtatattaatattagacacttaatacaagaaataaaagggtttggttattaggaaagttcatttcagccttaagccactttgtgattatgatcattgtttttgggcattagtcccgtactacaatgcatacttttgtctctttgttcttgcttatttgtacaaatataaagaagggaccatagtccataaccctagaagtattagatttagtagtacccatctcgataatggagatgcctgtttggtgtccaagaaaattgatt

SEQ ID NO: 194817 - DNA, 664 bp, Cannabis indica
agggtttaagtccaatcatgtgttgagggttgttggggctttcataagcaagtttgtgtcctcatgtccaaaaaactttgttgggatttggagagattacttccgagtttgggtttcgatcaacattgatagaccattaaagaggtgaatgaagatcttcaagaacaaggaagagtggtaccaggctaattttaagtatgaaagagtgcctacctttgcttcatatgtggagttatcggtccctcagagaaattttgtcataggttatttgatgaaccacttgaatcccttatcaagtcgtatgggctgtttatgaaagctcctgatcgtagacaaaactggcaaattggagcatggtggcttcgtgatagtatgggatagctagttgataggttttacgatggctcctcgccgactatgagatcctagaaaaatggtaattcaaccccgagaatcatggaggttgatatggtggataccataaatcatgggggtggtaaagttggagatagaggaagatatggggttgataaagattaaggagggaatcatggggataccattaaagagactgtatcaggaaagaattttgaaattcaaaatgaggggatagttatatatgatcccaaaaggaggcgcagagatgggagagagagagagagag

SEQ ID NO: 194818 - DNA, 1422 bp, Cannabis indica
tatatatatatatatataagctgtatatgtaattaaataggaggggatgggaagagataagggaaacaataaatccaccgcccaaatacttaacataacccttcatttagtaaattttttcctgtaaatatatcctatatgagaatatacaaatgtactcttatgacgttaaatatgagattcttgttcgtcttaatattgcaataagtcctgtgtttctcattccatttacttgaaatcagctagttataaattacaagggattgatggcctctttactacgctgcatcatatgaaaacttaccctttctggtatgcgagaaagttgtgtaccaaagtaactttaaacagttgtcatgctctactttgcctttacagaatagtggggtaattgatggatctacaattggtggtaaacaatcgaaatccatttccaacgagcttgcttcaactataaatgatggtctttacttctatgagcaggttgaaaagaatcattttggattgtttgttgaccctttcacattatggtgcacaattctgatgtccattttttggcaggaactgaaaaccaagcggtctggtcgtaaaaagaacagttctagctattgtgcatcaggactctcaaatttgaaacctggagagaactttgctggaaacaatgggattgaagactctggaagtgctaattctcgaaagaagcagaataaaagctttccaaaacaccagtcatcccacaaacaaagattcttttctagcacatttaggaatcacggaagtggtcgacaatcatcgggaatcatatcagagagcccacctagtaactcggttggatatttctttgggtccacccctcctgaaaatcattggttagtctaaagcgactgttgcttctgtttttgacattgttgctctttctcagcaatgatattgttccggctagcatttttgaggtgttttatttttcagagtcttaagagtgccaaaatccaagtaaatcttaatagcaagaatgttcgctacctggtaacagattggtttgagtcccttttgtggttctagtatctaattctcatttactttgggttttcagcctaaggtcttcaaaaatgagtgtttctccacatgggatcctctcaggtagtagtccacccgtgggttctttgcccaagtcatttccacagtttcagcatccaagtcatcagcttcttgaggagaatggttttaaacaacagaagtaaggatataataattctggatatattcatagagtgggcacaaagttttctgtttacttagttaccatttcttttaggtacctgaagtaccaaaagcgatgcctgagtgacagaaagaagcagggcattggttgtagtgaggtggattgcttttctgaacttttgccttctttttttttttttt

SEQ ID NO: 194819 - DNA, 841 bp, Cannabis indica
gtgaaaaaaatcattggtcactcatcaagagttagaaaagagaggctaaagtaccccttgcgaggaggtaccctacaaatgcctcccttgtgaggaggtaacttcgaagacctttcactgcaaggaggtccctgcaaagaggtacttacgaggaggtacctacaaatatatagttattttgaactacttataaatttcaaaaaattctaaataatttatatgtcaaaaataaaattcaaacatatttgtgcacgcgtataaaaatagctacgcaaacaataaaatatttaaatttatttttaatattattaattatatatttaaaatttttaaaaaatgtacaagcaacttcatataattattaaaaaaaaagtaaactaattaaaatagatactaaataaagattctactaaatatttttcttctcaaaaatgaaaattgaggatagtagtagttgtgttataataagtacattaaaacccgccaaaaaggaaccatgtatctccaataacaaataaaaagaaggccacgtgtgaagtgttgactagaaaaagaaacatcaataataatttttttgggtcataggaggaggctgcgcaaacgtaaggcttataattaattaagatagtcatcatcctctattccttttattttggtctttacatctctttcttattcctactcttatcctcaaactaaaatccaaaaaccactttctcacaatttttttcttttaataaaatactttaaaatgctaaaaggcaccaattaagtatagggatgcctcacataattcagcatgattatttggctaattaaatgatattttataattagttat

SEQ ID NO: 194820 - DNA, 1324 bp, Cannabis indica
gactcttggctttcttatagagtgagtgtttctccaattggctaagggtcgcaactttttagggaaggtcacaacttttggatgatttctaaaactttgcttctataactttcgcagagctgggactctctagagaaggtcgcaactcttgactccgaagcattaaaaattgaattttagagacctgggacttgcatcgagccaaaaaaaaattagattccaaggatccttttgcaaaaaattaataattctaacgccaagaaacttgaaaaacactaatttttctccaaaaggcgaaagtgccttcaattaaaacttgaaactaacaaagtaacataaataaaacgtaaaatcgaacaacaaaacataaaaacaatcaaaaataaacctaaaactagacgcaaaaataaccttgaaatagacctaacaagtagggtcactgatatatactattcttgtagtgatcgctccttctacaaactaaaaaattcactctataagaaccaggtctcaaagtggcatctataagccaaaggcatatttggctacaaaacatcctctactggagtctttttttccatttgagccaaaatctgtcaaaatgctctacaaaattcaaagtggtttgcctctataaacaatgagtttgttgccctgatcgggtcaaaaacttggactctagtgccctatgatcctaatatgcacatcattaggtgtaagtggatttccagaatcaagttaaatgcagatggtacaatagatatgtacaagtccaaattagttacaaaaggttaccataaaactccatggaatgactatgacgacacttttagtccagtagctaaaactgtaacaattcaaatagttctttctttggctgtatcttccaactgggtagttaagcaattagatatcagtaattctaagagagaccttcaagaaagagtatacatgaagcaacctcaaaggtttgatgattcttaaaaacctacctacctcaaacaatctgcaaaagcttggaatgacaaacttatacaaatgttgtttcaatggggatttaaggcatcaaggttagatacatcactctttattcatggattagattttctacttatttcattattagtatatgttgatgatatgataagaactgacgcgaattcacaactcttctccaaactaattcatgatctgaacaacattttttgcttgaaagaccttggacaagctcattattttttacgtgtggaaatatttagagattctgtgggcatgtacttgtcttaagtacattaaagatcttctggtgaagcttcatttagat

SEQ ID NO: 194821 - DNA, 1718 bp, Cannabis indica
aaaaaaaaaacaacgtgggaatgtgacgtgtggttgcatgaacaacatgggttttcacatttaattatttaattatgatgatgatcagtattgttggaccaactgtgtccgtgtatgatgcttattatggatggaccccattcaacagctcagctgcgtttaaataaaaacatatgatatagatttaatttacatacaaacgacgtctattaattgaattgaaccaaaaacgcacacgacataaacctgcataacatgtcatcatcatcgtcatcatcatcatcattatgcattttaaacccaaatgatgtttcgtgcacatcagattttttaattcttaaaatcaaacccaataagattttgttttttgttttaagttacaaatagttgtaggagaggttaaatttaggtatatattgcttagctagtcatatatttttctaaatgacatcatccagtaataaaataaggtaatgtaattataattaattctacaattttttattaatcaaaatatttgtcgataaatctcatccaattttttttttttctttttttagataacaataaaataaaataaactcatggacggacgtcaggcgcaacaaagcaaataggaaaagagcgcgtgaggcataacacgagcctaactgccgttgacgtagactatttcaacttttaaagtcatcaccacatcatcacacccttcttaaattccatttaaattcaccattttcatacccatttttgtcatccaaaactctctctctctcttgtcttttgctcaattgaaaatctaaactatgcaacaagcaattccctacaaatcatggccaccccttcaccaaacgacgccgcttagtcgtcttcctgctgtggtcatggaaagtactagcaatgtgaatagtaatagtaaaggagttttaacgtttagaagaagcgtcgtcgacgttaacgccttaaacggtttggtaaccgataacgccgttatggtcttcgtgaggcgaggttgctgcatgggccacgtcgttaagcaccttctgttaggacacggcgtcaatcccgccgtttacgaggtcgatgaggccgaggaagttggccttgttaaggagctcgaaaccattgctgctgctgctggtgattccggtgaaattttaccgtcggctcagtttccggccgtgttcatcggcggtaagttgtttggaggactggatcgggttatggcggctcatatatctggagaattagttcctcttttgaaagaagctggtgctttgtggctttaattaattattaaattcagttttgtaattttttttattaatttttatttatttcaataatatatgtggataggtttttaatgttttccctgataatttgaagtagaggaatacaattcttttcttttttttttttttttctttttttttttttacagaatttttttgcactcaaaagaaatatttatgtgttttgttggacaaaattaatccacatgttcatatagtacttggaatagtttggtgccttattttccttttggtaatatttattttcaattaattattttaattaatatgtctgattacatagttggagtaattaatttcgtgagtccagagttgtttccagctggggatttcagaacttcgtggcttttccttgcgaacgattatagtgtgtgatttttctttaatagccttatttagggctga

SEQ ID NO: 194822 - DNA, 1745 bp, Cannabis indica
agagagagagagtaaatgatgaatatgaactctgtacattaatggagcacaagctcagtatatatacatcaagagtaaaggaaaaagataacaacgaaaaataactaacaactgttataaataagacaataccgttacaggaactaacaaccaactgacacccctaactaactaattcactaacattctgacctctatgagaatcatctcactaccactgctttgcctaccgaatggataccccctgctggctggatatgtgtaaaacgaacgttgcgattggcaaaacccaatcggcaggggcggtaatattcagagatgaaaatggactttgcaaaggtatttttactttcaaaattggcaagtgtgatcctattgcaggtgaagtctcgcccttgtgcgagggggccgaggaggctatcaggcaagggtacaataacgtgatcttccaaagtaattcttccaatgctattggcactatgcatagaaaatctcatgaaatccataccctgcatcataacatacaggagttagtcagtaagtttctccttttagttgcttccctcaacctttgggaagcttgctggattccgagatcttgcaacactgtggcccactccgtggctcgttgggaaaatcgtaacaacgcttttggttattttgattcagccttttttgacgatttcctacatatatgtattctgtagatggccatactttatagtatttgttccttgtgtttcttaattgcaggttttgttttgtttttagttcgggtgtccgttgagttagttgctcggtagctagttaattttctgtctctgcatccctgctgtgggttccttttttagttgttgttgttctttgtttgctcttcaggagctaattataagaaaaaaatgattttattagtgagaaatctatttatatctatatctataaatatatatatatgtatatttcctcttattccaaaaataaaattaaataaaaataaataattaacgtgagccacaattgtaattgaaaaaaaaacatgtgtttcctagtttaattgtaacttttcttttaccttaagaaaatatttataaaaatgttaatattttaacgggattctctagatattattggacaagttttcataatataagaggtcatgtttagcttagtataatcgtgagtaaatgtgatgaaatcactattattaggccaactctaatggaacactaaaatattaaatttgatgggattttacaataaatttattccagccacactctaaaacatatcctatttatagcattgtctatagagtcacattattattagtgtgatattatttatacttacaatttttgtatatttattatttgtgtttatttataagataataagaaataatatcattttagtataacttttagtgttgtaattaaaatagaaaaaaattgagtgccaaaattgtatcaataaattattgtgttgatttaacactaaatttaacatttactattggagttcctcttataattttattatttggtttaattttaaagctttgtaatgttttcagtcacaatataattatctttgcatctttgtacctatattaatcaaccttctactattcatataaaaacacaattactattaatatattttctttatattattcttttgccaaaagaatttaaagtaaaaatatttatgtcaataaaccatttactccattatgattttgaaaa

SEQ ID NO: 194823 - DNA, 2335 bp, Cannabis indica
ccgaacggagccggcttccccgacggctcggctatcccacaccgcgccatcccaagccgtaatgggttttggtttggaagctgagggaatgaaagtgaagggcttggaagcttagaagaaccaccatactggaaaatgggtatggtgaatagtgaacaatgaatgaatggtgatgatgatatcatatcatacaaatatgacacgtggctgaactacataagtcttttttggctttcatggaatgtttatgaccattacagtttgtttgtgagttgaagctgactaatttgtcttttgtcttttaccttgttataatgacaaatataacctttgttgtattgttgtgtttttttcaactaaaaacaaaaacaaacttagttttagaacgagtattgttattggacacatttttataaacgatgccttacaattaagataagcaccaataatacttattagtaattctcttttacaattatgattatagaattaaacaattagtttatgatgaagacatagctacacataagagatagttcattttcaatttagtcacttgtatttttgttagacaagtagagtgtagagaagaatgtatagtaaattacaagaaaacaaataaatagtaaaaaaaaaaaaagagaacattgaaccttcttctgatcacctggggcaaaagtcaaaaataaaatttaagtaggacgattatctatttttataataaatttatggtgcttaacaccctttatgaaatgttataagcaattgtgcaatataatatcgaatcttagttattttacttttaattatgaatataaaaattaataactattcacagggcgccactcatggtggtactaaaaatcacagtattattcttatattatgtggacttgaacatttggtaaaaattatagaattgactataataaaatataatataataaaaaataatgttaaaataaattttaatataatgccattttaaatttattgttaggttcaaatcctccataatgcataaagtaaatgaagttttgcacttatgatctccttaaattttacatataaatttaccactatactatacaatacaatttgataatatttatataaaggtcaaaaaaattatttaagtttaaacccttaataacatagaatcgaatcaaatttctcatgagacaaccgcccccaattagtcttagctttgcttatgagtgtgtgtaaatttttaatcttatgaaagtctatatttatataacttttggagtataaattttttattcctagtcaatatgagacaaaccacaaaattattttattcacatctttcaacgaactcacacatgaataaaattgatcaaatttttagactcgacgcaataaagtgacacgttaacatttaaatcttctttcgtgaaaatatatttattttactagcgaatcagtaaacacaatatttttgaactattttattattcgtgcaaatgaataaacgatgatatatctcgcatatatatctttctagtttggttttggttctcatggttatattcattttgtggccacgaacatatgtctcattctatgtgagagagatttaagagaactaagcccccataattctccttcgaatcgatcacacttctggtgattttttaattaagactaaacttgcattaatttaatcaagtttcattgtatcattagaatgagtagaggctaactcacacactgatcctagaaggtctttataattaggttgtcctattaagcctaaatcttgagatcttcaaccagctaggttgtgttttttgtttatattgaccgtaaattttcttgagtttaagtctcgttcttttagatgtcttttcaacttaatctttgtttaactctttggatagtatatgtgttttttgacttcacataatcaatcgagataattgaattaagattagttgtctaacgatattatgtcattaacttatatgtattgacttaccgttatatgtgctctgcgaattatagcttaattatcacaatatatactattttggatcatgtgttttgcagaaattattgattgaactatctgttttgataaataatagatttgaccctaaatttccaaaatagtactaaatagtaccctagactataattttttgtcaaactaaaacttaataataacccgatctagaagttttatgataaaactgattatgtttaacgtatctattcatgttataggaattatcttcaaattggttataatttttttaaaaaaaattatcgaacattgagcttaaataagtcctatttatataattttaga

SEQ ID NO: 194824 - DNA, 1300 bp, Cannabis indica
ctttgacctcccaaaccctataaatatatcaatcaaactctcttgctaaaatcacaacaacaattagccctttaattcttaagcccatccataccactagagagtacaaactcttcacagatatagcagcaatatattattaatcagagactaaaaaaccaagcaaaatggctttttccaatcattatgtactcttcattgctattgtagcaattttggtcccttcaattacagcagttgaatacgttgttggtgatgaaaaagggtggactatcaacttcgattaccaagcttgggcacaaggcaaggagttccatgttggtgacaaacttggtatgtatcaatcatatattataataaaacctatacaaatattattacgttgaaattcatcataaaactattgttattattgtgcttgtgtgtagtgtttaagtacccggaaagagctcacaatgtgttcaaagttgacggtgtcggctttaaacaatgcgcgccaccagctgatgctgccgccctaactaccggaaatgatgtgataacattgacaactccgggaagaaaatggtacatttgtggcgttgctcagcactgccaagtgggaaatcaaaagctttttattactgttcttgatgacgacttggcttctccaaccatttcaccatctcctaccaaagaagatcaaccatctagagcaactactattactaccaccacatttggcttcatcataactactctccttcttgggctgttatttgcttgaatttgatcatctaaagacaattctttttcttttttcttgttttgtcaacaatctatttgcatgtttttcatttcattcattttaccgtgagaagaatttgggaagttaattagtactgtgttgtgatataaaaaagaaaatgttttttaatctcactatatggtaattttttttttttttttatttttttgcaatgcttactatatggattttactttttagtattttttttagaataattagtaattttacctcttgaattttttgactatattaattttgccacttaaaatatacagcttggtaaaactcctcatgaacttttacatttacataaatttagtcattctgttagattttgtctcgttatttcgtttaaatgctgaagtacgtatttgtaaattagcaactttgttctttaaacttcgacaactattaaatcgtacccctcaaaataaaaagagaaagattcaacaactattaaatcatacccctcaaaataaaaagagaaagattctaacattttttttggcg

SEQ ID NO: 194825 - DNA, 1665 bp, Cannabis indica
taccaggcataaaatatgaaaatatcataatctacaaataacatgcatgacacacctagaattcaataaaatctctataattgagaaattatatcaaaaatgcctatttttgacaatatgactaattttctactaatgcacataaaattataaataataattaaattattaataaactgctaatttccatgtctaaatatgcagtcattacagtcttttgctaaagttgatcgaacagatcatctatccttggaaaaatatatttgtttttgatcgtcaacttattcaactcccggtaatctatacatattctcaatgatccgtcattttttctcaacaaataaaatcggcacacccgagggcaaagtactcaatctgataaaccgcaaatcaagcatattttgcaactgaacctttagttcctttaattctgacgataccatttgatacggggccttaaaaactggctatgcccctggtatcaattcaatctcgaaggtaatttcttactttggtggtatccctggtaactcttccaaacacacatccaaaaactcacataccactcgtacattctcgggtcccacacctcctttgtagcatctactacactagctagataacatatacactcctcctgtagcaagtctcttgctttaagcgttgatcttattggaattcgagattgatgaaattttcccacaaacacaaacagagtctccccctccagttcaaatattaacattttccttttgtaattaatggtagcattatacttgactaaccaattcatttctaatatgacattgaaatcttcaaagtttagctttatcaagtccacccacaattctataccctttacatctaccggaagagatttaacgatttaaccttcacgttggagataaccaattctccagtaagtaacaatgtaccaaacccatttgacaacacatcatgtggtctactcagactattaattactctacttgacacatatgaattcatagcaccaaaatcaatcaaaacggtaaacatattgccatcaatagaagtctgacctgtcacagtggaaggtccagcatcagcctctgcttgggtcaaagcaaataaccgagcaggaactatagtatcctctttcttcgtatctagtttttgaaattgtgtacaatttctcttcagatggtctactaccccacactggaagcaggctctagcttgacagtggaccatatgctgtcttctacaccacgggcatttagaataagttcgccaattctcttttccaccttgatagaaactatgataactggggtcatttggtttccttttttgatcactagggtcaaaacccctacccaaactagtaatggaaggcggcttccacgaatctcttctaatgctactcttcttttgattcttagccccttcagcaataagagccagctctaccacttgagcatacgaccgtacaaccccaggttgattagtcgtcacaatcacatctccaactatgtgctcctttaaaccacgaataaacttttcctttcccaagacttcattggctactttactagatgcaaatttggccaaccggtcaaacttagtaccatattcgatcacaatcatattactttggaccaactagggctgcacatttggacc

SEQ ID NO: 194826 - DNA, 1258 bp, Cannabis indica
tggacataaattgatgaacatcttacacactccatctaaaggcaaaaaggaaaaaaagggcacaataatgatcctagaaaaaatgtaaattggtatacctggttttccagatttagttgaatactattaattgtgctgcgagaatttgtagtaagttcaagacatggaaatacaccaagtcttcggtcccatacattgactacaccatgtgtatctgatgcaaacaacctataatagctcagcacaaaaacaaaaggattttattattcaactagttcgttcactttcttagataaatgcaatacattattttccacagaatttgtaatcactgaaagaccgaacgcatgcaaatttggcagtctttgacataaacaaaagactacaacaaaaacctagagcaaacttgagattcttggaccttgcactctaatcactcaatgtcgttaagaaaaaataaattgaacctatgcgagaaaagatcgcataactaacttatctaaaatataatattctgccaaaaataaaagcttcccttttttgtaatccgacattaaaagcaaactagtattactttcacttcactaacctggaatcaccagcagtagaagctatatcactaacacctttatcaagattaaaattgtggagggagagagtaggtcttatttttaatacctgcatcatccataagatcattactattgcacacatacaaatcatccacccaaaaaatatagtacatgtgaaaatagatacgtacttgggctggttcagaagtgatgtaaccaatatcaaatacgagcaagttgttacttctcaatgaactgcacaccacctaaaccacatagatgaattacataatacatcaaataaacaaacgatgaattttaatttttaaccaagaaatcaaaatctctcaggcagcagttcatcaacaaaaacaaaaaaacatgtgttgtcctactccagaatccaaacacaaaatgtagtatgaatccttcaaatatctacttgacctaaagataggttaggcaataattatatttctaaaatcaaatctgatcattaaatgacaatatcataaaccaagattaaaaagtgctactacatagtcattaaactgaactaatgtcgtaaaaattaaagtgcagttaacaacttcatacgggaatggaaatactgaacaagtgtagttaattgtgcttccataggtcaacacaaaaccacataataggaaaaaaggaaaaaaaaaaaa

SEQ ID NO: 194827 - DNA, 1565 bp, Cannabis indica
cattgtcaaatcagtgctactaatctaattagcgtacaaaagttcagttcaacagattttggtttatcttctgttcatctgattagtagaagcaattatgggatactgtcttttaatcatcatctgatgtataagaaatatcatactttaggaaactaaattttcatttctttccgattgtgaagtttttgatactttcgtacattttgttgagatgtttgtaaaatgatatgattcctttccttgcacaattggttctttgttggctatttttctatcttttgcaaatgatttctgttcgtattgctgtcacaggtcatagcattaccattgccccatagaccgctgtttccaggattctacatgccaatttttgtcaaggtatggaaacttgttgagcctcttttaattcttgtttcggacatcggtattattgaaatttttgaagcttgtaaggtctgtgtttcttcatcccattatattgaccatgaacttttgatagctccaatatatatactttcattgtaggatccgaaactaatggcagctttacaagatagtcgaaaacggcaagctccatatgctggagcttttcttcttaaggatgagccagggactgatcctagttttgtatctggttctgaagctgacaagaacatttatgatctgaaagggaaagaactatttaatcgtcttcacgaagttggtacacttgcgcaggtattgaatttgtgtaggtgcggactaatgagttaaatgcatcactttaaattatctgccacttagtgatttgtttttttgttttattatgatatgtcagatctcaagtatccaaggagaccaggtcatcctcattggtcacaggcgtcttcgcattacagagatggtgggtagaaattatctgtaagcatgatctttaaatagtctgttgataggtgatatataacaccttttgtttattgcctaagctctatcctttgtgtgtgcttgaacttcaaatttgtactttgttttgtatgtgaaaatacctatatagctgagaacctttggctttggttttgacaggttagcgaggaaccacttactgttaaagttgatcatctaaaggcatgttgttcataattactttatccacagttcttattataacttgtatttgtaagatgagtttctcttttgtttttcttatggactataccttctcttataggataagccgtataacaaagatgatgatgttataaaggcaacatcatttgaggtaatatcaactctgagagatgttctaaagactagttctctttggagggatcatgtccagacatacactcaggtgtgcaattcttttcaagattttgggatatgttgggttattattctcttatactagtacaaatcctgaatttaatctcaatttagagatggagatagagttgagaagctaaaataacaccctcctataaatattgtacgagagtccacttcagcaattttttctttaacctttacccttgaattttcaatctatccttttgacatttatagttttgaacagaccatatctt

SEQ ID NO: 194828 - DNA, 2650 bp, Cannabis indica
tatatttattttcaagtcttataatatttttgacaagtgctactcaaattttgttgtatttgtgataatttaattatttgttgatagttcaaactgccacgaaaaccgcattccaccgcactattttttacaatgcaatttctacgatttttcagtttcacggtgcggtattcttattatacaaatatcattatccataggaatttgatgttgtgaaatataaggttgataaggttggtgagtgataccatacccaaagttagtatacaactaccctcttcagtgatcatggatagttatttatttttgtttttctgaaattgtgagtttgatcaagattgcttaaagtacttatttttctatatagatattagattctttattctcattattataagatcattcagaaattgaatttattaatttttgatattacttaacttattcaatcaattttcaacttaattgggaattttgattaactataatcagttttagtgaaccataaacaagtttcatgtataaattcatttcactattgaaacaaagattcattccattttcatttacatatgaaatttttgtaaagccaagttgagaatccaaacaagtcaagttcactgtcaaagccccgatgaacattcaacaaccgaacggtgcgcaacaataggtatgtcgaggttcagatcgctctgcaagttcgattcatggtgttctggtatcaccatttaccctgttcctgcaggtgaaaccaaagaaaatatgttctaaaaataaattacagtttctatctttaatctaataattaaaggttagtagtactcaccaaaatgttggcagagattagaccataataataacccttttgttgataagatcatactcagaaatgtctcctggaaattgttgatgaatgatcccttttgtattagaaatttattcagaaacactctaaatattgtttgggagcagctggatgaatacccgaaaggcgagctatgaagtttctttcacttgtggcaaccatgcttgaaatggagtagtttttggcacataaaccattctctctaagccaaagaaaaaagttgtgtcttcgcttaatccgattttccaagtggaaattcaaatatcttggaaaactatcaagtatttctaaagacgaatcaatttcctggcacaaaaagttcacctttttctctaatatttctggactttgactaaggatctttggtgatatgttaatcatcaaacatagctttgagtacgaaattcctgcaccaagaagacaatcgaatcgttcttgcagctcactactggtaccgtgggaatgatttaggacctttatagtcgaagcattttccccgaaaccaattcctttcaagaaatccaatttactagctgtatgagcatgaagtcttgaagattcaatctccttcaaggctttattgaactcttcatcgatatcttggtcagggaaacagatggagtaagtaaccaataatcgactgttcgtatacataatcttattgaaaaaccattcatgtagatccaaagccctcatcacttgaggtaaattagccattttatttcttcccaacacatgattgtaattctgactaacctcttgtaattttttagtgttcaatccgaaatgttctaacaatctcaacactgatatcactggtgtttctaagtcaagactcaaaacttttggattcttaagaagaaaccaacccacatgatcctttctaacaccaaattcacaaaagtaatcaacttttcggagtaagagatcattcgggcaattaagaaaaagttctttcttcctacaaatccattccccaaccttccctttctcacaacctaaatcataaaacaccttaactttacaacaaacctcataccaaccatcaacatttccctcaacaaaactccccatattcaattctacataaacccttttcaaatcatcaaataatgaatcgatatcatcacaacccgaatgaccttccaaactcagcaagtgagggaaagctagacaaataccaactactgagagattacaaaacccatactctttaaacccacgaagtctagcaattacctgagcagaatcctgactaaaaatcgaaactttctccttatacaacctccctaaagtattccatggaaacccgaatccagaaagagcaaaagaaacattcaatacagacacatcttccgaaaacaagaacttttcaggcaaaaatcgaggaacatcttcatgatctatgcctatgctctcaaagaaaaattcaaactcgttgatgggttggtacctgaggagcttactgaagcttcgggagaaagtggaaacatagaaagaatcgatcttcttaataagattgcagagagaaaaaatggagtttctagcaatgtgttcggcgaatgtgaaaggcaatgaccttgtggtgtgaaggtagtcaataaaggcattctgagcttcttgaatcactctatgtttgtacttggaatgaactttaggaaggtctggaaaccttgaaagcttcctcctgaatgagttgaagcagagagaagccgtgggcgaggacaatcaagaaagttttcgaaaagtgcaaagacctcagtggcattattgaggttttttgcc

SEQ ID NO: 194829 - DNA, 1342 bp, Cannabis indica
acagaatcattgttgacatccacttgaagaggggcggctggacgagaaggagtccctgacccttgcaaactaatccgtcttttcaattcttcctctgcatttaaaatctgaaaaccaataacaacagtccccaagttaaaaactattaaatggagaaagattaacgtgaagtcttcaaacatcacaaatctacaagatatacaaaacttcaaaatgcgttccaatcaaagttacacgaatctaacacatacctgcttgagtacttgtaccagattatgtttcttgttattcaaaacttccaacttctcctcaacctccttcttcctgttaagtttatcattcggcatatcctcattctttttagtctaaagaataaacatacaaaaatcaattagtgagcatcatgaacgaaaatttggtcttacaaaagttcttttgaaaagtgaaatgaagaaactgatgtctactaaatgtaatttgaaattttcccatcttcagtttcacttaaaactttgtgatctctaccctatatcagcttaaaaattattgtcactctttcataatataaaaaactaaatccaatccgaaacaactattcaaccagcaacacatgaaacacagcaaattccgatcacgattccaaaataacacaagtgtgcactaagttgcttactatctcatattcaaattctgcaacacctctaatattcttccatttattcacaaatacataccaagtcttaaaaatgaagctttggcttctgttcttaacctcttcaatgataaaaggaaaagaacttcaccaacccaattaaaatatagacaccttcacatacctcagaaatgggttcggcaacttcatccactttcacaacctgaatttcctgtggttgtgcaccatcatccactttctcaacctgaatttcctgtggtttcgcaccatcatccactttctcaacctgaatttcctctggtttcacaccatcatccactttctcaacctgaatttcctctgttttggaaccatcatccactttctcaacctgaattggctctggtttggcaccatcctcgtcaatcggatcacaacctccctcaggctcattagatttaggaccagacaacgtatcaggaccttcagtaagtttctctgaagacccatcaagattcggatttacttcaaccttgatttcatcggacggcccttcacccaaatcaacagaaaccttctccaaattcacttgagcctcgggaagggaatcgccaggagccccattcgatgctgtattttgctgatccgaagataaattaagattaatgttgagattaggattagggctag

SEQ ID NO: 194830 - DNA, 1141 bp, Cannabis indica
tttttctcttgcaactacatacaattggccaatacagcagatagatattaataatgatttcctaaatgggtacctacacgagtgtgtttatatggcacaatcagttggttttatagatcataattatcattctcatgtttgcaagctacacaaaagccatttatggctaaaaaacagacccctcgggcttggtttgataagctcaaacactctcttaagcaatggggattttgcaactcaaagactcacacttctttatttttctgagaaagaaaggcaaacttactctactgttaatctatgttgatgatatattactcacgggtgaagattccacttttattcatcatctgatttcccaactgcatcaatagtttgctttaaaaaatcttggcccaatgaggtactttttgggttttgaagtcactcaaaataagtctgggatctatcttacacaggccaaatatgcttcagatttgttggctcgaaccaacatggatgcagcagcttcaacccctactcctatgtgtccgaacaccaaattgtcatctaacatgggcactcctatggacaaccccactctctacaggggtgtaattggagcacttcaatatctgaccctaacaaggccagacatttcctttgttgttaacaagctctctcagtttctcaagagccccaccaatgaacattggcttgcttgcaaaaggcttctttgatatctagtaggcaccattgattatggccttcacttcaaaccatctgcagcacttcaactaactgcctacaccgatgctgactgggcaagttcaatagacaacagacgctcaacatcaggttattgtgtctaacttggtggcaacctcattatgtggagctctcgaaaacagacggttgtggctcgttcaagtacagaatcggagtatcctgcaattgctcttgccactactgaacttatatggattcagtcctttttcagtgaacttgatattcagcttccctcctgccccattctttggtgtggcaacttaggggcaacatctctcgcttacaatcttgtctttcaccaaagaacaaaacacattgaggtggatattcactttgttagggacaaagttcttgatcacacccttgacattag

SEQ ID NO: 194831 - DNA, 3705 bp, Cannabis indica
ccagcatccttaagagtctgtcccatttcggtcaactccaataatttttacttggaaagacttgagaccaatctgtagtttccaatccaatgcaaacctcagtgagtctataaatctataaattgactgcactttttctatgcttgaaaacctctgctctctctttccccatttgataaccttattagtatctgaatccaaaaaatgaaaaagggtaattaataattcagtaattaattaattaaattattatattaaagttattgtaagaatctactacctgagtagcctgaggatctttgcctgtgtttaaagcttgtttataattagattgaatttctctactaatagtagaaggcttaattgtataacttgctctttttgcagcttctgctggtttctgcactctatgatctcttaaagctagattcttcagcctttccttttcctttatacacattaaatcacatcatcagttagcaacctttataagaaattatatgtaggagattagtataatgaatactcaatattatatttttttagtacgtattaatacttaccctattttggaaatggaatgttggtggaaaaaaaaggtaaagaaaaatgtagaaacaattaaaaaaaagtaggtaaataattttttctttttctttttttttttaaaaaaaaaagactcatgttgtatggtatggaatgacaaaacacacagaaagaaaacttaattcaataaaactttccatatcaaatgtaattttatttttattcaacacactttttccaaacattaccttaatgttagttacattactattgctatggttaattctatctaactagactttcagcttttgattggtctagattgttaggtggaccaaagttgataactgagtcaacatatatcaaaactaaaaaatcactgttttaatatatttatgctaccaaatctatataaatatataatcatctatagaaacctcgtcaatctgtaaagctgcaattgttgttctcttaaacggcgatgagcccttatcttttgttgttgcatggccttagaacaaccaaatgccaaaccttgctcttccattgttctctgcagaatctccaccagctcagctggggaaattggcccttcaatctataattaagcaaaactacctagctttattaataagtacatatatcataatttaacaaccaaccatattaatgatcttcactgtttctatttatatatatatatatgtggctagaagtaattaatgtttatgactgtatgtgcacacgtgccatgctgttcatcatatgctaactaattaatgtgtggaaaagagaaggcataatataatctcaatctcatatggccaacatatgttatcatcatgatatttgaaataataaatagtatcatcttattagtgtagaactattgcctgcatgaataattgtacttttttctatttactgtttaaaagaaactatacacataatttgtaaaaaaaaaaatggagaaaatgacaagaaaactttactccttattagctctaactagaacagttgtacaatcatgattacttgttctctctaaatagtgaaattgtaacactcacaactcctgaactgtttttgctttatctatttattttgtttaagactataatattttcaaattagattgacattgatcatgtggttgtcacgtgtgaatttccaaactcaaacttacaaattgaaagtagttgtaattttgtaacactcttaagttactaaggtgactagtttgtggaaaaagaaaacaattaagttttaaaaacagtacaagttgttttcaaatcccatattaatggcctaataagaaactaaattaattttcaccccatgtaactgaaaatttgagagccaaaaaaaggttaattatgatagttgggatgaaattaaccgttttaactaacctgttgcaaggccctgccctttatcagctaaagtaccccaacaaacaaaattgggatcaagatacactcaactgtcagctctgaacaaagtgtttctctacagaatgaagaagtgaaagggtgttgaggtgaatgaagatacatgaacaagaacttgttttccacttttgctatctctaaagcctccatgaaatgacaagtgtaaaagcatggatgagtgaagccatattggtgttcaaaactagctacaaaatccatttcttgctgttgttgtgaatattcatgtagtagagttggagatcttcttgatcctcctcccatggctcttgaaaatcccccgaaaatgcttcgcggtaggctcaccattcggcgaacaatcccataataagaagccattgatggggaaaaagaaacacaaagaaagtggtacaagtggtattagtactactacaattaggctctttggctcacattcatactctgtagttgaatatatggttagtttagtaaactattaatcaaagtatagcaatcaacttcatatagttcctttttctttttattttgttaaagtttagactaaagacacaaagagaccattgtggattgtggaagaatgtgaagattcttcattcattcattcattcattcttttaatttctggataatttaaagtagattctcttgttatgaactcttcaaccatttgttatgccagaaattcatgcaattttttaaagccatataaatttttagagcatacaaaactaaaagtggacatagaatacaattctaatgcttttcactatagctttcaatatccagtagttttacatatattctgttgttaccactaaaagaaaatgtaattgagattattctgagaattatatttgagttttttttaactgtcaaatattcaaattaagtcaagttaattaaagggagcaaagaaaaaagctgcagaagaattatgtacggcagatttcattttccacacaacttaacaaacagtactattttcttttactttagtcattagttataaggcccaacttaaaggtacaatgtcaaagtttaaactgtgtcttaaatagaaaagcttaaaaaagacttaaacagattcattatgttgctgaaatcatcatcattgtttcttctttaatttatcaaatttttagtcacaaaaatagaaccataataagcagatttaaatgcttgaatacccttttcaaagattatcaactatctctcattttctggatgtagatatactatatatggccattggccacatatctttttgacctccaaacaaactttatcaaaataacaataataaacctttgaactttataccaattgaatatatatatgtacatacataccccatgtgtctaatgataaaaaataataatatgataatttaatactagtttgaaggacatatatagtggtgctttaacacagtatttctcagcttttcttttttataaaaagtgtaatatagtgatataccttacaaacttgctgatagtaatcacatggtctccactccaccaaagtttgaaaaatttacaaacataaatatatatttatatatagagagaaaaagttttcattattatataaatgtgtaatcatggtgatatttatttttagttattagatcgatattaaataattgcgattaatttaaaaatattaaaaaaaataaataataaagaacttagtaactgtatacttt

SEQ ID NO: 194832 - DNA, 2244 bp, Cannabis indica
ctggtaaccttctttttttaggcagccgccgccgctgtggctactacctttatttggaaataatgcttaattaatttctaatttagagagtagggttttatttattatatttgtgaaaaaagtgcaaatgtgacacttttatctatgtgggtttatcttaattgggttgtgtttggattcgattcgatcttcctagatataacaaaaagaagtttttcaaaagacaatctctggaactgaaaaccagttttcatttcagtgtaaatgagataaagatgggaattgccatttaatataaataatttcttcacatttttaattacaccattctttttgacttttgttcactatctttttttcccctcccccagataaatgggcggattggctaccaaacctatctaggtaatttccacatatttttcaatcttattaataaaaaataaaaaataaataaaaacatttttttccaataaatacagaatcctcatttatgttaatttttttattctaagaaaataaataattcaattataaaaaatacaaaatcaagtgttaaagacaatgcaaaatggactggagctaaataagactatcaaacttaaaaaatatttaaagataaaacaatacgagctaaaaaatgagtgataatattataagtccgattacaatgagagaaagaaatatctaagaaagacagaaatgactctttaatgtcatgcactatactaaatttagtaaaaatctcttattattgacgggagcctgattcctcaccaccctcctaggccattttttctttttttcctttttgaaacgagacatatgcattgtgtttaatttcataattttttttttgtcattaggttttgaaaaatttcatatctttctacaatttcaactcatattcaaacctagtacgtagatttgttacatttaaccggttacattttttttttttcagttttagagctgttaaacttgttactgagatgagatctttcaagttgtaaatccaaattcaacccaaacacatctgttataattcttaattcatttgttgaattatatagattattgactaattgactatttttattcaccttttgaaagtcaataaaacatggggcataattggagtaacaatgatttactacactttattattaaaaaatgatcaatagtaggaaaatagtatgttaattaaagtaaagtatatcgttttgtaattgtacttttggctctaatttttaatatcaatgacaacatgcaaatatatacgttgaacacatcccaaataagattaatccaagtagctgattattcattttgggaccaagtaattctgttatgtatatagtaaattaacaattgaagattttggtattatatttatttatatatattcaagaataattttgaagcaacaaaataaattataggtgatttgtttttctttttatatatattatatacgctactgttaattattgttcacgcacgcacgcacttaattgggagttgggaccaattgaatatgttattctgtgaacaaagtttggtcttttgaattttgatgatttttaagcaataattttctagatctccttttattaagtggtaattagggcataataccttttgagttgtaaagctccattaaaaagatatatgtatatatgtctatatttatacatatatggagtattgcaagttgaagctactcaaagttgttataagcattcttaatacaatgtgttgagatcacagattgaaaaagcctatcaacaaaagagctaattaaataattaggtttacaaaaaaagaaaaaaaagataaagctagataaagccccatataagttttggatattggttttattttaatactaattaatagtaaataataaacatttttctcccaaagttggtaatggtatcatagatattagataatagagagagaaagagagaaaatgctgtctataagatatgcaaggaccacagtgattgtagcttcaaaccaatcttggttcgctaattatttctttaatgaacttgtgtgttaaacaagtctcatttattgttcatctaattaatctctttccaaaacatacattatataaaatcaattttgaagttgatagaaatcttgcatggttgttcaaattggaactcgaatttatatatatatatatatatatatatttatacagttgtgtattccttcttgtcgaagattttg

SEQ ID NO: 194833 - DNA, 1838 bp, Cannabis indica
ttagcgattgaagaatttggaaataaagcattcagtttagctaaaaacttagctggaattctagcagggaatttgggggtgagttgcagctatttcgaagagaactgtcctccaaactcaagctatgttcggctcaacagatatccgccatgtccatactcttccaatctccaaatgtttggcctcgtccctcatactgatagtgatttcctctctgttgtctcccaagacgatgttggaggcctacagttatttaaagatgaaagatgggttgccgttaaacctaatccaagagcccttgttatcaatattggcgacttatttcaggtatacgtacagctaattcttaatttctcaaaatgaaagcctactaatatgtatagagattgtctattgatactctcctttcaaacgaatgaaataaggaaataaaaaactcttgaagacttatcatacttaccacacaacacattttcccttttggcaggcagatgtatatgcagcaccagcctatagcttctttacttatatataactgactaatttttacatatacatatagaaatatagaaatctgatgatctatacatatatttatatatatatcaatatataggccttgagtaatggggtttacaaaagcataaggcacagggtggtggcaagcagtggtagaagtgaaagattttcggctgcatatttttactgccctaacaacgatgcaagaatagagagttgcagcgacagacaaagctcactttatagggactttacttttagagagtacaaaagtcaaatccaaaaggatgttcaagacaccggtgataaagtaggcctcccaaggtttctaactataatcaataaaatatatatatcttaataaagagagacacataataattattggccgctatccctacaggagtagtcggcagttgctataattgttttttcttgggtttgcgtgtgtattatatatacgtgtataagtgatcagtatatatattatatatgcaataatgacttgacagtatatatctatataatcaatcctaataaggatatgaatttgtttgccggttgacaaatatgtcatctagaatatatggaaaaaaaatccctatgctataattagggctgctttttggccaataatgtaatatggctccccatagtattactattacgcttttttgatgaggcatagtgaggctcatagtatcatatacttttttgggcaaattaactacttgatgaggctcatatatgtatcgaaccttttttgtaaggcttaattgaggccataattgttccatttacattttattgagggttgttttgatagtatacatagaataatattaccaatgaaataaaacctaatattattcaactagttaatatagctactttggtgcgataaataaattttttagtattataataaaaaataactacttattatattaaaaattattgttataaaaataaataaatagagtggtatagaaaaaagaattagggtgttcctataatgtatttcattgtatctcatctgttttcattattgtatcttattcgctttcaataccatatttaatttgttatcaccaccgtatcgtattctttgtcatcgatcatcgtcgctcactcgtactcatcactactgttattctcaaatatatatctcaatcttagattctatatctccaattttttttttttaattattagagaaaattcattaatatatttaaaatttatatgataatatgaatattaaattttaaattatttatataaaaatatgttatgattcatccatacggaaggttagt

SEQ ID NO: 194834 - DNA, 2345 bp, Cannabis indica
ttttttttttttgatttttttatcatataaagtttttttttcctatgttttagtgggcagatctttgtaaatcttatttaagagaagcaagatggtattatgatggatacacaccaagatttgaagagtacattgagaatgcatggatatcaatatcaggacctgttatactatcacatttatacttttttgtagtgaatccaaacgaggaagatgccttattaagtacttgctttgatggataccctaccataatacgccattcgtcgatgattttacgacttacaaatgatctcgccacttcaacggtaatgatcacaacttacaaatttactgtagtgattattttaatgtcgaaactaatcaccccgtttaataaactattaaaattattattttgacattttaaactattcaaaacttccctttaaacttgtgtgtaaaattctttgtaactttactacatactacaaataaataggtattaagctccctaaattttgtaactaataagatggtgccccctaaattattagccatgttaaatatttcctctcaactttgaatgctagtaatttatggtacttttgttagactttgttggacttccattaaataattagcaatcttacctcttaaagtatgatcactatcatatttttcgaagggaatttttagcacagtcacatcatggcccctgaatttctattaaagaaaaagaacatgatttggtagtgataaaaattcagggagcaaaatatgatactgaccatagtttgggaataaaaattgctaactactaaacggatcgtcccatatttcactaacactcaaaattaaaagggaatatttaacatcagccaagagatgtctttgctctgtgcccccttcttgttggttggcacaagccctagtagtagtcattctttctttcgatctgctaataagttaggggacatgatttttttaggataaatttcacgggcaaaggcttatttattctattggtaacataaaaaataataatctacctaagaatttttttttacataatattatatgtacttttttgcaggatgagttgaaaagaggtgatgttcccaaatcaattcaatgcaaaatgcatgaagatggtgtatgtgaagagaaagctcgtcaacatattaagttattaataaataaaacatggaagtttcttaataaagattgcataaatttggatgatgattactctccaatgttctctaaatctaataataatattaataaggctttcattgaaatgtgtttaaaccttggtagaatgtcacattgcatttatcaatatggagatggacatggaattcaagatcgccaaacaaaagatcatgtactatcattacttattcaccctattcttcttacccaataggaatcaaaatttaaattatatgtatttgttagattttcaaataactaaaatatccatgcatgtgatatatgatgtcattttagtaaagttgagacgaagtttgttgaagcttagcatgaatgatcgtcgccactctcatgtacgctaagtcgagcctgattataagtgagccaagcctgtgcttaggaattccactccgaaaattcattgcatatactatataatattagtagatatggaggagaccatgacagagttttgagagcaaaaccttatgtatccacacatttttacatttaaagtggtaaaggtaatgccttctccaagtatatatataatatattaataacttgtcaacattatttcttgataaaagttactagaatttcctattactcattaaaccacctaaaaagtgtaagtaatgttgtttctataagtattttaactgcagaacatctaggccttgtttagtatagtttttacttctactcatagcttctcaaaaaggtcttttaacactcttaaaagtgcttttttttttaattctaaaagctaaaaacaacttaaccaaacaggatcctagtgtcatgaaaaactctctaatcgggagagtcttgagtacaatcccttagattctaataagcttgtatgtgaatcctatgagcaattgtgatttgtgtaatactaaaacactcgattgccatttagattaattgattctgaagaattaacaattcttcatcgagcaacataattgtgggtctcctcatcagagttctagcaatggcgactctttgcttttgcccacccgaaagttggcatctcttttccccaacaaccgtatcacattcatcgggtaaagtgtttactattggataatattggcccacatggatcaaatgtacagcctattaaatttctaaaccaagtt

SEQ ID NO: 194835 - DNA, 735 bp, Cannabis indica
ttttttaaaaaaataatcataaagtttaacatgtatgcttgattttccaaagaaatgtctccatatccatagtgattgatcaaacatatatatatataaatatttatatatataagtatttatatatatgtgaacatcggatcattaatagaactgaataattaggtttgaaatttgaatattaaaactgtcttctaacttgtatgcagcagcttaattaatgatatggtacaaatatgaatatttctaatatagtactggtcaacatgagatatggttggtgtaatttattactcggttctctacatgagttcttataaaaatattaaatggcactcataatgtttacactgcaatttaatatattaaattttatttattttactttattataagtgcatttgataagaattgttaaaacatattactactggttaacatattattagtgtaataataataatagtatttattatgagattccataaattttagtttcataaataacatgagaaactattaattaattattataaaatgccacattacttattaagggatgcctaaaagggtcatatttttaaggtataagatttagtaacaattttcttataattttacaataattattaacttaaaatatacgagatcaacttgatcactacgtggtggtactaaaaagtgagtattaaaaaaaacatacaaaaataattataaaaaattataaaaatatga

SEQ ID NO: 194836 - DNA, 840 bp, Cannabis indica
ataaaatatatacgagtgtttaccatctagcactaattatcaatgggggcacatagaaatgaaagctaaacaaaatttggtcccatcccaattccaatcatactaggtgtaatagtaccccaaaacatcaaatttagaagctgctttctgaagcaacaacgaatgcataaacataaccccatcattctcacccactttgcactcatattccaaaatcaaatctccttttttattctacacatattgttgtttttgcatcaccaagcaaattatatttttcgatatttatttgaagttttttatttttgtactttaaaatatttttttttacgaaaattctcataaaaatctacatagcaactaatagagcaacttaaatcgtaattacaatttacataataatttatataatagctattagaataacctaaaccataaattgaaaaaaaataaaaataatatataaaataattctccttaaactatataatataatcccttttaaaaaaaaaaaaactacataatataattgttacaatctttcatgcatgacgcactccaaaggtcaatgatcaaagtaggaggataagagtggtcatgacacttgccccttggacctaagttatttgatacaaagttataaatgttttattttttaaaatataaaatttaattatcttttcagtgtatctaatttattgaaatcgaaattactgagacatttttataaacttttgttattaaccaacctgtaatttattattagtttctgacctcccaaataatgtgaatctagaaatttttattttatacaaacttatagatttttcaattatcttt

SEQ ID NO: 194837 - DNA, 1546 bp, Cannabis indica
agagagagagagagatttgaagagagagatggtgcttttcttgatttttcttaatttctaactaataaagaataaatcttaaacttatcaaataaattaacttcatattattcttaataaatcattccactacaagacaaaataaagagatggcaaattactcatttgccccttgcacacaccaaaaaatataatttccacctaagagtaatttgttcatttttaacaccacaaatgatcccaaaattaccaatgtctatctaggttgtcgcgttattactaaaatactaattcataagaaaatgtgattctattgatcaaacgtcgcgttccaatgttgctgggcataaaatataaaaaaacgtaaattttcatatatagcataaataatacacctagaattcaaataaatctccatatattcataaatcatacttagaaatctaatttcataattaaggcctaattatctgctaatttatcatattaaaattaagcgatctttacaattcctttgcgtccaactaaatggaaggtagaagattgtgagattcttaagaagatcacccagatactttattcttgggcaagtagacatttgtcttttgctggaagaacccacttgattcattcagtttttcttgggctgcgcaattactagatgagtattttttctcccccagagtggaagttgaaaagttgtatagagactttctttggagtttgaagggtaataggaggaaaattcatatagcttcttgggataaggtgtgtctttcgaaagattttggaggtcatggttttaaaaatggttctaaatggaaccatgcttttctggctaagtaaatctggtctattcacacaaaaaaaggatatgctttgggtcaaatggatcaacactatttacttaaaaatgtttctttttggtcctattgcctcaaaccagatttgagttggtattggcacaaacttttctatttcaaacagaattctcttgtgttgaaattttggcagcaagtggcaaaggtaagttcgaagatggaagactttacaatggctctttggcctattctcaggttttctatcatagagttgtttggagttctttgaatctttctaaacatccctttatcctttgccaaatggttaacaaccaactgctaaccaaagataagatggctaaatttcatatatatatatatctagagtcttttaattttcctatgtgtggagacagtttggaaactcatgaacatttcttattctcttgttatctctcgcgaagagtggtggagttgttatttgcttggttaggctttatagcttggcctatggactttgaaggttggaaaacttgattgtctacaacagatctgaagcttatctagcgagttagcatagcaactttagcagcagctagctattgtatctggctcaacagaaatcgttgtgtttttgagaactgttctagatcagtttctcttatagtcaaagatattaagaatggagactagtatggtagaaattgagtatttaacctatggat

SEQ ID NO: 194838 - DNA, 1645 bp, Cannabis indica
atatcatacatataaatgtcttgagattctaatcacacacagtacttagcataaaaattacattaataaagttgaaaggtattattattattcaaccagcgatgcatacaactttgaaattagaacgaggatactggcgctattggctaagaaagagagagatagagaaaggaaacaaaattgtattatattaatgtcattacagatcaaaatatagtatagaaaatatgaaggaggagaagagaagggatggaggtggggtcaatcttttggacatgcccacgtgctcaccataactcattaattagtagtttaattgcaagttgattagagattgatcagaaagtcgattatatatattagagaagtgaaagagataaagaaggaatcaaataaaaaaggaaaaaaaaatactggggcctggtccctaatttagtcctctttttttattcgtctatatctttttgtggtgggaaattgttgcttgtagagagaggcaattatgaggctatggcatggcgtagtttgaatttttcatcacccatggagttggagatttttattttttatttttttgcctttaaattgttttgtggattctgtttttcttgactgttcatctttttcatttgtaaagagtgacatccacaaagtatgactgactcatattcgtgtaagtgtacaaagctttgtaataaaaaccttggccactactttcacatcatttgtgtatggagaatgaaaatatctacattttcattatcttttttaattttcttttaactcccatattaattgtacaagcataactgagttggaaaaccttcacatgtaacaacagtaatcagttgatgtctctcttgacagctttccaaattcaattacaatttatgtagctctgttacggtgtttaaaatgagtttgagacattcttaagaatatcccttgatatttttacattaatgagatcagagaaactgccaagggaaataaataggttcatatttagacctaattttttttgctcatgaaattatttagacctatttggttagaaagaaaaaattaaaaaaaaacaggttcgttggttcagagtacatgtgttggcttcttgtaaaggacaaagatcggtagtgactgttagtgaaaaaacgacaaaaactgaattgtatgagattaagataagaggaatctgtgatgctaaagtccaataaccacgggcttgttgtaatcacatgacgtgtccaaatattttgtctttgtcaggttcttgatctcctaggtgtttcttaaccccacattttattttgacttcaaaaactaatcaacttcttatttctttatttattataatatctaattcttttaaaatataaatatatcgattttcttcattgtgagtaatacaatgataaaatataatttattccttcgcacgcacaaatttttatgaaatatttataagtatgaaacttaaattagggacaaaactataatctaaaacaatgaaggttaagctattcactcagattgatcaaacataactatgctttctaaaaatatgcaccccaaatatacctcccatggactttgaaattgggcttacactatgtgtaggtttattagaccactattatattatatt

SEQ ID NO: 194839 - DNA, 1494 bp, Cannabis indica
gattcttctttctatctggctcattatctagagattgatgaatctttataggttttttgagccttttaaacggacgagggggtgcttcaagctttggtagggcatctggatcgagtaacttcgttgttgggcgagcttgtgcagcctcaaccatcgattgggcagcttttgcaatgctaattgaagcagaatcatcattgttgccttcttctgtggatacattatgcctctgagatggcccaggtttttgaagacgacgttcaaatcccttcagcttatgaaaaggagttaaaatccctttccgaactaattcgtccctttcctagcatatcaggagtatataatgttagtgtaaagttgcaaacatgaaatgtctgttgtatcttctgaaaaaagaaaaaaagaaaagacaatttgctagtgttggatatatgaactcactgtttcaacaaacccagtagaagctgcatccaagactgcatcaaaatcaccatcctcatcaaaggagacaactttaagccgcttctttgaagttttgcttgttgttggaacttctttcgacttccttttgtgtttaaactcttccttgacaatattcgatattaacttgtcatgagcaatacctttggaaggtttgttcttgtgcaaatctgaaatctctttcttgatctgagcttttgttttctctaaactttttaaccgatcagtagctaaagcacgatgaacatctaaatcattaggggattctttagggctccctgtatccccaaacgtcgagctttcatgaccatcataagtatcatcttcattaccatgtcttccttgtgtgacagtagaggcaacagcatctatttcaaattctacagctctcaatttacttaagagttttgcctggtttgaagatggtggatctacattttctgaactctcaagaccattcttatcagtgtcttgtccaatttcactaccgttcccttcattttttctcgcctgacagtgaacactcactattgtcaaccaaaaaaaatttcaaaacaattttccagtaacacattaaccaacaacaacaacaacaatgttcttattaatgcaaatatttgctccaaattcactcattacttaatatcaacgaatttcccttagcagaatcatgttgacacgcattgtttgaatcatatcagatattgattttttttttcttattcacctactcgaaaatgagcataaacaagtgaattcaggatgattaataatgcaaatatttgctctaaattcactcattacttaatatcaccaatttcccttagcagaattatgtctaacacgcattgtttacatcatatcaaatattgattttttcttaatcacctactcaaaaatgagcaaaaactagtgaattcaagatgattaagaaatcagcattcaattcaacgttcattcaagcaaaccaacggatcacattccactaactaagtgactactaggaactaaagc

SEQ ID NO: 194840 - DNA, 1348 bp, Cannabis indica
tttttttaaagctgagatgttttacttattaatggtcacttacttctgtagcatggtattcatccttctcaacatgtaacagtaacaaaacatttcatagatttcttaagagcataatgtcatgtacatccaattattattaaatgaaatacacataatatttactaaaaagatactaacttcaaattttgtgtcctttattattgaatgtttggatataaaatcacacaattaaaactgtaatcatcaccaatatttcattacatgtaaaattactcaatttgttgcttcacattgactcatttaaaaagtttttcagttaaagattacttcctttcaacttcacacactaaccaaccactcttacacattaatcttatgaaaacgcatcttaaccaaatcaaagcagaaattatgtacaaaaatgattatatataacaattatgatcaatataattctaaaagaaatacaaatctttcaaccaaaaaaaaaaaaaccccctcatcttttgagacatttctttggttaaaaactaactactttttttggtctcaaaattaatcaccactaattcccactaacaataaaaaaaagtgggaagactagttttggttaacattcactaatggtttctaaaacaggtttccataatctgttattcccaatcggacggcccagattaaatccttcactagcaatatcattaccaatctcttcgaaaacactactcactactaccgaaccctccaattcctcctcggccgccgcagtcgccaccatagccggcgaaaccctagagctgttcttactctttttcttctttaaagtagctgacttcacaatctccatgtccgagtcagaaattttacgattgaccctactcataggaacaagaaagtacacttttttagcaacgagatcatcctcggctctcatggccgagtacctaccagtccttcggagatcttcagccggagaaatgacgtggccgggctcctcctcgagcatgagctcggctgctttcaggggaagcttgactgggcggagaaaattccctttagcgtcgaaaagattggctgttggtagttgtggatttaccaaaacacaagacgataacgaatattggttccccatgtgttggacccttttttccttttctgaattgatcagtggtagtactaatagactcttaggtagagatcgatgtaatggaatagaaggaagaaattttagttgagatgtgttgtgttgtgttgggttatagtagtagtgttagtgtgggtgtgtgcgagtatatatataggttatataaaatatgagttatgtggtgtgagagagagagagaga

SEQ ID NO: 194841 - DNA, 1482 bp, Cannabis indica
cctatatatatttcatcatctcacaatctacgatttgtacctacgcttcctattttctttctcaattactcactatcgtatggaatctataattagcgtgatgaataccactctatcactgtctgagaaggagagagatgtccacattctctctgcaaccgatcttcaagactctgataccccaccgaagtttttcgtagtggctagatgcctatcttcttctgttaatccccaaactttcattaagaagatgggagaattctggagtaacaaatgtcgatttgaagttgttgtttctgagatgcactctgaccttttttttttaacaatggcatgtgcaggtgataaatgcagagtactttcgggtgaaccttggcattttttcaaccaactcatactccttcattccccagcatctctacaatctgtcaagaaggaggatctgttcaaggctcaattttgggttcaaacacatagacttcctttcttaagtaagtccagggctttggaaagaaaagttggtgaatgggtaggagagttcattgaagtttatgaagactctttacatgaaggatggggttcttttttgcgcatccgagtattaatagatgtcactcaacctttgatgcgaggcaagatggttactttgccaaaggtccaagatgaacattggcttgagttttggtatgagaacctccctactttctgtttgcattgtggtattttgggtcacccttttgataagtgtaaggcttttctggagttggttgatagtggtgttgatcctgatttgccttatggtcctcatatgattggggataagcttcctaaggccggttatgataggtaccgtaatgatttttctaaagctaatgcctatccgtttctcacccgtttggccaaaaaatctattgcctctacccttcctgaactttacactaaccccaatatagccataggtgctatgccacaaccaaagcccctcactatagtggaatcgaacacaccagaccaatcggctacacccaaaaacaatcaaagttctgaaatgccactaccttttccctcatatataccaactgccttccattctgctagcagctctgcaaaccacattcccaacccattacctcctacccaagtccatttgccacaaaacaactctctgaacattgataccattacatcctacccttccctcccccatctcctctaagcctatatgataacagccctgtttcgaaaagtaaaggcaaaagcaattgtgatgggtgatgagtctactgatttgggtgatattggcaagagttttaaaaaggcaaattgatcctaaaaatttgcgaagtgtcctgaaaagatgtagaggtaacaagagggataaccttgatatggaggagatattcagcatgtttctcattgctcaaaggattcagctgataatcctacggtttcagcggaggttgcacatcagcagccccgcgc

SEQ ID NO: 194842 - DNA, 1346 bp, Cannabis indica
tctactccttcaaattgcaaccccaataatgtctttgacccaactaaggtacttttatcgttgtcattgagaattattatatctaccaatacatgtgttatatttcgtgttgtattgtgttgtgttcagtgacggacccagaatttttgatctctgtgggggcttaattgctataaaaatatttattatttactttacattaaaattgtaactattttgtgggagctgtttactattttgttgtataattatttaactaaatagaagatatttaattttttttcacactaactttttttttactggaggctataggccccacactcttattaccgtgtccgtctttggttgtgtttgtgtttacctaatcgatataaacacaaaatgtttatacgagaaattagggtttagttgcattgtccctatgtgttgtatttcgtgttgtattgtgttgtgttcgtgtttacttaattgacatgaagagaaaacgtttacactgagaaattagggtttgacaaatgtatacatgtgtgtagatatctgatttgataaagtctatggaagaagaatggacaagtttatcatgtccaagcaatgatggaactgagctttgggaaatacaatggaacaaacatggaacttgctctgagtctattcttgaccaacatgcttattttcaagcaagtcttaaccttaaaaacagtgtagaccttcttcaagctcttaaaaaatcaggtaactaaattgtttagtatcgaatttcacataaatatgttactactaatgttaaatttaattttgacttgtatatatatttataggaatagagccaaatggaaagttttatgaagtggagaagatcaaagaggcaataaagaatgaagttgggtacacaccaggattatcatgtcacaaaaacacagatggtgaatcaatgctttaccaagtttacttatgtgtggactcttcagcctcaaacttcattgaatgccctcttttccccaaaggaaaagcttgtgtttctcatgcactcttcccttcatttcaagccatcactaccacaacttctggtatttattattccaaataatctcgtcgagtaatgatatgtgcacacatactttttacgccgaaattttacctttatttaggtgacaatgttctttttaacatttgaccgattgagaaaagtgtagaatttcagtgtaaaaaatgtgtgtaattatttgctcttgatgatgttgttgtaataaatttggatcttttttgggtgttgttaattattagagggtaacatatttaactttcttttctatgaaaacaacattgttattattttttttttt

SEQ ID NO: 194843 - DNA, 748 bp, Cannabis indica
ttataacttttgtgatcctatatttattaatttattcaactttctggcaaatgaataggtaagtggagaaacttattcatgcactttgctaaaaaattaaaatgtggtatagaaaactttatagttgctgaactctttcaagaccatcattttcaaccatgtcagccgcactcaacattatgacactcacaacttggggaaatttgccctcacttctccaaacactaattttgtgaccattcatatgtttttagcaattgtactcttatgttttccctcaaccatctcttcttcgtataaacatagtgttagggcatgcccataacatatatgttgtgtattatagtatatatgatgattttcttttttatataataaataataataaaaagcaatattatattttattgaaagataatataacaaaaaatatgattttaatgtaacttttatgtaatggtcggtctataatgacatatttagtattggcgatcccttagacataattatattaaaaatagaaaaatctaaaagataaaatagatctagattaaaagcaaatacatatacataggtccacacaaatagcacaaccacacaaattcaattatttgatcacattgagaatgaaggtatatgtctctttacaaataataaaaacggtataaaaacaaaactttttgaattcgacacattatattgaattgttgtgagatatcatactcttgtctttttaaatatgtttatt

SEQ ID NO: 194844 - DNA, 845 bp, Cannabis indica
ttaaatgataataggtgattctgcttctcattagctttgctttgattttgatgctgggacgttagtgatccaatcagtgaattttttctgcattttggttgtttagcttgatatgcttgatatagggctcgcttagcattgatttcatttgttagatatgacctcgatttgagtttgatgaggctcgattaggggctcgacaatagtcttattggtggaaaatttggccaacgacttgatgcgggctcgataagccttgataattttttagtattttttttttcaactcaacgatggcttgattcgggcttgacatgggctcgacagagtagtcggattgatcttgttcactgagcttgacaagctcaaagaaacctcgacagaggctcgataacatattcaaaatttaatttatggtctgagcttgattgtggctcaattcagatgtagcggtgatcagtgactctatccactataagaatttgtttgggttataaattctatctgtttacttgttttcattaattctacctgaaaatcaacaacccaaaagttctaaaacctaatatgtggaggtctctctcattcaaactatatctgttgcgcttgtcttcttcaggatttcagcaattcaatctcactcgacaatctgacgaacaagttattattcgttttctgtacaatttcatcattttcagctgctgctgctgcttctgagatctttctagggttagggtttttgcttctgtgaatcacaaaattgtgttgtattttattcgattgtaggtttagggcttggaatattactattattatctttttcggatgttatgttatttttcttt

SEQ ID NO: 194845 - DNA, 1617 bp, Cannabis indica
gagagagagagagagagcaaaggggagggaggtggtagtgactcgttgtcggggatggtggtggtggatcggaggagagggagcgaaagtaagaacgaatgatttggttaaatgaaaaattagcaaatgaataaaaatgagggctgaaataagagtttaaattgaaaaattaaactatatgtgtaaccacattcctcgatggtttaaaatcgtagggaatactatggttgacgattttaaactgttgagatgtcatttataaccattttttttttggcttgtgactcttttaaatagttgggaaaaatacacgagtgttttaaaattgtttagaatagtctactatagtcgacgattttaaacacccacttaattttattagtgacagttctctaaaaaaataatttaagaaccgacggaaataattatatttataatagtattatttacaaacatatctgttattattttgttatataagtatctatatgtaaagttcttccccaagataaagagaatagtggcagtcgagagcacataattagaaaatatgtttcttattatttgggatttatcaatttagaattaaatttctcatctcttcctatattctgtgtaacatttgctaaatttataggggtttttatattcagtaccgtacatatacacaatttacgtaaatgggggtgggaacaatgttttcatttatgtcctcctcatgctctttttacttggtatatgagtcatctattaattgattttattctacaccgaatatgtctacttaaataataatataaagggtaaatatggtcgtaagtacctaatattttatgtttgtaaactgtataaatttaatatttatttttaacagcataaatactcagtatttataaaactgtaattttctttcagttaatttcgccagcacagacccttttgaatttattaaaaaaatatttagaaataattgatactacatatttttatctagatccaataataaaaaatttagcctttatatgtgccctgtttaagacaatgacggagtctgtacagagaaaataaaaaaaaaattacagttttatatttaagccgcttacaaacataaaattttaagtaccgctatttattaatataaaagataaaaattaattaaggagagagactaaaaaggagtgaggacgttcactttgaaataataataaaaagaaacattgttggacagctcataataatatattaattaattaactgtgatttgtttataaattactacttttgatttttagtgtttgggccattgaactttgaaaacaaagaatgatttcaatgattttccttcctatgttatggtggaatggtatggcagtgagtgcacgcaaatggcacaaaatttaagtaccaaaatattgaaactggaattgacttggcctaaattatgtgtcggtagtcaatctattaacatatattttgttttttattttcactttttaattgtttaatggggcattggtggcctattagggttccacaggaaaaaaaaaaagaaaaaaatacgccaacacaaacaaggagccatgtgattggtaaatttaattatttatgtatattaag

SEQ ID NO: 194846 - DNA, 1947 bp, Cannabis indica
taggtctaaatagttttttaaaaaagaattacatcatcagtcacaaatccaatttattaaatttagaaatagttttctttttcatttattcttttataatgacacatgcaatttctttgttatttctactatttttaatatttatcacaaagtgtcatctttacatattttaaaaataatatgtttttaattttaatattattacttacacatatcaaaatactatattttaaatcataatcactcaacaagtatatattcatataataaaaaattataaaagttgaacaacaccgcgcgaaacgcggtttagttccctagttgtgaaataatcccaaacatttatcaacttgtgaagttacttaatgggcgtaggtgaggtgtccgtgttcctgacatgatattaaattatagttgtagatgtagttgtagttgtagatgtaggaagggacacgtatcaacattattatccatacatacaaactactcatcttttgctctacctaatacttaattcacttcaatatttttggattaatattttattttgaatattattttttgacaaatagaatgtttttttttaggaagacaaatagaatgttgattcaactttttattttgatatataataaagagtaatttataatgtaaatatcttaatttaattctttattgtagataattaatatttaagtttaatttttacccataataatactttaaattatgtttttacaatatttataagtgtcaagtcaatatccacatgtcattttttattaatatatttaaatgaactttaaataaaaaataaaattttaaagacataaaacatttaagtcttgtatattttaaaataataaccagagttcagtttttaatatataaacaattcaaattatcataacacttctaaataggattatttgttcggacaaaagactagtttagagtactattttttaagattttcaaaataaagagtctaatttatcattaaacaaaatagaaggttcaattaataatttctgtaaaatacaaaagttaaaatggtatttactctatatttttatgtttcttactagctctacctttgtctcattacacaatattactaaacaatgagaccatctccaatgaagatgtaaaatttggcataaaatataagtttgtgctatatttgacataatatttataagcagaattaccacatatactatttttctatttttttttaaaaaatttacggtttgggtttctaaagtggttgcatcgctagttataatagggatttctatatgatttttttgttgcaatttaacttgtagcgctagttgcaatagagatttctaagtagaatttcgtaaaaaatgtaaaaaaaaaaatgttttgaagtttaggaatgaaaaaagccctatttataattgtgatccagtacacaagatataaaataagtaaaaaaaaattagtttgatggactttcaatatttttattgagaatatataaaacaatgattatattttttaatatgataaataaagaaagtaaagttttataaaaattaataaattataataattagtgacactatagtaattaaaaaatgggcatttattgtggataaaataatcttgtgttaaatttagcataaattttagcatatatatgttaaatttgacacattttttagaatactattgaagtatattacctatattttcattaaattatgtagtaattataagttttatttattgttgttttgtatgttgattttatggagagcttacgattatagagactttgctgataagtttaattcaagaattgtctcttctgatgtctgttgtttcttggtgtttgtttgttttttagataatatttcagtattacgagtcgaaactttaactcttttgctattattagggactctgttcagagtt

SEQ ID NO: 194847 - DNA, 1884 bp, Cannabis indica
cagcttcttcaatcacagaatgcttagtgtgttcattagttacagaagaaggcgccactccaaaaacaccacccacattcttgatctcgtatagctccaacttcccaaaaagtatacggacataaagcaactccttatgagttttaaataaaagagacaaggccctccggtcctctacaaatttttcctctatctctttaccattagaattggcaaaaagaatctcctttcctaccaaagcccctccactcccaagggtggaaccaaccttgtcaaaagacccacccaaatccacaaagagtttatcaaagaaagtgcccaaagcactactccctatctccaaatgacccgacccaagcacatctctcgtcccactaccacccaaaggcatcacaataagctccaaaaaaataatcaaatccggccctatagaagcacacggcccatttactaaaaagaaatccaaacccacacaccaactaggcccactactcaaagtcaacacttcaccaacaccctcctcaacacccataccaggcccacaactaaccttcactacccccctcggcccaacaaacacatggcccaattcaaccaaaccaaataaagacccaacgtccaaatagtccccatcaggagaaggaataccaatgaccaaaagatttgtcatatccaccaccagtgatgcaggcactaaactgggaaaagtcacagcaacctttccctcaacattcaaattcaagccaaccctattaccaattccagtaaatctagaaacccgaccaactgacactctctcgggcacccacatccgatgcccaccctggtaacgcacagccaaattactcccagaacctttcctcctccttcccaaaactcgagacgagtcggacatcggccggacctccgctccaccttgttcagaaaaccgacgaccaccatgagcgacccaacccgcctgtgtcccaacagacgagaatggaacatggaaccgagaagccgaaggcaaccgcataccaaacaaagggtgcttcgagccattaacctcctctaccaccatggccgccactgcactaagacgaaccgcaaacacgcacacgaagcagaggagaaagaacaagagacccaggaaccaaaggaatgaacaaaacacgcacacgggacaaggctagaaagaaaaataaaagaaaagctagggaacaagaaacgggatcaaagccagaaggacaaagccaaaggacaaagccaaagaacaggaagaaccacgacagagatagtaagagactaatctcagggagagatagcagtggaagaccgcttctccaagctccaccaccattactccatgctctcagggacaaggagactttgcatagcatagcacggaagacgtcgaagaagaggaagaagctctggcgaaaggtgaggtttgaaagcggcctgagtcgccgccgggaaggcggatgtaggcgatggaagccatgggagagtcgttactatacggacataagaggaggtcttagaagcgaatacccattgctaagttgacctatgatctgccactttgaaatacatgatatgttgttatttttttagaagagagatatgttgttgaatagagggatttttcctataataagcaattaaaagcattaatttatatttttaccctaaaaaagaaaaataaacaaaagtagaaaataaaatcacgggagcagatttgtgatctagtcgaactacacccatctcaaatctctacgattttcattcaaaacccagaaaattcaactccaacaaaatgtagatttcaactaaaaattaatctaatctcaataaagccaaatacaaaaagtaaaaacagaataaaaaaattaaaaaaaaaaa

SEQ ID NO: 194848 - DNA, 883 bp, Cannabis indica
ttgttgatcaatgtctcatgtccaagcacttggctacttaattaactgtttaaaaaacaagtcctacaggataaggaattgacaggagggattggattaacaaacgatttttgtgttcttattattaatgatgtgatgtgacatctcacaatgtatcaagaacaaaaacattgaaatgaatatttgaacaacatctaatccaatgtaaacactataaagaaacataccagttcttctggttttacttctgcatttgaattgttaaaatctcctccttcaatcccaaaacgttttaatgatctttctgtaattggtggtgttgaagcagggctaaggctgctcgaactaagctccggtggggtgctttgagtccccacatctctagtcatgacctccattttcgtttctgtaagaaaaatattaatagagtcaaagacaagagaaccaaaaaacattgtaagtgtggacagaccaaaaggtaaccaacctggaataggaaacttatgaagtgtgtcttctaaagcattgttattagtattagaaggccttgtttggatatgccttgagaatgaagaagaagaagaagagtaaatgagaggagctgacattgttattctatttgttacattacgaaaggatcttccactgagtgtttttgcagacaaacactccattggaaactcccctgaaagagggttacaaatgtatttctctgcttcattccactttgaatttaaagcaaacccatctggggataagcaatcccaacagttgtaagctgctgaccttgcttgcaaagctgcaatcaatgaaaatcacaaacacccttttcatttcacaatgtttctcatgaacatgtccatgaaaaagaagaagaagaaga

SEQ ID NO: 194849 - DNA, 1150 bp, Cannabis indica
aaagtcacaataataaacttcttgtgctcatcctaactaattatacatcttaataaaagtcacaccatttaattcctccagctgactttcaaatttcaatggtggccccttccccaaaaaaatctagtattttttgtgtggacctacgttgttttaaataataagaaaacgaaaactgggccaaaaccaagttttgagaacgagcatgcttcatgcagttttttccatatgacaagactataaaattttggtcccggaatcgacttctacggcatgtattgaatttaattagtttgatatttttgagggcttcattttcactaatttatttatatgtacttcccaaattaattgcctgtggtgtgtactattttgtttacctaaactaactaggttgtagtagtagtactactaaatccaaaagcatcatctacagctataagattatctaaaaataaagagccacgaccaatcataataaatacccaccctaccctcttatcaagaaagtaacgccttaatttccaaacaaccaaaacaaactatacccatttcttcttcttctttgtaattactactttcgccataatggatcataatatgcctggaatggacatgtcaccgcccacatcatcgtcatcatcgcccatgagcaacggaactatgatggggggtggtggaatgggtcataagatgatgatgcacatgactttcttctggggctcacaagccgagattctcttctccggttggcctggttctagaccggccatgtacgccttggccttagttttcgtcttttttcttgctctcatcgttgagtggctttctcactgccgattcatcaagcccaacagctcgggctctcgggtcggggcggccctttttcagaccctgttgcacgcagttcgggtctgtttggcttacatggtcatgcttgcaatcatgtcttttaatgttggggttttcttggtcgccgtcgccggacatgccgtagggttcttgatttttggaagcaaacttgtgaagaaagaggaagctgagaaggtggcttctgatcttccacccatgacttgttgatttctcttttaaagtacaaacaaaaaatactttttttatatgatgttgatttagggtttttttttttctt

SEQ ID NO: 194850 - DNA, 984 bp, Cannabis indica
caatagttaaattggttattatatttaaaaaaaaagcccccacaatcgtttaagcaaaataagcatgaaaattacgcataaaaaagagctctataattcaaagtacgcacttggtagaaagggccatcaaaataatgttctcacagaaaaaaagtacagtgcacgaatcagcacaagcgtatatattaatatacaacactatatatatacagtatactgtatatacctgtttatatggtactagactatggccaaatgggtacaacaacagacagcacaatgcttctatatgtcaatcaaaaatcaaatacaataaatgtagttgctgaaaaagaaaattagtgttgcatataaatatatataattagaattaattagaattaattagaaaatgcaagtgtgctctactttaaaattgggaggtttcaaagcaagccatgccatacatattaattataaatatatgagaacatcacaaattgttcaattctgtgttaattatatcattaattcaataaaatatgagaattttgagattagttgtatgcacagctatttcaaaagagatttgtttagccgccagaagagaagttacacgtaaagtcactattttgctttatatatagtaatagttatagtagtatatatagatagagaaacactgaaataccacaacaacgagataaatgctttttatacagatatatatgacacattttattaaaaaagaaaaacccctttgatactttaattggaaaaatcgaatgtaaagcttaattatattttatattcttctctaagttttgtcagtatgaagctaaatatggcccactagaaggatttgccacatatctaacgacaaagaaagtccaagatgaaaggcagcatacccctttagaaaaaatttcagaacagaagaataatttaccagcagtcattttcatttcacctattttggaaaataagcaaaagaagcatgttcgg

SEQ ID NO: 194851 - DNA, 2271 bp, Cannabis indica
ttcccggttgaggatacaagctgtctgttttatggggtcgaggatgagtcgatggaacaactctttcttaggtgtaatttggctttccatctttggaggtcctccccttgagggtatctttcttttctgactcaggtactcaagtgtgggattgggtcaaatttatctggagcctaaatcgaaaaggaatcaatacggatgaggttttcctttatgcatcaacagttgtagatgcaatttggaaagcaatgaatgaaaaattccataacaacagagtggagagcattgtagaattaattgactctgttactttttgttatgcagattataagaattctatgttacccacatctctttctccccaattggtaacttggaatcttcctcctctcaagtggattaagctgaactgtgatgtcaaagttggtttggagagctcttgcctagcggttgttgctcgagatcatgatggattggtttgggtgactacagccaatctgtagttttcggacgcttttcgtggtgaagtcgcagcttgttgtttggctcttgaaattgctaagacaaggggtgaattttgttattgtagaaagtgattctaggatagtgatcaattctcttaatggtattgaatctatgtgggagattgataactactctaaacgtaagattttgtaactttatgacccataatgtgactaggtggacctttacccacaaccaatatggttgcctggacatagcgaccatgcttaaggaacttttttgtaatgacatgaggtctaattgttaatatatatgcacgttttacttaaaaaaaaatattagttattattattgaatttttattaatattatggtaaaaatatttaaacggctcgaaaagcgcaatatgttttagttttattatatgtattagatttttaaattattattttctttccattaaaatgttaattgtacatataattttttaattttttttttataaatttgtgtgaattgaattgaattgaatcatttacttttatatatcaatcaacatctaattcgtacacgtgtgaattttgaattttctaattcaattcagttcgtacaagtgcaaatatttgcactttgctgattgaattaaattagatcatactaattaaattgaatagactatttgatgaacacccctacccctattttattgtgtcctattcaagccaatatttcttggtgtggggtgggccaagcctagtttcgtgctcgtgccaccagtactggtgctatggtgtgtctaagaacgtacagttctaactaaccaccaccctcacaacccacaatggcgtaacaatcaatactggcactgtttacagagtcgtcacagtcttccctggactcgccatgtattcaatcctaaaccctttattttctcacgcgccctcattcataaaaacaacgcgccgtcctaaaccaccattactcagctccatcagtctccattctcggtcctcgggtgaagaagcaaaacccattcttcttcttcttcctcctatatggactgccacggagatagcccaagccgtcaatggcagaattgtgcaatgtggtcctcccggaaccatttccacggacacaagaactctcgtgcccaaccagtggttcttcgccatttccggcgaaacgttcgacgcccacgaattcattaccccgaaactgtctgaaaaaggctgtattggggtaatcgggaatcgggtttctgataattggaacaaaggctttgtgagtacagatggcgattccttagtttcgttgatgaggatgggaagttatgcgaggagtaggttcagtggtgaagtggtaggagtgactgggagtacgggaaagactactacaaagtctatgatagctttggctcttggaggttgtgagaagaaggtttatgagaactttgggaattggaataatgagattggagttgccctgtcactgattgggattccgtggaatgctgggctcgtggttttggaaatgggaatggattcaaagggagagatattggagttggcaaggatggccaggccaagtgtaagggtcattctgaatgttggaaattcgcatttggtgaactttgggagcttggaggagatagcaatggccaaaggagagattttggtggaggctaagccaggagatgtgtgtgttcttaatgctgatgatcccttagttatgagcctcccactaccatgtggggttaaaaaggtgaccttgatttttataatccaa

SEQ ID NO: 194852 - DNA, 1262 bp, Cannabis indica
agtaatagtcttcctggggatgaaggtaacatatctgaatgattattcttgaacaggtcaagacgagaatcccctaatcgtagagagtacgcagctttcttgtattgggcccaagtaaagggcttatatagactgggcttttctgaagagaccaactcaggtagtggtgagatccatgcattcataggtggtgccccaaagtacatcatcgacattcttggttttgctgtgttcactagtgccctatgtcttacgctctttagtctcccattcgtcaaagccttcatttttcccacatatatgaaaaaaaaaaaatacccatcagtaaatttaggcaaaaatttcatctcttttaatattacataatcataggaaaatgacatttattttttttttttaataatggagagaaggttattatgaagtaataatgtacctgtaaggcatcaccaacgaagacatagaagttattggggtcaggaggaacagagagccagaagccatcaccatgatcatcatgcaaggagatctggaggccttccacgtcgttggatctcaagatggtcaagatctgagggtcagaatgctctccaaatccaatagggttagtagtagcattaccgggtgggtattggttgaaggaagatgggtcccgatcctttacagtcacaggtggatagtgattgagcctaagcagtgagtcactctcaacgtctctgattagcctgctaaagctgaacttgtcggatatccataggccctcacccactagatcaagaatatcacaagccaactcccttactgcttccgtataatcaatcaccgcataactaataatgcatttacaaaaaaaaaaaacaattattaattaatcactcaataacataacatagagtatcttataaattttgtaaaagtaactaagattttccatgtcgtcattgcttatgaaatattaacattaataagtgtttctagaagcacataatgacatcgttgacatggcgtgggaatcagttattactaccggctaatgatttatctttttgtgtacggatctaaatgggggtcatagtcgttcaaaatttggggtccaaatgttatacctagctagccatagctgtagataattaatatgtttgtgttttatatggagttttgactatgtcaactcttacaaaaaagatcaaaatcccatccgtcttgtcgacaatattgttcgacttcgcatcacatataatagaattactaagcttataaat

SEQ ID NO: 194853 - DNA, 1342 bp, Cannabis indica
attcaattctcatatggtatcttctgacctcatgagaatgggaaaacataatttaaaactctcaattaaagtactaatagtgtctaatactttttataggtggcgttttatgattggttagtaatattcttaaaagttattttttaaaattatatgagatttaatattaaattacattaatagcgatattacactaaaaaagatgttagacactactaataccttttaacaattttcttccttcaaaatttcaaattatataatagcatatgtgtaattaactagtttaacaaacactcaattccactatgaaatattacactcaattttaattactttgtggcttttaacacacaactttttcaaagtatatctactccataaatattgacccaaattaaaaatttacccctaatcttttaaccaatttaaatttatctgacacactactacaaaaaataaattatagatcgaatctgatgaaaatattattagttcgtcaatcgatgcctacactgctgatattattggtttaggtttcgatattattaagaaagtgtgttagacaacaatttcaatttaatttcatccaattttattaataaatgcataatctaattcatgtaacaataaatagctccaaatttaaacatgtgtcaaattctttatcatatatcaaatcgtgcccccaaacttttaatataacaaatcgtaccactcaaacttttgtccacattatatgcccgttagtaaaattaaacttaacaaaagcctttaaatctaactatctcaataattcaagagcgcaattttatacatttcaaagttacgaaattcctaattacccctaatattataatcatttctttgtacatgaaacacattattctaagaagaaatcatgatccagaaattactaatatgcaacagaaaataactgaatacacatgtcctctgaatttttgtttacagcaaaatttataagaatcataagatacaaactacatgaaaattacaacaacaaaaactaccattttgaacctcagtaaaacaaaagtaaaacacaaaccccaaaaacccaattcaattacaacaaaaaccctctctctctctcttaagagatcagaagtaaaagacaagtgactaaacattttactcattttgaaccctcaaaaggccaatgaaattcatttaatggagacctaagacattagactaaacttatctctagtagttgaatggatgagctgacagttcaaaatattatgtatcattctttagcttttacattccaaaacaaatcatgggattgaaaggaaaaaaactcatgctcaatgataaa

SEQ ID NO: 194854 - DNA, 1349 bp, Cannabis indica
gcacactaaacaataaagataatagtatgaagaattttaatatttgaagaaaaaatgcctaaataatttttaagaagaaacttatcttttgaaattttttggactaagagtgtcactatgtttataaactaatttgttatgtgcaatatttagagtttggaacatgttacaacaccacatcaaattagatcaaaattgggattaagagataatactaatttattactcgtttagctttgtattacctatttattagcaaaaacaaaaaatatgggacccaattggctcactttttaaaacgaagcattacattagcattgtgcagaggccgtggagcatagagtactgtggatgagaagaacaaaaaaatgttacatttataaataggaattctctaaagaatttaaagaataattaaactaaaaacatgatatttcatacactttaatttttaaaaatttattattcatgctatatatttataaattattatttattactaaatatatgtaattaattatttggagttttaatttttcttttttaagaatatgtatctatatagagttttaataatttactttaaaaaaattgatatatgttgtattgtaaaagttaaaaataaaaaataaaaaaataataaattgtagtaatttttttgtgtgtattttagttatttattttaaataatagaattgagaagataataaaagtactcttgcgatgctgcattagtgatgttgtaaaccgttttttccgggctctctctgcttggattcttctctatagtatatatattaatggctctgataaagacctattcctttccctttatcatctcttttatcattcaacttttcatcatacatctcctttaatttaccattttgtcccttctccccactcttcattaatcaaaattcttctcttttcttctacttttaccaatcgcctctgtcagcatttaaataatattgtttatgaaccctactagctctttctttcgttctttatatgaatacatttttttttttggaaaaaaaaggtaagtgcttgtggtggctaagattcattatcactttctctgtatacttttaaccacattcctatatagggattcacgtatttatagtcttcaacactgtatttatgtactgtgaattatggctgtgaccgtttcgaaaaacaaaaaagaattatggctctgacatttttagttttgttttcttttttaattatttcactaataatgtctcatttttgatagagaaataaatatacgaactgcatggctaatgactaatgtaacgactcctctacagtattccattccgtattataattatttt

SEQ ID NO: 194855 - DNA, 1446 bp, Cannabis indica
agctgcttcggcttgtcgatgaggtgcgacttgtacggagacatcatggggtgctgatgctgggacgaagccatgtgatgagctttcgagttttgggtcagcttcgatgacttgagcttcttggagactcggccggcttgcttcgaacacatataggcgaaggccagtacggaggccactaagctggttgatattctcttggcggagctgtgttcaggggttttcggtgagaacgccatgtttttcattttccttctttctgcttggttctcgagtaaattggcggggaaggaatggtttattgagaaagaaattaattaattaaacggttaaacccaacttcgaatatttctttggagagagtggagttgggtgtatatataatatatatagatggggaggtgattgggtttaggtgaccggttataactggtagtcttgttcttgccttttattataattatttttattttgggattttgtgaagacttggtttgatggagggtttttgtttctgagttgactcaatagaattcatttatttagtttgatttgatttgattttcaaattggggtcggtattctaatactacaggaattcaacgagagagaggggataagcttaggtgtttccattgcatagtcctaagcaacttgatgaagtctttatatttttggagtatagattattattgaaactattattaaattcgaattaagctatattaatatctattctatataaaatgtggctatattataaaattaaaattaaatttaaatgttttgatagtttaaccagatgagcattttcattaattccgaagataaatttaggacgaataatattttttttaaaattactattacaaagtataatagtaatttttatttttatttaaattactatactgctttcaaatttcaatgattatcattacattcaatattattaattttaaaattatgttattaaaaaaaactaaaaactaaaataaaattaatattcgtattcgtgatttggcacgtaatatctatctagtattatatatatatatatatttataaggtacaataacttatataacctattgttaattgttcttgactaataaatgggaaagtttactattgtgggacaagagaatatattttggtatcactaattgtataaatttattattatttattattattatgataaaaaatgttaattgtttaccgatatttttgaaaagcgataagaaatatgataaagttaaagaaaatacattaaaataaagaacaagatgagagttattacgtggttggggcgttgaaaagccattgtccacaagtcattattattatgactagaaaaacctatttgattcacacaagtgtcaagttgttgaactgtagaatttgcatgagcactcaagaaatgagatcctaactctttgtatg

SEQ ID NO: 194856 - DNA, 2271 bp, Cannabis indica
acataaaatattaaactaatatacatgggtaataaaattacattactggaagatagcggggataggcacgaggtggtagtggtcaggcgaagcttcaagaggtgaatatggcggtggcagtagcgaggtggtggtccgttgatgcttcaagcggtacatatggcggcgacaacaacgatatgtttatgttattttttttaaaatagcttaaggcagagagaaagagaatgatggaaagacagatttgatggagaaaaagggttcagagaagaaaagaaagggtttgatgaaatgagaaatcagaagggggtttgaggtttattttgattttttaaaagtcattagtgatacttttagaggaaatattcccgccctttgcaacggtctttcttttgaagaaaaaaaattattactgacgacattgtcgtcattaatagtaccgtctgtgatgcttattataattcttgtagtgacatttaattacaaattatttatgttatgattaaaagattgttaggataataattttttatgtgtaacaccatgtaacttgccagcaaatgttctttctattttttttaaaatattttttttgagaaatctcactcttgtattttcaacaaaaccaacatgtacattctaacagcacaaaatatattttgatatattaaatttaattttttaattataattttgattacaatttactataaatttatttaatggcaattcaattagaaagtggaaaacattataatatcgaaaaatattaaaactacaaatatagattatgagtaaacacaattaccaacaaagtgggttattgtccatatacttattgtgtgagaatgtgatcatgctgagcaccaaaaatatacctttataattaacattgtgtattggatgataaaaatgtaggtaagagtaatgtcgaaaacaagcaactaattattttgtttttttttttctcttaaattttatttgaaaagcataattattatcttagaatgtgtagagcaatggatgataattatctcatatgttgtagctaatatatcattttaatttatcttttgattccctgatatttatatatgtatttaacgaaaaacatgaggaggaaattaaatgtgtagagtggaataaaatcatagcagcgaatcaattttgattatgtaggaaaaaaaaaaaaagcagattatattataaggaagaaaataaatagtgctctgattttattagtacgtatgtgctcataatattgttgttatattagatatatatactttccagatcgaggaccccaaaataaaacaactaaatattattaactaattagtaaaataattcattaattaaatatctatatatacacttatatattttgtatgtttaagcatgttgtaataattaagttgataaatttgagttatatgcttttgcctttaattaggagagtatatctattatagttcatgtgaaacatgtgatatctgatatctcttaattaaataatattggacttggatctgttacattagtttttctttttaattaaatttttttgtattcatctggaagcttaaggaatcttttatgtttaaacctagagattatatttaatacaaatatacaatacatacatatataaaaaagggatgaagaaacaaaataacttcctatttgggatataaatccaagcgcagcacactgcatgctgaaatattacaatatcttgtaatcattgacttaggccatttatattataaggaacacacaattaataatttctttattcttgggagaaaacttgctaactaataaaatatttttgctgagagatgattagtattttttagttttcttttctttctcttcaagaaatgatgactaaatgatgaccttattaaagcgtcatttatcgaattatatgataaccatactaaattttgtaattatatatccctgtaaattaatgaatctgatcacttgttaattgacattttttcttctacaaccaaatcgtatatgtgcatgtacatatatgaacgtaaatacatcataacctaagtttgataaaagaacattgttattaataggtacaaaagtgcttattactatttagagatagcaacttaaaattagttagcgataattttttaaaattattatcttaaattaaataagatctgatatttaattatactaataatgatatgacaccaaatgttaggcaccattgatatcatttaacatttctcttattaaaat

SEQ ID NO: 194857 - DNA, 2007 bp, Cannabis indica
ttgtaagaattactcggaaaaaactcacaaaaaatgttcttcttttttttttttccaattaaattatcatctgagaccttctcttgggaatcggaggagctgatttggtcggagtcgactgcagcgacggcggtcttgactgaggacggtttgactgcgagtgctaatgatggaggtgaagcgttggaattgaaggagaagaaagagttgcaattgcgattagcagacatgggaagcgacattatcgatttgcccccttgggtttggtggagaagctttgggttctgaaattgggtagccatcgaagctgtggctgccgagcacccttgaccgagagtcgccacaccgctcattcttttatctcaattgctctgaatatctcttcctttgttgagtactgtcagtaagccaaagtttcgatctttgctgtgctgtgagttgggtctctctctgttcagagaggtaggcgatatatgaaaagataacacaccttatcttctttattatcttttctattctatatttatctaaaattatttaataataaccatttctttttgtactttaatgctttaaaagacaatttttaaaaacaaattagatcattaaatactattttttattagtttattttgttgagaagttttagttatgtattactattagtgggagcatagagaaaagtcgacacaagagacaatttcaatattgtttagcataagccttttttaagcttacttcaagtaatgaattgatgatagttacaaattaccccaagacccgaaaacaaaactaagaggggaagtaagatttgtttgcctctgtcatgaatcaagctgagccaagaccagtacagggctctagattttattttatttttatttgtgatgaataaaatttgatctatggcttgggatagcaaatgactttgcacaatctgaaaactatgcaattatggttttataaacatttttcattaaggtcttctatgcaccaagttcttgaacttttgtaacaatagagaatacttaagcctgcaaaatctgagaactatttcaaggaaaaagtaaaaatacaaagaatttttgtctcgcttgaatacagaactacatttcccagctaagaatcggaattaggaaaccgatttcacatatgtttgcaagaagatatgtgattagaagctagacaagctcaatgtaggccataggagcattatcccctcgcctcggcagagttctgataatccttgtgtaacctccatttctctctccatacctatcctgtacttctgcaaacagggcatggactatctgtttctcatagatgaagccaagagcttgtctcctcttgtgaagagaaccatcttttgctagagtgatcatcttatcaacatacttcctcatcgcgcttgcccttgctctagtagttttgattcgaccatacttcagaagctgagttgtaagacctcgaagcagtgctttacgttggtcagctggcctgctgagtctggggattcgcttgccatgtctcatggcagaaattcggcccccattgtcgataatggcaaatcgatgctcaaagctgttcatttctgcagcaagaaggtttaaaggggtgcaaaaatctcaatgttatttttctaccatgaagacagaattcaggattaataatgcatgtgctggaaataatcacttagttaacgctggtcatgtgtaacaataggcctaaaaagtgagtaataacgcaacatgatcacaaaaacaacagaagattgaatattctgctgaaagtcagatagagataaggcagacacttcagaagctccaaggaaaaaagttatctggccgaaacaaactcttaaatattatccccaaaatgtgctacaataacttatagagctgaaaattatgtaggaaacaccttgaattactgcaaattacagatttctttggctactgttattaaatgttgaatgtgaagcattgatctacttatcttgcattttca

SEQ ID NO: 194858 - DNA, 2275 bp, Cannabis indica
aaaaaaaaaaaaaaagaagacttcaacaatactcatgcatgttttggaaatagttgttaaaaaatggacctataatgaatgaatggactttctaattcctttctcaaataagcgttgcggtgactcgtatgttgttattttttctaatcaacaaacgagcaattataatttcaagagtgatatcgttcgtcatgtaaatttaagtttataacatagtctattggctaaaaacaattataatcggtatggttatcaacatatcattattattggtcaacttatagttatatatattttttgtaacttgcttatttatttatttatttatcaataaagtgcttcattaatcaacgccaaataattacaaactagaccaggttatcacctcatgataagggtatttatgtattaatggttcggtttggtccgaattttcattttttttctaacaaaactagtaatgttggtttgttaaacttcaaaaccaaatcaaaccaattaaatgctcaaactaaaccaaactaatccacttaagaacggatcagtttatttcgaaccgtagtttgtaattcgtaaatgttttaatattttttatttgaattattttactttaaagcttataatacataaataacaatgaaaataaatattgctaacacaatgttaaggtaattatcaatactatgcctaagattgttcctaaatatcaagaagtaggcggtttggtttattttgaacaacaggcaagaattttaaaatcgtgaccaaatcagagaatttaacagtccagattgaccaaactattaacactagattcgtttggtctggtcttcaattgtttggtccgaattaggtggggtttgttgactgtaaatttagccaaccgactcagagtctgactaggatcgtagcttacggttgccacatgtggaatgataataaatgtaaagagacacaaaaattttatagaggttcgaccccttttgttaatttagataatggcctactctcattttagttgtatttactattgagataatatcaagcacttggcaaggctctcttcagtattacgataaagtttgcaggtgagaagtgtgaaaagagagaggacttatagctataattcttatcagcatatttgcatcgtcaattctaagtatgtatcttgccctttatatagtggtagggcttacaaagttgcacatagagatgcccctaaaaaatagggaggttacaacgtacatttgaattacagagagaatatctcctaaaaacttgggttgttatttattgatggagagtcctatcattgtgggtagtttgaactgatctaaaaaatgtagcatgttgaaagtgagtgggaaggcttgtgagaaaaatacaggtgtttgtccattcttaaagctttagctagccagccttgttgaaggctgcccaatgcatggaagttgtccctcttggtcggccagctatatgtccggtcaggaccttgctggcaggtacagggattcttactggcctatatgtgttgtgcaacatatgatttcatggtctggaaagctactcggaactagtcctaccaggttaatgatgcaggcactaaccgagcaagttggaaggctgtatgcacttttagagatgttctccattccaatatcatggtaggggaaccaattccatcttcgatcagtgtatctgtccattttgtaagcacctttaatttgattttgggcacttggtacagtctttcctagcttggtcaaaacactcctactgcataatctttagaatttaggaatactcttgttgtccacgtttcctgatgaattcaacatgaaagccacagaatggtgccatgtcagatcaaaccctgatagcacagacctttctctagacaaggtcacggaagatactgcagtatctgaaaaagtgcttctcctacaaggtcgaggtaattctggagattctcaccttacagcttcgtattcgggagtaaataagagtcgcatacatcccatgatggttgcgaattgtctaaactaggaagaccttagtcgagccttcttgaaactccataaggctaaatccagagctaagcctgacggttgcatgtctactgacatcaaatatgatcatgtcccctgcgttagaccgtggttatgcgtgtacatgcctctatagtgtttattgtccaacagcttgtctaagtaattatttttaaaggatagtcctttgggcgacatgtgtcatgacctttacaagatatcttgca

SEQ ID NO: 194859 - DNA, 2587 bp, Cannabis indica
taactgagtttagtcaacttcaaccttagaacattgagcacattatttcaaaagccctttttatttaatgctgaacacaattgttttcggttcgtgtctttattgattctgttttcttttcgttttcctttacagctcggttttcaccagatgacaagcattcaaggcagagatttcttttgaagaagcggttcggattgttgccaacccaacaagcccctcagaagtattgaaatgaaatgccctttggtataaaatgatgtaatctgatcctgttaaagtattagtgtcttagttttgatctttcttagtttcattttgtactacctatttttcatggagactacttaatgtcttattttgagaatggttgagactcaaaagaaaaaaccagccatgaaatataattatcaagttgtttataatgtcttctgctacaatcaaacatagagaaagtaaggtttatttatttacattagttgaaagtatttgataattcttaaaaattaagagaattggcatttaaccatttatctgaaaaatttgactgattaattatcaataatattggcaaccattttaaagtaaagagcattaaaaaaaataccctaaaatcaatgagtaaaattagtataagttatgagttaggctcaaaaacgagtattatttttgttaagccatcaataggtggtgtaaattttgtgtttcatttggttcaaaaattgagttaagttacatttggttctaattttataattgtgttctaatgcacgatgtaaaaaaattggtaaaagcattaactattacaacatttaaatcatttatcagtatgtacacttttttttttttgtgtcaagacacataattttcacatttagactcggatatctcccaacttggaaatcttttttccaattgctacttaccttcatgaattgaaattggcttttagtttctcactattgtttaataacttaatagaagagtgtaatttagctttagatgcatgaagtagaaaaattaaaattcttaattgtttttgtaccaaaaataaagcaattgatttaatagtaaagtttaggtttagtggcaaagtgcttactttgaagtagtttctttaagttgaggtgggtttgatctctattgggagtcttaaatgtgaagataatgtttgccagtctagccatccatcttaaggagcatttatgcatttagtgttcgtttaggactcatgtggcgctccccatcgcagacgggcctgacacgctgagggaaaaaagtgtgtcatacctagcatctccctcctcccttttattacattaaaaaaggaaaaaatttacccactacaacaaatcaacgacaatcgaggacgacttaaactaattataacatagaggttcaataaagttatatcttcttatattgtattaaaatgaactaatctcattttattagttatataaaatttcaaaaattttaataagagaaatactaaagggtatcttaaagtgctaagcgctataagacatgatatattactactactgatgtattttaatatcgagttctacatagtagcggactcaggatttaaagtaagtagagcgtaattttttctataagtgaggggcaaaagtaaatttaaaaagacaaaaaatactcttagtaggatttgaaccattaacctctattctaaatgcaatctaacttaattattacactaaaattaatattatgtttgtaactatcatattttatgataaatatatgtcgcaacgaactaaaatatatatatgtttttttaggagatgagtgtcctgccttacttctatataggtctacccgtgactctacacatgaataaatgatatgaaagaaatgctaagagataccttaagttactaagcaataagagtcacaaaatgttatatattattattagtgtattttaatatcgaatcgctaaccgtgttgacattttaagcttccaaataacaatactcttagttgtaattgaggtagaatagcaagggtattttgggtatttcacaatcaaactcgtgctcttcttcttcatcttcagtgttatgaggagaagttggggtcgcgcagaccagtcgagtccactcccaaaactcacctcttaactcattacaccctctcttcctcacctccattctcacatttctcgtacgatctgatctcttaacccttttctcaatcaatcccaaaaccctagggtttctctttctcaatctcactactctcattttctacatctatctatattgtatgtaggtttgaagattttgatttgtgttttcttgttttttacagcaatggcggccagaaaccttgctggatttctggtactggctttggtgattacgatctgtgaagctgcatctgtctttcaaccgatcaccaacgctcatcgatctgctgcttctcagcttttcactcccgtcgatggctcctttcccaggtcaatttcagcactctttaatcttaattttgtttctatggtctgttaatactgtttcgtaaaaatggaaaattttgaacgttcaatttgaattaaacaaaa

SEQ ID NO: 194860 - DNA, 1874 bp, Cannabis indica
aaaaaaaaatgtctaacatcacctaaattcactacaagagaaaagactatcaggatcgactacaatagtcgttcctgaaagtctttaaagtcatcacatgtatttatcaaatacaacatgtcttttttgatgtttcgttttttgatatttcatccttatcatgaatgatattatattatcactattagtataatttaacatgaaattaacaattactagtaaagtgttattatatagtgttggatagtactgatacctgatattttttgtttttgaaatataaataggaatcatatagttattatatatcttaactaaactttaagcttataaagcattttagaggccaattgatgggaaggaattaagagaaagaatataaaatataagcaaagtaatatgtgtttgtgtgttaataaaggtgagacaaattaaaataataataaattaattaataatagtaaatatatagtataaaggaggtggtggcaacaaaagaggttatggtttggaaattagtgatatttgtgtatttgtatatataagtgattggtgacgcatcaaacatttacaaaatattatatattctcatcacaatgggtaatcttgtgggacataataataataataataatagccaatgagctagctatgatcaaatcaaccaaacataatcacaaatgatatataaataacttttttttaccgagaatataaaaaatggattataaaataaaaaagtttaagaaagaagtaaattaaaaaagaacatgtgattcgagtgttaatgaattctaattcatgggttgatgttatattaagttagaaaagttttaaaatattttttacaaaagaatcctaattctcaattcttctcccaagaaatcaattccgaacccttcacatgaaggtataatgttctatttataggaaagaatcgggtatgggaatattcaaatccggtagggtttttagagatcaactcctctgataggataaatacaatagttattgactttccgccacttgagtgagagtcaattcacgagaaaaggttggtctctacaagcaaaggtacgtttgaagatgtcaggctatgtgcaactgagtatgtaccgagaatatcagagaatatggcgtcgaacaaaatgtgatctcattttagtagcgcgtacactctgctcgtcgaagtaagggacaaactttgacactatagagcccaatgtctggaatctggatgattccacattggatggtgtccaggagatttataagcaactcctcaactacccatttctaggtatcctctcatgaagatgtctgaattggtttgggtactctttgcttttgcgttgaacagcttctttcaggttgggaggatccggatttatcaggttggagggttggactcacgtgcgaatttagatctagagcgtgacttggtcatctggttgaataataaacaagattgagttgaggtttaggctagcataaatgtgaactttgaaatttggacaacataactaattattaattttctatgttttaattattaatgttttgaattaattatacttcatcacttattgttattgatttttattttcttttaatttctatacattctttgaccacatattaatacaagtgtggaatcctaatgtcaatttaatactctgaaatcgatcaaaataagtgagaccactctcaacttacatatatttataaaattaaatcacttaattcattattattaattaagaaactcattattaatttaattacacttaatcatcataaatcgcaatatagtattaggcagcactcattattatttactaattaattagtacttgttttatcacaaggtatac

SEQ ID NO: 194861 - DNA, 2450 bp, Cannabis indica
ttggagtgggattaaaaggttcttactgatccgtttcatagcaaggatcaaaattctatcatttctattcctatacaccttgcttcaagagatgatcataggtattggtctcaagacacttcgggtgtctacactgtgaagagtgcctataacttaattcaaaaaatcaatggtaactggaatacagttgatgcttcagacttctagaatgagctttggaggctaaaaataccacctaaggttaaaaatcttatattgcatggaggtacaaacttccttcctactttgactatgcttctcacaaaaaaagtggcggttaatagcttgtgtccagtgtgtggccttcatgataaaacaatacttcacatcctagtttcttgtagttgagctactgtttgttgggagagaaatagttgaggctattggtgttagagaagctctaagttggatcaagaatcaaggatgtggaatcaatttacacttgagacatatcgtttagttgttgtgcaagctttacggagtccatttgaaatgctttctttgcttggtttgattgttaaagaatgtaagaatttacttgcggagttagaaaatattttattttattttgttaaacgttcaacaagcgtagtatagttcattcttttgcaagagcttctagtttatatcctaaatgtagtttcagtatgagaaatgtcttaactgaattattatcatgtttggtagctgagtttgaagtctaataaaacttatgattattcatttaaaaaaaaattcctttaataaatatatatggaaataattaattgattaataaaaaaagtgtgatgagaaatgaggtgccactaccaattgcaacaatcctcttaaagttgttaattccccactcaaaaaactgatttcatattgcatctcctatagtaatttaatcaccttattataaatcaataaataaatttttacatataaaaataattcaatatattaatacgcaaaccactaaaatattgttaaattttataataattgatccacataataatttagaaaaatgctaattaaaaggtactagtgatgtctaacatcttcttatgtgtcattatcgctattgatctaattaagtatcaggtctcatatactttaatgtaataacttttaggaagtatcactaatcaatgacaagatgatatgtttaaaagtgctaaacaccactagttcctaatagcaatgctcaataatttaatacgcactaaatggacttacaaagacagtgtgagagtataaagtactatacttaactttatcaaatcctatcctattacggtttctaacacccacacaagccatttgattgattaagaagtgtgataaattactccacatatttttttgtttaacaactacttaatatgtttttttgaaaaaattgaaaaactttaaattatttttaataagcaaatcagataaaattcattacgtacataataatagtactcacaaagcacaataaacacaaatcatatcatttacaataaaaagttagaaaatcctaactccttcactaaaaaccaataagttgttaatagtaaatcatcaaaaaagtgcgaaaaatattagatttcttactcaaataaacatgtactaaattacatctattaatgattatcaactaaaattctcccaataaaaattggataaataaccttactcatattagaataaaaaagaaataacaaaacgactaactatatttctgattatgctgataaaaagaatgatccaaaaacttagagatcaataaaaatttgaagatcccctaaattcaaataggaagagggacaaccataccacaaaagtatattgagtcatttgagaacacagtactagtgacctaaacagggacaaaacttacccctcataatcataattcataacaatcctattacaataacattagtaaagtgatagtagagtagggcgaacctaagtattagatagtttggactattacataagacctcctttattaaaagactcattttttttttcatcttccctttatataaatctatataatataataaatatatatttttttttgtatattacaaaaaaaagaaaattgataaaatgtgtagtcccaatacacattattttctaaaatcttgtctattctatttttcttttctttaaaaactaagtatatttaattttattaaataaatgtaaaaaaaaaatataaagtattgatcgatagcttttttagagatttttacaaaaatattgaattttggataaatttttcaattttactatcatacggcagaaattacatttatacttttcaaaattctcttctttttttttttctcttttatactatatatatatatatatatataataaaaacgaaacctccatcttctacacccacggacataactaccata

SEQ ID NO: 194862 - DNA, 2547 bp, Cannabis indica
gttgagatattccctcaaaataggtgagagattctctccaaataattgagatattctcttaagtggttgagagattctctcaatcgattataagaaataaatatctatcactgatttaactataaatattcattcaaataatcaaatattattattttcaattaaaatatttatttaaataaaatctttattggttttattttatatatagtataaacctaaaactatttacgtataagtcttaaggaagcctaaaaagggttaatcagattaaacctttttccatcatcatcactctcagagtttttgctcatgtgttgagataaaaaacaagaactcaatatacaatttatctcattagcccacactaatccttgtgtgtggtagaaggttcgaaagatcacgctgtgagttcttcatcaccatcccgaggatacaatttatgaaaagaaataaggataccctaattttcttcaagaggtaaattattcctttcatctatttattgcaaatttaatgtatatacatgtggtgaacctgaggatgtagtacaatggtaattagaaattactttctactgcatacctgatttagtaccacaaaaccaacagccccttcatacaaaagttgggacatcatttctcatgtcaagggctgtggattagggttcttgaacttcggcaagaaactcttgtgtaaaaatacttcaaagcttttgactaaagatcattaatgacccaaccatgcaaaaatccttatttctccttctttaatttattcttctttaagcttaatttattttataatcggtttctaaaaatctcagtaagattttgaccatagcattaacccaaaggcaccgaaagtggagggtctggtgactatggagaacctcaagtgagtcagcttggtcgctccataccaaagtataaactccctcaattctaatggaatacattccaaactagatgatgctaaggaggtcgttgttgaaatcatggcagacaaggtgaatcaagctattaaaaaataagaacttaatggaagagtgggtgaaaaggaatctgaaacccctgaacaaagatgtagagctggaggtatattttgctacagtctttccaacacatccaaaagaggtaattatcctttctgtctgacccatgttcctcatccagaaaagttggtcgatgttacatagggagggtttgatccttattttttaaaaaatagatcaccttcggtacccagttacacattacttgcatagttagaggagatagttgagcgacctaccatttttatcccacttttcaatgcacaaggatacatcattttaccttgattaactacctaggaatcttccaatatagtataggttgcaaggatgtttcactattagcacagggggaatgtacagtacaacgaagccaatggttaaacccggactagagtcttatgcttgtttgttatatttttatgcattctttattatttatgagtatctaaccatgttttattttcttctgaagagggcccttgtactctcgagatgattctactaaacacattcatcaatagggtgaattcacagaacgatgaggtgtggaaggtagcaaagaaggggaagggaaaaccttctagctccaagtcacaagtcaagaaggctgcttctcccaataaccttgtggatgctacggttgccttggtagtttccgcctctccagcaatcctagtgacacacttgaaccaggtttcattaattggggaggtaccagacccaacttttcgctaaaaaaggccatctataaatgtcaatgggctagggaagaaaacaaggtagatgccatctagaagttagctgccaaccaaaaggctgaaagagaaaaggtggagcaagagaaggccgagagggagagggcaaaaagagagaaaacaaaccgagagaggagagactcctacagagaaaaggggaagcaagacccaagggacacttgggatttgaggtcgagagaaatcatctgaaagactaaaaaaagatgtctggattagattttgctaaatttggaaggatatttaaagaaagataatcaagaaaacatttagtacatacctacaatgcaaaagtctagtgagagagttggatgatgctttagagggaatctagacatgaaaaaccaatactccttgaagtcgtgagtttacttgcatgtgctggttgggcatatcacattggattgcttctttagtgaataaaagtcgatcttggtcttgtccttcctcactagattttactctagcttgtaaaaatataagactttgtcgagagacgtgacctctacagactggtcccaccaaaaaacataccatctagcaagcagtttgtatacttgcacgatgatttgaaatggagccatgcccaccattctatagaaattagtgaaataactcctaagtagaagatgggctttgactttaatgtggccccaactctaagtggaggaaggtgagctttgactttaccttcattttcatttatttttttaaata

SEQ ID NO: 194863 - DNA, 1075 bp, Cannabis indica
atgtataaaaaaattatgccccattactttaaatcctctgagtccctcagtgcacgtacgaaaatgattaaggttaaccaagttcacatggctgcaattatacatactaataattaattacttaatcatgctgtccaaatcttcattgcttctctcttaccattttttgaagtgtcgaatttaaggaggggatatgatcaaattattagtaaattattggaagaccttttaaatctcttctgaattaattgattgctatatatatatatttatggcttcagtaattgaattgattcaaaagtataaatatagtgttttaattacaataataattaaaaaaagtttttttttttaattctctaaaatttacatattaaaatattttttttatgtttacagatttccacacagaaactactacagtaatgaaaggagtaacctaaatcataactaaaattcatatagcaacctacatagaaatcaccgaaactatccaaactttaatttttttaaaaaaattaaaaaataatatataaaataattccttaaaaaaattacaataatttctttttattataataaatatatttcttgtatggaatatgttcaatttttcccagatacataaaattattaaatataattagaattttatagtttttttttattatttaaacatttatatattacaatacataatttaaaatttaaattcaaaacctctaacacacacattctagattctagctacttgagctagcctcaattgttaaaattttacagcattagttcatctcagtttgtgacaaaatattaaaagtccagctggttaactaacttataaaaataatgtcaaattaaacgttcacgagtcacgactatgttttcccaatataaaattatatattgtatgtataatgtgtcattccagcaaaaacaaaaatgtataatgtatcattacatacaagtacaactactaacaacaaagttaatgcaacgttatttaattaactcgaatctttttcaaaaaaaaaattaattaaactcgaataatgtagaagcagagaaaaaaaaa

SEQ ID NO: 194864 - DNA, 901 bp, Cannabis indica
tggctagcttccattacattcctgaatggcgtcgctgctgctgtttaccgacgtttgaagcttctcattcagcatcagcttgtactgaccatctctgtcttccaaattacgcataaattcaacctacaaaacagtaaacaagaattgcatttgcataaatcaaattacttctcatttatgttctcatgcccatgattagtagttctactattaaagacatcaatcgccacacacctgttgctgaaacaagtcgaattcatcagagctcaaagatccatcactattggaatcaaggagcttcatcatctcccgggcatcatccccaggagcaccaagctcttccataacttccataagttcctcaatgctgatcctgccatctccgttcttgtccagaaggcgaaacaccctattttgttggtcgttttcaatacctttatgatttgtagatggaagacccttaagacgcaatgctgctagttcagccgcagccaccattatggccttgagccgctttgcctgcaaattaatctctaatttattcaataatcaaatcaactcaagactcaatattttcaatatgataagcttctggtccgatgtgtctaacaaaggagaaaaagccataaacgccaagcatgagttttcttactagcagtttatttagttttaatcttttttttaattgctttaggctgagttgtttttgcttaattagaactcagtttcagttatgttgaaagagtttagaattgagagaaatctcttgggagagatctaactctcttgaaaggttaaataaaagagaagcctctccaagagctattttgggatttcaacatttgtgtcttcttttgttgaataatttcaacaaaatttgcagttaaacccccttatgttt

SEQ ID NO: 194865 - DNA, 1146 bp, Cannabis indica
aaaaaaaaatcgtattacaatgaaatataaattttacccaaaattcaatatttttgtaaaaaaccctttactaatttagataaatgtacttaacttcatatatattgttattggtccaagtggtttacaatgtcactttcatccttaatttgtgattatgatattcaattcgtaatggatttctctacttcattgcgcctgacccaagtgggatattttctctctgcactgtaaagtgtacaatacatataagatcaatcacaatcactcccaccttttttgttttaccattatattagcactttggaaatctttccactccattaccaattttggtaaatatatatttgtttaggactctaaatttttcatataatagtatatgttatagtaatcataaacattaaacatctcaccatttatcaacacaaattttttaaaactatgaacaccataactattcaatgacagttacaaatggcatcttgattagttcaattttacatataggtgacttcttaaaaaccaagaatacaataatgattcaatcacacacacaagtgtcgtgagcttatacagaatcacagatgcttcttgtggaatgatttgccttagagtagctaactggccagcttaaaagcatcaatgaaaagaccataagtaaatcccatcttgaaattgttaagaagagcaagaggaaatgtaattttcgggcggctgtaataaaactttgtagcatactctgtgagaagaacacacaaaactgcagctatcacatcattgactcctaaagctccaaaagacagagaaattgtctgtgcaacataaaaaccacccaacaaagagatacccccgaagagggttcgagaaggacttcgaaaatagtttcttgagagttcaggcacaattctgatgatatctactagtctcctaggccctccattttcttgcacagctctaacacgaaaacgccctggtgaggatcgtaaagtgaaatctccagactttccatacaaagctcttgtttgagttctgaagccaaatatgaggagcccggtggaagacaaactcacagaatgtaccatttcagtattactaccaaaatcaaccaaaatgccctatcatagaaaataaaaaataaaaaag

SEQ ID NO: 194866 - DNA, 1229 bp, Cannabis indica
tttttttttttttgtatttaaacaaaaatatacgaagcaacctaaatcgcaattcaaattctggaacaatttaaactgtaaaaataaaaaaaaaaaaagaatattaaaaaataatatatagagtgattctccctactaatatgtttacccaaaatgtacaccaaattaacctaaataataaaattgattaaacttagaaaaaataacttaaaattaattcaaaactaactaattaaaacataagaaaaaaagagttaataacatacttagcctttggttaaataataaatttataaagaccgacaaaaaaactaaaatacatgtaaaactataagtaaaaaaacaaataaagaaatcaagcgctattattgtcattttgataaaaataaattaactactttaaaaaaaaaaaaaaactaattattttgtgatacaacactgtcaaagtttgtctaaaaaggaaagacattgcatgtgtaataaattaatgtgagaaaagtaaggaactttgtgaagtactcgcttagaagggcgagtgaggatgggatgtgattttagtaaaaacagttgggaagatgggcattgcaaagttaccatatgctgtatatggaaataaaatcccctacattatctcacagcttgattattttaccaattctgtcattttccagtgcttgtaaataactttacattaaataataactatgatggagtttttctgataattatgttgaatattacttgtataactgttttaaaggaatggaaaaaaaaaatacggttttgttgaattgtaagtaaggtgtttttgttacaattactttattttgaggaaggtatctgtctattttttaaatattactattataagtataacagacaaattcaatacacaagccataaaggtgaattcaaatgtttgatattatcccttcaaatagagcaacggaaaatgagtaaaaaataaaattaaatgaagagttttattgttgaaataaagtacatttttccttaattaattttcgtccaatatatatatatatatatatatatcttatggggaaattactaggggactaccgaccacgtatggcacttaataattttattatattagaaattcaaaagaattagagaggaaacaatttaaagaaagaatcatctaaaaaaagaaaatgaaagaaaattgatattggtcttacactttgtagttaattcttcactcaaac

SEQ ID NO: 194867 - DNA, 2062 bp, Cannabis indica
ctttagattacgtgtgtgcttagtttttgttttttgtttttgtttttttttgcgcttagttttcattttaaatatataacagtattttagaaaaatacaatttaaaattttaatagggaagtaaataaacacaaaatgttaacaaaatatataaagcaatattacaattttgtaaaataaaaaaaaatgtaaagaatattaaaggagaatatattagtaactgttaaaaattctaaatacacaaaagaaataaggaataagtgccatgttttgaacctgtaacccggcaaatatataaacaaataaactcttaagtactgcagtaatagataatgttaactatattttaaaatctataataatagaaaatctcatacatacgttagaattaataccatgatattttgaccaaatctgaagcatattctcagagttgtccgaaaattctgaacacacaaaaaagaaataaaacaagatgaaacattgcaaaatgattgtagaggcatccccacacatgatcaactaattaaagcacaaaatataaatattgctcaatagtcaatagtcttgcccactattatagtatgttatatgtattgtaatgaatgaatatatttatataactaacagttggtctaagattgcggaattgcttcctggaagaacagacaaccaaataaagaactattggagaagcagagttcaaaagcaagcaaagcaactgaaatgtgaggtcaatagtcaacaattcagagacattatgggcaacgtcttaataccccgtttgactgagcaaatccaaaatttgacccaaaatacttatacaaatgttcatcatcatgataaatctcctaatccatccatcacccggggtgcgtgacccgaccacccgactcaatattactatgccagctgctacttcatcaaatgacgtcgtactattccaacccaattattatgacaatgatgacctactcatgttactccaaccagacgaccacgttgctactactgctgatccttttggacattactcctttgaatataatgaaagtcctaatacattttggaacactcagagctttatatgatataaatatatatatatatatatatatatgtatgtacatgcatggcttcccgtgctgatatatatttatataaatatataataatattgcataacagatcgctgcagattccggaaatgcccttaggcaaactcgaccagactaacaacctcaaactaatcacttcatgtaaagaatttcctaagtgactaaacaggagaaaacacagaagggaaatggtaatttttaaaataacaacagcaaataagtaatttttaaaaagaatacataatgtgacaagtgatgtttagctgacaccatcttacaacaaaattatacatacaccatagtaacacaatatattagaatgacttacaatttgcttggacaaaataattatttgtgttattatgatgggaaaatgcctttagtttttcactttgaactctggtttgacttttgaaatcacatttgagaatgcattatccaacacagaagagaaaaattacaaactgagttgttgtattaatatgctttatcattgtctaatggtgttgttttcacttatcaacttacaaacttagttataattgtattagtatgctttatcattatctaaattgtgttgttttcatttatcaattatgcaattgatatataatgttaaatcttcttttagaggactctatgagaataacagagaattcaaggaattaatctcaatttaaaggcctaaattatttcatccaaattctttaattattgtcatctaaaccaagaaaaacaaaagctaatgatgatagtactcctaataatctttgtttacttatcatcttgatggtgtacaattcattttttttttctagaaaatgggaagaaaaacagatatgagtaaaagaacaaatggtacatatcaaccacaatatcactgcaataaataaagttttccataatacaagtattataaaaagcggatcataatatactttatg

SEQ ID NO: 194868 - DNA, 1939 bp, Cannabis indica
aataaaattccttttttaccctattgacttcttgaatctctccaaccgcaattgcttactatataaaacttcatacaaatgaactttctatttttatggaagagaagggagtaacgcgagaaatgcccaaattagaaattcaaattgataccaataagatatgcccaaactactcaatacagattcactaaggcttcaattgcgtaatggatcacataaattgctgattgacgaagacccattctcaagtttcaaatatatcatacaaaaataaatccttcttgagatgcaaaaataatattgcctggtatcggatctacttcaaaaatgggaacttttaacaagcagttttaatcaagaaattcaaatactctcaattacacataaactcatacatgtatatatatagcaagctaaatttcgaacctttgatttcggaatcacttttacagcaacctgttggcctttgagttcacctttcttaaacttagcagcacaagtatacccaaaatgccctcttccgacctcttcacccatctcatacttactcccaaaatgcttagagaaaccaaagctcttatcaagtccagtaactccttcagcctcgctcccttcgggtattgcagcttcgttcggcttcacagacccatgccttctcctcaacacagccttaatatgtttcgccggtgaaggtggcgggaaaggtctcttgaagaaccgcttaggcgtggaagagatcgaacccgcattcgccggagatctagctggagacttcttagagaacaagtaatgagccggactaggactgtaaaacgaaaagaacggagatttcttcccgttctgaacatctttcgcctgctcagtactaacaacctcgtcgtcgccagtaacggagctcactccatctttgggcggcggaacagagttaccatgagtaggaatggggctattcccggtgaggttaggatcggatttaggagaaggaaatccactgtttggggaaggctttgaagtacagagacccatttgaattggaaaaatttccccaaacagaaaactgagtttggggatttaaatgcctgaaaaaattggtggtcagagcatttttttttttttttggataatggaattgggattttgaaaattcttattactttttccttttttcttcggttttgggatttaaatttaaggattgaggtttttgttgaagtgaaaaaacgtttgagaagaagaagaagaagattttggttaggggatccaaacacaaaatgataaaaagaaacgacgacgcgtttgtcttttcatttcttttttttaaaaaaaaaattaaatctattatttgtttatttatcttgtcttaaaatattattttttattattttaatatgtattttcttacggattacgtaagattaaaaaatattgtaagtagctttcaaaaaaaaaaaatatattgtaagtaagtaaaaatgaaaagataggagagagagatcgtacaagtattaggtggggtccacttagacatgtggcgtttgacacgtggcagtgatgtagatgagttggtgttattaattaattgggctggagttccgtgccttaataaacgcgaattggccggtacggaatacagagtaataaaactgaattttgtatttatataatccattattattaattaattatttttattagtattaaattagggttgttgttgaaaattgaaatatttgacaattaaagttgtgttttctgttttaaatcaaaaagttgtgttttctggaagaaaaaaaatgaccaccactaattagcttgaatagtattatttgtggggttgtgtttgtattagtatttataaatagagtattattattttacattagtagtttttagtattttttaaatgtgttattttataattgacaagtaatatttttta

SEQ ID NO: 194869 - DNA, 1204 bp, Cannabis indica
ttttttttatgcagcttatgtgggatgaacagcaggactgaggagtttgtggagcagtgtatcaacggcgcagattgcatgactataggagtgagaaagcagagcagaggagtgagtggttacctaatcagtaccagatggcagaaggatttttggctcttggcttaagtttagttacttcaagtcctgctatttagtattagctctaattttaatactttgtaactactaactaatgtctttctttctctctgtaataactttgatctaatctaaatttaaataaattaaaagtattagttccattgcatttgtattttgtatggtacaagaaagtaggaccgagcaaataggccatgaaaatggagtcaagatttaaaaatgattgctttgttattcattaatggatgttaaaatggttgtggttcttatgaaagttagcatgaaatttgcatttttcatgctacttcattatattttcttcttataaactattttgtcggtactaatagcatcacttgtcaaaacatctaaataaaagtttaattgtacaagatctgttagataatctagtcattcatcgttaatgtgattataaaatatataagatgaattaactattcctcttattctcaattagttttgagatagaaactcatttaatttatcccaaattctaatgtggtataagaggaaaaaaaaaaaaatttttaaagtaaaaaagatccaaaaagtagagcaaaaagagtcactctactcctcccattgccaattagttttgagataaaatctcattcacctcatctcaaattctaacaagatcctatatttaatgtatgcatggttggtgctgaaataaatttcaaacctagatacaataaaaaaaacaccagaggacggagaaatctcaagacttacttgaactctcacccttccacgacgaaggttgagaagtggctcaagtcgaagaaatcacaagatccttatccttaagtatcgagggtccctgagtatgaagagttaggattttcagaaaaaaaaaaaaaaaaacgaaaagaagattatttttactttaatttttaaatttttaaaataattaaaattattttttaattattaatattaagtcgaccaataaaattttgtcatatatacaattgtgtatacaatgatagtccactttgactacttaacaaaccaaagt

SEQ ID NO: 194870 - DNA, 1712 bp, Cannabis indica
tttcgcctttataggtagattagatagaaacgatcaagtctagctgatcagctagggagtacagaagactaaaccatgcatatatttttcttacaatttgataaaattgaaagcctagcagtaagatttgttccggtatcaacaccgaattggcgacaatagtttcggtacaagtcaacccgagatttaacttgggcagattgtctaccaccacattcgggtccattaatttttttaatggtttctccaaagcccttggtccataacaggactagcattctccatccaaaaccacaaggctgttttaaaggaaattacaggattattggccactatttcaggagaatttaacccatcgaagttgtgagctttcccggctcctccataattgtagttccatgatagttggagtggaccgcgaccattgtatctcttcctagggttgcatggatactcattataactcctatcgcagtacttgtcattttggtttccattctcttccttgtagcaaaaatctgcccacaaagttaaatttactcaatttttaagatgggacgtttaaaaaaatatggaggttaaaatattatataattttgattaggattgacataaaaagaaaatataatttttgtaagaaaatacaaaaaataatatttttagggcaaaaatcaaaatatttaaatatataaggttgggtctataatatctgacatataacaatattaactcagcaacaaaattgtaaatgaacttagattctttattcctataaatagcagttgctatctttgatcggttcagttcgagcaatgaagtagagatatttattaacaagtttgatcttatagtgtaaataatccaagtcgattatttacaataaacagaaaagaaaaatgaataagtaatcgaataaaaagagaaaaaaattcttacaaccagtctcatgagtgacatgagcaaagaatgctgcaatctctcgttttgagtcatcgacagagcctattctgccaaaattggggtacgaattaagagcactgagaaaagcttgtcgagagtagaagcgcttgccgggacaatttccattagtggccttattcataatatcattgaagaattgttgtgtgacaatattagcaaccgaaacactattttttgtgcaacggcctgctcggcaattggcaccacaatagtcattgtctgtgccacaatacccaaatttgctacaacactcgttgtcgccacatgtgcccgatccacatggtattgtagcaacaacacttgcagctacaattgccaacaatgttaggtttagtaatagtatatttctcacttttaggatacccattttagagaaatagtagtaattgatgatgaaacttagcttatgttgagctcaatttatagcacaaaaatttgaaattattttatgccctatggtgcaacaatgcctaacacagcttgtagtaaaaaaaaaataaaagtaaaaaaaaatagattttctagaaaagagattgacttgacctagactttatgaattacatgttatgtaactcaattgacttggcaaagaaaaattggtctaatgtccactctctccttcaaaaaaattggtaatatttttccaaggctattggcaacaataatttttttaataaatttgagttggagaacacagggataaaaattttgatttttccaattcaaaaagg

SEQ ID NO: 194871 - DNA, 2806 bp, Cannabis indica
tggactaaatttgttaatgtatcaactatgtaaaaatttatgtctgaaacttattaaatcattgtttgttttctttaatttcttccttaattctattttctgaaaatttaacacaatttattttggagattttttcttttaagaggagttgatatacttacaaattcactaagttacgccctttaatagtaaatttaaataaataaaaagtgactatacattcaatatctcgtaatatctcatgttttatctaaattcaagtatgatattttatatttttaataatatttatttagtatattttaaaattagacatattttttattttgaactcaaatttgattgataagattttatcaatacgatcaaattctttaattttatgaatttaacattcaaatttaattatttatttactaattaaatttgaattatttatcaaatcgacaaaattgtactaattaaatttgaatttaaggtaataaatatatacaattcaaaatagaaaacacaaagtaaagtactattaaaatcactcggtaatcaaatatcatttttgagaaaatataataaagtactcgatgagtatattctgataaataaattttttttaaaaaaaaaaaacataatctactgattttacacttctatttaaagaaaagatcccaaaaaaaaaatagtaaatttaattaaataaataaaaaaaaaaaaatgccttaaaattcaataaatgaccgaaattatttattactttcctaaaattaattccattctcaccactctcactctcattttattgtttaagaaaaaccctcctctctgcgttcaaaaaccctaaatctcaaattttgaatatttgatattgattctgctacatcatcatattcatcaggtaaggattaatctaaattaactttaattttcgtttttattcactgaatttaactttcagaattcattgatttaatatctgttaaggaagaacattagtcctctgattctctatttactctgtttttcacttattatacattgtattatatatgtatgtatacttcaaaacttatctcagtactgtcacattttggttcttgttagttagtattgttgttacagttctcaatctaattttggtgtgtttttatgcttagaatactaatcacataatataacagcatgattcttcgttctgcaaagaaatgggcgaaaacaacagctggtgatgacagaatttcgaaacttcctgatgaaatcatcactcacatcttatcgtttctcccaactaaagatgtggtacagacttgtattctttcaaagcgttggaaacacatctggtattcagtccccactctctttttctcagaaaatgctactacttgtgatattgaaaaattttatgagtttgtagacaattgtttgaaacaccgcaagcaatatatgattgaatcgagtatatttacttttaagcttaatttgaatggatatagaatttcttatttcgaggatggatatcatacaacaagaaagaatcactttgtagataaatggttagcatttgtagttgagaataatgttaaggaatttgatcttagtatgcttgaacatgttggtccatataagaggttctacgggctatcgaaaatactagacaatgcaaaatatttgacgattttgaagttgagtggggtagtgttggatgctagttcttgttcctttagtttcccatctttgaaaactttgtcattggtagatgttctacaatcaaatgcttcaaaggatgatgtggtagttaagtttttgttgggttgtccttctcttgagaatttgtgtgtctgtgattatgatttctctagtgtagattatcagcctcgactgcaaagtttaagcctaaagttcttggaatttaaggatatagagattatgtctgcattacaagttgaaactgtaaaccttgaatcttttgaatttgaggatattcgtgttaacttagacaaaatagatctctctgcttgtaagaaaattagaaatctaacgttatcgggtatgatctatgcttttccctccaaaaagtttgaacttcttatttcgaatattcctcttcttgagaatttaactttgagcttccagacctacaccgaatttactaagggcttaagaatctcaagtcaacacttgaaatgtttcaagtttaagagttctaatattggaattatgaagggtgttacgattgaatctgccccaaaattagagtacttttgttatgaaggctatatcaattttaacatatcactggagtcttcgaattcgttgaatgggaaaattgtaattcttgaaactgagaaaaactatgatgcaaagtggtttaccaatatgcgaaattttcttatgaatctcaattgttcttggaatatcgtaaccctgcatgttcgcaaatgtgaggtatgttcattacttgtcattacaattcttttagtatttcgaaattcaaatctatttatgatttctgataaatctttatgtacttgaaggctctcatgtggccagagaacttgaagaacatatgtccttatcctttgcttaattggaaaaaactccgagttattactgaccgtaagcctaagcctaagagagagtccgacttcaaagatgccttgatgaatttaccttgtttagaaacactatctattaatggaaagaaaatattttagttagtttacaatatattatgattaaggatgtcttcctttgtaactttgttagtaactttgtactaatgaatttgaataccttgcataagaataagata

SEQ ID NO: 194872 - DNA, 1655 bp, Cannabis indica
gaggaggccagtctctcgaatacgtggggtacaaatggtttcactgctgaaactaactttaacttcagtaattcttccttaatttctctgttatttttctattactgctttaagctcatctcatttcagcaatgaaacgcatcaagtggttacgacatatataactgatttgcatttcaacatcattcagtaacacaaaccacaattaatttcatattgttcacaacataaccggtttgctcccatgatgtttcagattcaatcctctcataaagacctactcaaaagcaatttgcttaagtactaactcccatagattatacatatatattgtcatatttctgctaatacattgtgctatgttgtaacaatgctacccacgaattaactatgttcgcacttaagacagataagctaaattcgcatttaagactgacaataagttagcatggtaaaacaattttctgccctattttttgactggtgtacttaaactattcttatcaacgagcttggtcttttgtcaaaaaaaaaataaactaataaccacaaataaatagtatctcaaataaactttgtactagttacttaaaaaaacttaagtagtaggctgacaaaaaatgttttccaataacccaatctaaccacctacatttttctttttcttcatggaagcaataacagagcaagttagaacttttgcagtaaaacaaaagatcctaaaatgtaatgaaatttagagcaacaagatatatctatacatattcatgcagagtataaatttctcaagaaaaatggaaaaaatctaattccccattaatagagcagtgttataatatgttgcctcattttactattgattgattggggatagggatactatatctgaaaagagtaaaaatcaaatgattacaaaacaatgtgtacttaaagcaccagactgttatattaagttaaacacacaagaaccctaattatttatgatttcatttcaattagctgcatccatttagacccatcggaatgaatcacatttagttcatctaaactctatacaaattcgaaacattcaatgtaaaccaacataaattggtaatctcactatgtgtacctaaagcacaagactgttattactaagttaaacacacaagaaccctaatttatttataatttcatttctattagttgcatcgattcagacccatcagagtgaatcacatctagttcatctaaactatatacaaaatcaaaacatacccacataaattggtaatctcaaaaatcaaaacataatcgcaataagaaaactagaaaattataatggtgtacgcatcaacaataaatagctgatgatgaaccagtatatcacatcagtaaagaagaataatagagagagagggagagtggtgggactaactgggcttttccggaatgccgttggaccatttggagacggcaaaatgaaccttctcgcgttgaagggtttcggccttgaaaggctctttgaggcaattcctgacgagattagcgcatatgttggagtatgttatgtaagtcatacccgccgatctccagaaaggcactgctgcgttcgatgccatttttgctcttctcaaactctttgtcttagcctaaaaatataccaaaaaaaaaaa

SEQ ID NO: 194873 - DNA, 3856 bp, Cannabis indica
aaaaaaaaacacaatgttttaaaaaccattttcaaccatccaaaacatatgtgcatatgatatatatattaatggtcttgggtggtataaacacaccacatcatgattaagtactataacattaacataccttgttttgttcaacttctgcttggatgcctagaatcccagctacaacatcaatagtcacgatcaagaagcaaacaagaacacctaccaacttaaccattttggtgaaatatgatctttgattattaattacctaacttggagttggagatcgagatacagtgagaaagaaaagatttttaggagaatttaaaagaagagtaaagtaaggaaaggaagaatatagaagagaatgtggagtagagtgagagaagagaagtggtcttgggtaaaaagcttcttttgtctacacagtggtgaggactttaaaaaagctttattgcatttttgggtttctttttcttcagtcttggattcctttgatataggaacaagaaaagtagggtataaaccagctcatagaggagcgtgcctaggcatctatcaccggtggctcatcagatagatgagtcctggtctggggcaatgtttttactttttgacttttagtcctcatttagaaaaaaatattcaatgtggccaattgtataagcatgtatatttatatacagtactcgagtgaatattaagttaaatatgtgcatgcagagtgggattattattgattgatttaatttaaatatgcagctcattacttagcagaaacgactttcttttccctgttttaagctttgttatctcatattttttgtgtatctctctgtttcatcattacgtcttttttcatttttgttttttgggttactcagttgtttctatagtcagttattggtgtggcatttcccacttataaaagactatcttaaatatgaaagaaattaattggtccctaagaaaattgatactaagagaagggtactgagcttatatagtattacattgtgacgaaaatggctagcttcaattaatttgcttaaccataagtagaaagtgataacatatatggtaaaatggtatgcttttagttttccagttattaattgctctttatatatataaatattgctacaactagttgaggggtctaccaatgggccagcttagtaaaagtagcaccgttagtttagaagatcgacataatggaaagcagttaagactaaaaaagaaaagaaaaataaagaggataatgtgaggtcgacataattgagcctagaagttcaggtaggaaaacgaaatcaggcacttgacttttttacttcttcggctcgattccaaatgttagtagaaaagtagtgcaatctagctaggttcatactcatgaagacgtatattcaaatcagatataaacaaaaatgtaaagagcaatatgtccaaaattgagatataaactcgaataaacatttcgctttacttgtgtgattgtaatgtgcatgggaataaaatctcattctcaattgccttgtgctctacttggtttttcatgcaaaattgcaattttgtagcttactcacacaataaagcccactactatcttatccagcccaatatatttatttctggacatagctgaaaccttgtcactgatttaacattttttaattttacaagagcacaaccaaacaatagagtgggcttcggcccattggtataaatagggcatgatttaacaatagaaaaattatccgaaaaaaaaaatattgaaacttgaaagtgagcacaacagaaattggttaacaaattaaactggagtactctataatgtgtatcaacctgcttaaaattaattcaaaccttgtgcttttcgaatgagaagatagaaataggcatccatttgaagaaaacccatcaaaaacaaatcaaatatccaagaaaaaacaaacaaacaaacaactaaagataaagggtattatagctacactctaatatttcagccaaatgtcattaatttgatgatgtcatattcgtatttgatttcaaaagtgtgatttccctctaatcatattatataatatttcttagtttgagtttaggaagaaaaaagaaaagctgggtacagaggattaccaccccttctttttctggcggtggccttctccaacagacccaattgctccaccgagacaatacagcttccctgagagtagagaatggtttggaccgcggacgagttgaccaggacctgcaaaagctggttcctcgtcagcttctccaacccagcgaactcatcgtcatcatcaaggtcaccgccatcggagccattactactcatcattggcatcgcacaggaaaatgcaggcatggctttgagagcagtcacctgagcctggaggaacttcacgtacttgaacgtttcttcgagcatggtggccatgtccatcttcttgtcccatggcaatagcttctgtaagcaccgagtcttatcgctaatcttctggcgccgcttcctggccagaaggctggaagggggtatcatcttcttcagcgacgacgaggagcaagccggccccggcgacggtctagcaggaggaggattgtagtaatggcttccttgagcgtgatgattgctgtagtgagtcgctgagtcgactcgggcgcgtttttggctcagtaagccaaaagaagaagacgaagacgagtcaccggtgactcgctcgagcgagagaagatcaggcaagtggtgggggtttagcacgtgggggtctatgcgagcggctaaagaggaatcgtgatcgccgaacatgaagttaaaaggcagagaaccacaatcgacgattcccgcggagcctgaatcttggaggcccagtggctcgggtatgtagaaacaacttccagaatggtcgtggaagaagccgaaagtggccggcaaattaatcatcgccggaggtagcaatgattcaagaggcggaacggcgacctctccgaatagaggcattgaattagtgagcatagattggtggtcagctccgagaagcgagagtagactaacaccggagaacatagagttgaaggcgttagcctcttcaaacgtttcagcagctgaaccttcaccattagccagaaaaccctgatactgagaatccctctccatgttttccacttaaacctcaatgagatataatgaaatcatatatatatatatacacacactagagtcggcgttagggggtgagtacacgtagcaaatggagattagtaagatgattggttcgtggaagggaccacaatgtaacggaaaagggacacgtgctgttttttcgaaatggatttgggttgggaattgggatatatatataggagaagaatgtaaaaaaggctacgatatgatgaggcgttggatgagtagaggcaatgttatcggagggttgagaaatattttgtgtggttttagggtgtaacgaagagaaaaggcagtgaatgtttgtataattttggtagggttttgggacatggtctggcacagcgtggctgcctgggcttggcgccgcttactgacgtacgtacgttcgttccctctttcgacctcaacatgtcgtaccaaacacacactactggagtctgccactgcatgatcatgtatcaaaaatagtttaatatattaccatatttaatcaaattatatgtatatagaagaagcagtgatatgttttttaaaggcaaaactgcctttattcaattaaaatatatattattacatgttgagatttattatggattgtgtggacttcattatgtgcttctatattaacaaaacatacaaaacatgcagattaacctaagatagctagtg

SEQ ID NO: 194874 - DNA, 1798 bp, Cannabis indica
acaaacgggacagtagaaaaaggtaaaaaaaaaaaatactaagctattagaaaacaaatacaagaagttttttttttttttttgtgaggaaaaaatcaagaaaattaaatataaaagaacgggcaacaatataattttccgttttttttttttttggagcttacctacataataacgcttaacaacggaacgtgtttcctcttccgcttcgtcttcttgcttctgcaaaagcatacctcgcccctgaaacccctaaactccgctaaacacaagctcgacatcgcagcggaaaacaacaaagctcccacaattaaaaaccctaatcccaaatccccaattcagtaataagcaaaaaaagcaacaatggtggtccaatttgtcaaatagggcttggtcccacaatatctactgaacagaaaataatacaataaacaagttagtgacgtggcaaaatcgtagccattatgttgtctataaatatgtacacgtgtcaactatagaatcgatcatcgctattaaaacccgccaaaactaactccatagtcatctcaagctatttcccgccatgtgggttttggcttctaaaaccctatcttctgttccatttccatttctctacaacccaatcccaaatcgccatagctcgagctcaaagcttaagcttaattcgagcgtgaaattcgagtatgagaccgaaaggggtctggatttcgagactggagagtcgttttttcgccacgagagtgccacgggccgggacctcggtgtgctcgcggcagcgttgtataagaaatccaaggccagactacgaatactcgacgggttatgcggttgcgggattaggtcgcttcggtacctcgtcgaagccgaggccgatttcgttttggccaacgacgcgaacgatgattgtagggatgttatttgcaggaacttgtcgaaggtgccaagaggctccgacgatgagcctaggtggacggtgacgcataccgatgcgaaccgagtcatgacggagtgttatctgcaaagggaattctttgatttgattgatattgattcgtttgggagtgattcttctttcttgaggccagccattaatgctttgagatttgatgggttgctttaccttacttcgactgatggttactcttcaggtggtcaccggcctcatcagtgagttttttgaacttttctgtttctgtacttcttagcatgatgttcaaatttggatagtcataactgttgtgtattttcattgtcaagttcattagctgcatatggagcttatgttcgccccctgccatattcaaatgagattggattgagaatgcttataggtggagctgttagggaagcatctgtattgggtcttcgtgttgttccgcttttttcatattattcataccatggacctgttttcagagtcatgcttcgagtaaatcgagggaaactttctgacaacaggtgcttgtttgcttaatagggaaaatgataattgttccattactcttgattaaaagaagaaaaattgtttctttctcttaaaagctattaagaatatcttgttttaaatgctatcaagaactttctacatgataaaagcaattggatattcatgttattaatcacttgtccgatttctgccagtcattatagtttcgttagctactgtcaccaatgtggaaactctcaaacattttcatgggatgaactcggtcagattagttgctcctgtggcaattcaaaggtatatgtatcggatccaggtaattctcaagcatcaatattgacctctttttct

SEQ ID NO: 194875 - DNA, 1066 bp, Cannabis indica
tttattggtggatgataatatatatttctttctatttaatttagtctagttagttctgttagactgagagttgttagtttgttatttttggtgtattttctgtaactaattagttactctcagggctggttctaagttaaggcaaactaggctcgcgtctacggtacactcttattaggaaccaaatgaaaaaaaattataaatatacatttttttaataatttttaaaaataccattatttttttaaaaaaaaaagaccaaaaaaattattctttctagggccaagttttactcagaactggccctggttactctcttgagttgtcttagtcattgtaattcattcatttttgataaatgagaatcactcatccttttctcaacttctacttctttgtagcttaaaaggcagcagattcacgtgaatcgtgagctccttctcttattcttcttcctcactgaggtttattgatggcttgtgtcaatggtttgtggaagagttaatactcgaagctagattgcaccaagaaacacgctagaagattctaatcttttctctattttcgaattgagttctcaatctcatgctccaagtcgagatccttattacttttctaatggcgatcatcctagtgcaaatcttgttcccaaaacccttatagggggcgacaacttcaattcttcgaggagagcaatgatggtggttttgctttctcaaagcaagatgcaatttgtaaacgggaaattgaagcaacctgatgcagaccacgaagatgtttggaatcgatgcaatagcttggtggtttcatggttgcttcatgtcgtaataagggacacagttgatagtgtcatgtacatcaagatcgcatcacatatttaggatgaccttcaagaaaggtttcatcaaataaatagttcctaagaatatttcaatctaacatatctatgcaaatattgaatcagggtgcattagatgtcgcaacatactttactcgaaagaaaacattgggatatgattcaacactatagacctctacctgtttgtaaatacggtgtaatgaaggt

SEQ ID NO: 194876 - DNA, 967 bp, Cannabis indica
gaacaatcacgggcatgcataggttgaaatgaatatatatcaactccatccaaaacaatttcctccagtttctgtccaaagcaatgagaaagtaacctcactcagtatcaaataaagagagttattcaggaaaaacaaatcaaattttgctgaatttgtatgagggctattattactatctacaagcttcaagatttttaatgatcattgtacaacttcattagaagcattatctaaactgggaaggaacagaagacttagaattaattgtcttcataatatatttagttaccaagtttatttgctcaagatcaagaccacgacgaagcattctctcccgacgcctcacagcaattgcttctttacgatgttcttttttgtacctgaattcattataattaaaatagtcaattagtcgacaagggaaatgtaacacacatattaatcacagaaaatcaaaaaagacaaatactgaaattcatgttaaaccgtgaaaacaatgcaaaggaaataatacataaataagcatttaatcaaatttataccaggaatagttctggaacttttactcttctgatcccctaaaggccaagactgagggaagcgagcaacatgcttctttttagcaaaaacttttcttgggtcctttatgagcatacagtcatctaaagattgataccaagaacctcttacagctgtactgtgtttctgctttgattggggcttcttcattccataatccctagatgcttcctgaagagcaattccactcaacttctttacagtgttatcaaagccactgcttgaagtatcatcatctgaatcatcaaattcatgtcctaccaaccatttggaatttaaaatattttcatggccgccaattccctctagataatcttctacaacatcatcgtcaacatccgaaccactgtcagatgtgtcttcagagtcatcactttcagatgac

SEQ ID NO: 194877 - DNA, 909 bp, Cannabis indica
ttttttttttttttgaaatggtgaaatatatagagtttaggtgaactattaatgtgtatctatttgtttttttttttacaaaaattgtgtatctatatataaacatggaaccctaataaatttgttgcttggttttttttgcttatatatacataatgattaatgatatatatagatatatacacattgtcataagtgtataggtgttgtctggttaatttgattgctatatatataatttgatatagtattatggtatggtgcaactatatatgtcatcaaatttatggtacaacactactactagaatagatttatatatatatatatacaattatttatataaaaaaaaatgacatgaatttctcttctccaccacttatttattttataaaaataaattaggagtgcccaaaaaaataaaaaaataaaaataaagaaaggacaagaaaatagagagtgatgaggtggggttgggttgggatgagctgtccaatactgaattagatgctttatctgatgcttacctgtgctgtctatatatatatatattgtatctatctatatataatatatagtatttatttatatatatttatttgagtaacatacataaccaatgtaaaatattcacattaatttaaatcacctaatctaatctaatcacagcaagtaattactatattcaacatatgtttacttgttataagactactaatatggtaataatatataaccctagtagaagaaaagaagtaactaattattttttgtttagaaaaataccataaaactaataaaaatatcgaaaacaacaaactcttgtcctaataccaatagagtctaacaccacaacttttcattctaatcttttagtcaatctctgtgctcgaaaacgcatgtcgaaat

SEQ ID NO: 194878 - DNA, 2049 bp, Cannabis indica
ccctctctaatccattttcttcctccaatggccggagacggtccgtcggagattcagatccgggtcaactcacgtcgaagtagcagcggcggcggtggcgtggttcatccagttgaggtagacactcctcagcagctaacgtctccaacaccacccgtatatcgagaagtaaagcatttcaagaaatggatcccttggttaatccctctatttgttattgccaatactcttatgttcataatcaccatgtacgtaaacaattgccctgataattcagattcttgtatagctaagttcttgggtaggttctcgtttcagccttttaaagagaaccctcttctgggtccgtcatccactacgtaagttcttatcagctttgatttttgagtaagaagaaaagggaaaatgatgctggcagaatttttaacaattcattcttaaagtccttttattggtttttgtttctattattaacactttctatttttggattcttggttgtataggcttctaaggatgggggctcttgatgtgaccaaagtggtggaaggtcaccagggatggcgtcttattacttgtaattggttacacggagggctttttcatatattggcaaatatgttgagccttttggttattggtattcggctcgagcaagaatttggatttggtatgtataaggaaagtagttgtttgcgatttctaattaccattattattaagatttatgttatatatcttcccaaaaatagctgccgctattctagatgttgaagaataaatgatagtagtttagattgttttccataataagcttttttctttatactgccaaataaaataactaatttaaggcttaatgcgtgtatcacaaatattgatattcacacttgtaaacataaagttgagattattgtcagattaaagttgggattttgattagcctagaaagcctaaggtttatatagattctgttattttgtagacactaaaaactcttcaatcattgttattacgggatgtgagaaagatgaggttggtttggtgagttgatttgatttgagctactaacgtttgcaaaattatacaagtctaaatatatgatgatattagactgtagaaagagttcttgattctgtggagctaacttgattttttcacaccgatgtcatgatttttactctaaacacttgtgatttttgtgtatggctctttcaatttcagtccgaatcggtttgctgtatgtcatttctggatttggtggaagtttgttctctgcacttttcctccagtcaaacatatctgttggtgcttccggtgctctttttgggttattgggaggaatgctttctgaactcatcaccaattggacaatatatgttaataaggtgagtatttaactgatttaaattaagttgaatattggtttcaaattactgtccctcatgacccaaatttcttatgtattcagtttgcagcacttttcactcttgtggtcatcatagctattaacttggcagtgggaattcttccacatgtggacaactttgctcatcttggagggtttctttccggtttccttcttgggtttgtgtttctcatccggccacagtttggatgggttagccaaaggtatactccaggatttatgtcaccaacaccacctgttccagctaaatctaaattcaagacatatcaatgcatattgtggatcgtttcgcttatacttttgattgttgggtaagttactgaatcgatagttgtgcttatattattagattttacttcaaaagcatatggggattcattaattattacttaaaacaacaacgccctttaatcaaatcgaggacaacaaaggtagtaatttgctttgtcatataatgaactaatgacgggtaattccatgtggatgtagctacaaaatctttccatatctcagtcttgtaataaatctatctaccttgaacctttgattcagaaaattcattttaggtgagagacagaagtaactcttttttgtaaactttaaaacttgcttactagctt

SEQ ID NO: 194879 - DNA, 2032 bp, Cannabis indica
agatatttttataaataaaaaattaaaaaagtaaaaataatatattttttttcatatgaacatatttatataattttttctaaattttttattctattatataaatttttcttatgtattttgaactggttttcttatatatgaatcgtaaacaacccattaaactttatcttcagcttaataaactatttggatttttttaattaaaaaaaaaacaaacgaacatagattttcctactattaaattttccttattatatatatacatacaacttttttgaatacacatgtatagatattataatattataaagagagagactatatattatatcaatctaactcaattatgtcatgcttgtatgtttacttattttattaataaattttcaaacccttctttccttctttaattacaccactttctctctcactttcccagctatatacctaataataatacttctcttccttctcaaaatttcatcagatccattattattattaactcaattttattctcttcttaattaatttcgtactaaatataattagtaagaaattaattaataaaatgtctgggttagaatcaggtggtggagtgggttcacgttacaatatccaccaactacttggaccggcagatcttcaactcaacgattcaaatcttaataactcgccaactcaccactccgacgcaccaaccacaagttcgggtggtggaggcggcggagtaggaggaggaagcggttcttccggaaggaggccacgtggccgtccttctggatccaaaaacaagcccaaaccacctattttcataacaagagatagtccaaacgcgctcagatctcacgttttggaaatctcggccggctccgacgtagtcgaagccgtgtcaagttacgcccgtcgccgcggtagaggagtctgtatcctcagcgggacgggcgcagtgactaacgtcacgttacgtcagccttcggcttcgggaggcgtgatcactctccacggaaggtttgagattctttccctgaccggaacttctcttccgccgccggctccgccgggtgccggcggcctgactatttatttgagcggcggacagggacaggttgttggaggaaacgtggcggggccgttgtcggcttctggaccggtggttttgatggcggcttctttcgctaatgcggtgtttgatagattgcctctgacagaggaagtggaagaatctactactgttccgactacttcgcaatcttcgggggtgacaggtggcggcatcgctgccgccgtaggtggcggtggtagtggtggtggtggtgctgttcccttctataatttacaacaagggaattttaataataataataacaataataataataataataataataataatgccctaattggtggtgatcaacaagggtttggttggggtggtaatattaataatgccactactccatcaaggtcacaattttagtatatgttgtatgtatatatattatgtatatatttatatagtattgtattactatatatgtatatatattattatatatatatatgtacttatttatttttatatattttgagtttggaggatatgatgagagaaggatatataaatggaagttaggtcatcaatatcatcatcaagatcaagaattaatcatcatcagtaagtaaattaattaacagtttttatgtacaaaaaactttaatttatttatgagatttatatatatattatcaaatatttattatttctttcttctttttattcttcaaaagttaggccttcaacaatttgttaattaattaatgaattttacattaattattagtaattaagtgtgcttctgttgaaattatatataactctttaaatttggggcttgttgtgtttgatttatgtttgttaatttccattttcattttctttccacattgttattattttatatttttaaaagaaatttggtatgtatatcttggagaatgtagtatatatatataaatatatatt

SEQ ID NO: 194880 - DNA, 1618 bp, Cannabis indica
accttcccctacggactaatgattcttatacatgggtatgccactcttggttgcttcatggaatgacgactgaccctgcagaccaacacgagtcttttcaacatactttttcctcacttgcctactttctgagaaaacccccaggtcaatcacgcttaactttggagttgtttcatgatgggctaccataaagaagatatatcttgttgatataggttgtaccaataaattcatttaagctctcttcaactatgtggtcccatacctacacagtctcagaatcatcacacttaactttccccaggcgatgtggcattgcacaactcttagtctttccccttgcagatcacgagactctcactgtcacaagatcaagggattgttatccccactaaaggaattttctagggtgatctagtttttccatacctttttcttctctttttgagggcttatcctccctcatcacttagatgaccaagcagcaggtccccaagaagcatgcacttggtctcaaaatcgctcgcaacactcccattgtctctcaccttttctttgttgatgacaatattcttctcaatgatgcttctttgactgcgattgcttttattaaggagatattatatgactatagcctggcttttgaaagataggacaattgtgccaaatcttctctttactttcccctaacatagatgaggagattaaatcgtccatcaccaatacctttaacattcctattcgcaagacctttgagaaatacctgggtcttccttagtcctttggtcactctgaaaaaaaaggccttcaattatctctatgatcacgtttggactcatttgaataagtggaactccaccttcttctcaaagggaaggaaggaagtcttactaaagtcaatggttcaagctattccgtcttatgccatgacgcgtttcaaacttcctttctgttttcactctaagttaaaatctatggtggcacacttttggtggggtggcactgaacaaaaccacaaaattcattggacgaaatgatcttctctttataaatccatgttccatggtggtcttggatttcgatccatgaaagcctttaaccaagctaagctagcgaagcaagcttggcgtcttctacaaactcctcaatctctagttgcttctttgctcaaagcttgttatttccccattccactttccttgacgttggtaagaatccttgtccttcactggtttggactagtctttcatggggtagggagctcctcctgtcaggacttaagaaaaaattagggacaacacctctattttagtctattataatacctagattttggggtatggtaagcttggctatcttacaaacccctctaaccgcaccaaacttgtgtctaacttaattacatgcaatggtacttgggacttagcccaacttcattcacttttccatatcgaaatctaccaagccattctttccatcacattgcccaataatcaaacccttgattctctctattgatctcatacaccacatgggcactacactataaactcaggttttcatcaaccacacaacttagcaacacaaacaaagcattctcttccaatacattttcaca

SEQ ID NO: 194881 - DNA, 2129 bp, Cannabis indica
ttgatcatttgagcctaatttactgctaactagaaagtctttgcttctacaatagcaggagaaaccgatcgcttgacaatacctacaatgctctggttagactcaaactataaactttccttaatttccttgtcaattgccgcatctgtatgaacctggacttagaacaccattagcaggaaatggtttctgctatgcatccagatactgaagtaaaaaaaattatgatagagagatagagagacatgcatttaatgctctgcaaaattaatttgggatgggataggaaattatcaagatccttagagcaataaatactgaggtgagatagagaaagattgtaatgaagatggtagagggatcgattaatggatctcaaatgaggaaaagaaccaccacacaatacagatttgggtggaccataatcgccatgaacgtacggtactagaaggttgcatacagaggccatggccccccctagatttattctatatgattaagtttatgtatgttatttgttttttgttggcttatgtaattcaatttgtattttttttcgagttatcttgatttggtttagacagattagtcaagttggagggtttgtaaaaatttatgtacatttatccctcttttttaggtcttaaagctattttagctacattatgtactctttgaatagcatttatttttacgttgattagtgatattccttattattttttaaaattatatgggaccttatatttaattataccaataactatgggtgttcatcagatccaatctacaatattttgctcatagtatatccgattcccactaagtgcgaattttattttttggatccaatctaatctgcacaatagctcaaatccaacacaatccaattcgcaaaagtgcggattgtatcaggtattttggattggttactttttaatatcaaattatttaatatttatgaaaaaaaatatattttttacataactagcaacaaaataaaatatatcatagttatttcatgtctccaacaacaaattaaaataaataaaataacaaataataaattcaaaagaaaaaaattgtatgtacaaataaatatttagttttgttataaattgtatgtaaaaaaaattatataataatagaatatacatttgatctattaagttttaaaatataattgtattacatgtattagattttaaattactattttctttacattaaaatagtatttgtataaaaaaattttctaaaaaaaaaaaaaatttgtatatataatttttaattttttataagtatgtgcggattggattggatcggatcggttacttttacatgtcaatcaacatccaattctcacaagtacagattttgaatttttcaatccaatctaatccgcacaaatgcgggtatctttgcggattggattggaccgtttggattggattgactattttataaacacccctgccaataacggtatgacattgaaaaaggtgctaggcaccaatagtaatttttaacaattctctatgtgtaaatagtaggaaaatgaggacacagagcttctaatttagcttctaattgtatcaattacatcagaaaagattgaataatttgaaaaagaagagctaacatttctaaggttataaacatttctttgtactgtttatactcttgaagatactttgaaacccatgagtacacatccttagctggaagataattagacctgaaaatctttgaatttctattattccaaatcatccataaaagacctaaaacagtttcacaatcagatttagttattgttttaatatccaaatgtttattttgattctagaaatctttaaaaggtgcgtatttccatatcttcctatctctggaagactcaagtagggaatacgtcactatttcagactgataggcacaataagagcaggtagaaaaagaaagggaaatttgcggcaaaagtccccaaaaagttcacggtgatcagattagtccccaagctccaaaaatagcggcaatagtcctcaaggtcacactttttatttgtccgttggtctccaagttaacagatcgttaaatccaattcaaatgccacgtgtcgaaatatcatt

SEQ ID NO: 194882 - DNA, 765 bp, Cannabis indica
tttttcatagtttgatccttcatgttttagttgtttccaccttgctcatacctggtggatggaggtatatggtctctcttggaagcgaacaagtggttgttatccaagtggatcctgatgtcttggagacgtcgaacgcctcggcatcttggaacgacaatgaattacttaggaaaaaggtagcttttgactttgtttttcccacagaaggcgccaaaatattgatggtaggaactcattaatgatgttagtagctgtaaactatatgtgtgaatgatggaaaataaaagaaataagtaaacttgttgaaacttaagataagttgcagaacaacactggcgaaaataagagtgttatattgataacttgcaagctagggttacgccaaatttccaacccctttgaatgaggggttgagtatttataggtgagctctgatgactcattacatgtggtccccaaggggataacttagtacctactacgtttgttggtctcagaggtcagaggggtggccacagggtagtgcttgtagcgtactattggtcgggtatgttaggtgctacaagtgggtggtgatcccactacttgtttagcccttgtctccaagacttgttaggtgttgtggttgggcatgaaaaagatggtcctgacttggtggtcctaatgcaaaggttctccgtaccttttccatgcccattttcttgtcctactcttgtcggtccattcttcctcacaaatgactaagtgtttaggcttactctc

SEQ ID NO: 194883 - DNA, 2407 bp, Cannabis indica
ttttatttattattaatttgacacaagttgtcagcaactgagacagatcctaccgagcccaccaccacgatactagtaaaaatcaccccaaaacacacacacacacaccttcaacacgttgaagagccaagaagattctattctaatttctaaaacgcagtgaaagtgaaaaccaaccccacctcctctcacatgaccaccgccgataccttccaaacgttttaattattataattttccttttttactacgaaacaaacttattttctttaattcccattattaaattcttccaatatgggaatttcaaggagagacaacttaaaacacagagctaacacggataaatcccattattttaaaaatctaatcttgcattaattaattttatgctaattaattattgactgttattgggtttctacaaatattattatattatttatttggaaacacagtattatagtagtactacttctctctctatcttctttctaaagtgaaagaatcaaaaactgtattctatacgacaaggctacaaggttctttcctctgtctcttctcgcactctcttttgtctgtttcgctcagctctcttcttcttctgcactgagacgagaacataatcgtattttattaatcgaattgtgacccatttaatttaatttaattaaactgtacaaaaggttaaaacagaaaacaaaaacagatcagaggcactcgaaatttcatggttctcagaagataatatatatacatcgatctctatctttcttcggggtttagaatttggtcaaacaagttgaaactctgcatgatatgtatgattactattatatatattttggagacaataaaaacaataaaagggtcacgaggggatatggatacaatataccacgaacaagttattatataaattatatatattcatacaacattttctgataatgatatataatatataaacagaaaagatagctgtttatatttgtggtgcatcaataatgaggacagcttttgtcttccgtgtattacattgacatctctcaatccttatagattacatgtacatgtatgaatatttctatataaccttttcattgctaatcctaattcacatgatgattcagttctacacactgctacgcaagatcgatgctcaacaagtaatgtacctcagtaataaatatatatattttgaatggggcaataaatattaaataaaataaattcgtgtaactatttttgcaagtccaaatagtttcacataaatatatatgtaaagttcaacactacaacaacattggtttacagaaagaataacttcgactgattactagattcagattatcgagttacttaagaaatgaatttacaattgtaactttaacattcaagaatcagattaatgagcaatcaatattgaagatagtgatttacaagtttcatctgcactgagaacaaatctcagctgactagtgcttgggttctccgaaccagggtaataacatccactatattcaaagattcatattacaaacaccagttcacaattaagtatttaatacaatctttacaacttttagtgaaatattactaacatcaaccaagatccttggttgaatacacaagattccctgtgcataagttaagttcttcttcaacacttttctccaatttgaagtcccttcagatctgatgacgaagatgacactgaactaccttcaatctgaactcagctcgaacaggctgtgatctttcggctatggacaaccatcaccaagatattcaatcagacctgtaaaaacaaagaactatacaagttaccacacacaatacagcacgataatattgaactaaccaagaaaacgaattagctagctaaccaaatcacagaatagaactagctatatatagacaaacagttctaactgacctaattaacaacattttcatgacaactgttaatgcataatagactgacgtggacactaatagaatattcacatgtagttatgtcggatgaacaccacagataagactggaatcactattaatataatctatcaaaaatatgaaccttacaatctccccattgacagattatgttcaatgaccacacaaaacaaataatagctactagtcaaaataaaggaaaggacccagaaggttatccaccatgcagcaagaaactttagaaacataaattgtctttgcaaaaagaaacatagcaatccataatccatataaaaaaaacttgagaacatatatatctcccccttcattgaacataatagattgcaccacatctttgttagactccccctgggatagtgggtactgaagaaacaagatgaggagcagaggaaattcgagacggtactacaagatgttgggttttatg

SEQ ID NO: 194884 - DNA, 917 bp, Cannabis indica
ccacataccacattataattaaattatataattatgtatattctcccataaaattgattggtgataaagtaatttttttcaaaaaataaataattaaataatgctacatgactattgtttattttggacaataatattcataaaattaatttaaaatgttgaccaaaatacacctgtagcaaaaaccactcatgagcaactctattggaaatgttctaacaacaatatttctttaaaattgcctcaaataaatcattatgatgaacatcacttcaataattttagatgataaaaatgataccaatgaaacgataattggaaacactataatgttatttaagatccttatatttagaggtcaaatctagttataagttatatgtttagtccattacggttgatcacatttgttttaaaattttgaataatttgatttaatttcatattaaaatgggattttttaaaccacttgtttattttatttgttatttttataatttaaaataaattataataataaatttattttatttgaaatacgattgttatctataaaaaaatattatgtaagtatgaagaagcgagtggcatgcttcatggcttacgtgtttcgcgaggagctccgacaatttctcatctattttttgcagatgatagtctagtcctttgtcgagctaatacgagatctgttgaagctattcgatgctctctaaatctttactgtcgtgcatcgggtcaaaaggtgaatgctgataaatcggttctctctttcccttcaaacacttcattgccaatctaaagtaatttgcaacaaatattacaaatggcaattcaacattgtcatgagagatacttgggattgccattttactctggtagggacaaaaaagtattgtttggtgaaattaaggataaat

SEQ ID NO: 194885 - DNA, 1266 bp, Cannabis indica
acatttagtcacaacaaattgtgctttttgtaactagtacttttagtcacagactttttagtcgcaacatataggaatgacaatttataattagtcactacttttttacttttagtcccaaattttattgtgactataaaagtaagatattttttaatgataataataatgttattattgtaaattagattcaaacaatgtatatcattgtaaactgaagtcttatgagtttaccatatatattaagagctttattataaggtataatggtgtttagcacttttatgaggtagcatcctgaaatgttaactattttgtataattattattaagttaaaataaattggatccaatattaaattgtaccgctaacaatatgactactggtataaagtaagggtattttaatatttttaccgttaaagctaacggtattgcaccctttaattagcatttttctcatataaagcatatataattcattattcagtgcttgtgtatgtaaaaattgtctcacataaaatattcgaaattcacaaagaaaaccagtttgacttggaacatttttcaatttctattgctatatttaaattgttaccgatagttcaaatgagtaatatcatatacatatgagtacaacatttcgtttatcttcttctaagtttagagattgatcgaacatgtgtaagatgcacaagaaacagactataaatatatgcatcagatcgttgagagagagtagagaaggcagatagtgaaatgatgaatacgtaccataaaattatgaatgtattacgccatatgaacatggattaatgagacgagtaataagataattaagctaaaacagtgttagggcaactctcctttggcaagtacggagactatatatgacactaatggtatttatattatagttaaatcaacacttgccaaaatagagaagccctataactgttttgcttatatagacaaccccaactcaattcttgatcatatttctttctgggtttgggttatcaggcatcaaaatactaagccttttataaaaacaatctggcttaatgagtagatggaataaaccttggaagcaatggcatatactagagaataatgccatgtatatatagggacttttcttttcacctcttttttctgctcttttagtgcagaatattggttctgtatccaagttttggagaggtccttttcaagaatattgagatttttgctcatgattttgaaggtgagaaggggaaaattgca

SEQ ID NO: 194886 - DNA, 556 bp, Cannabis indica
aaaaaaaaaaaaaaataacttgtcctgttcttaccaaacggaccctaagagacgattcattatgtcaattgtaaaaagaaagcacaaatacctttctccctttcgatatctctctcgattctccgacgacggcagcgcaggttgcctcactaactcttaccttctctgttcaacttctccggcacccagcggctaaggtggtgctcgagtcgagagtggtcgaagcagcagaagatcaaaccctctctcttttctttttttttttcgtctaaaccctaaaaaagtaaactgggttttctctcattatcagcaggatccgtcgccagtctctctcggaggtctctcattctctccgccggcggtatatctttcggagccctctcagtcgttatatctatcggagctctctcagtctctcgatcggccctttctctgggtaagttgttctcttctctctctatttttccctcttttccttcgtcgaggactttaatctattgatctttagtaaaatgatggtgatttacttagtgattacatatgagtgctttattat

SEQ ID NO: 194887 - DNA, 2080 bp, Cannabis indica
aaaaagaaaaaaaaaacaaatggagaacaaaaaatgaacaatagaaattgtcatattcaaagaattaaaataaaccaaatataaacagagattctttgtccactttatgaaaaattactcgactcctgtccaaaaatttcttgctattcaacattttctggtctttcgtaggtagacaagcagcaaaagaacaagctagttacacagacaagtaaagaaggtaagatatgaggattctttttttccttcaaagggcactaattattaacttcttgacacagattataatttttctttaatcactagtgcaatacaactggtaatggtaataaataatcaagtagctgacaaaatcttgccattaaatacacgcataaatctaatgcaagggcagaccaaacaccgtacctcttggtcaccatatcaatattagagaatctctcaagcatttctttgtcaacataatgctgggttgaaggactactagcatttagtggcatactcatattactaacactggcaggggaagcaaccccgctcattgcaggggtcttgggaagggaatttgatctccgtttagcagcaagttgggcttggtgttgcctttgcagggaatcatttgcactggaagttaaagattgtgttccgccaactgcatgcatcgtggatattgctgacttctccttctgggatgcagtagtagttgttggagctgttgcaaactggggtccagaaccactagaaagctcacctgattttgacgataatggagattgcgccaaagttcctgcagataaccgggggctttgagctgattttcttttctggaactgttcctcctttctgccatctttctcagtgtgctgaccaagattattccatgatgtttgaggaaaatttgatctcatgaaactattctgcagtaatcttgcttggttccttgattgctgtggatcaagatggctcatttcgttttccaccatctgtgtatcatttctacctccattgagctctgatccatccagcttagctgtctcaaactgctcttccttagcagtgaatctcatgccctgctgtcctgcagaaaatggtgccgtcacatcctgatttaaaaccccttcaaacacctgctgggaaaacttctgattgccagtatttgcatactgcattcctctgcctgtagcttgctgctgcaacaatgcattcttccagttgtccatgtgtggcccagcttgctgttgttgttgttgcaatccctcaagacctaccggcataggccttcctcttttattaatattggctaagggagacaactgtccatcctgattctccctctttctgtgaagagaggtgctagagttcacattatcaccatatgtaatcattacatcctgcccaacaggagatgccccagatgaatttacaacaaatcctgatccatgatcctgggtacttctttgggtaccaacccccatttgatagcccatttgattagataccaaatgtggcgttgttacagaagcatcagacacaaagttattgcctctaatggccaacatgttgctactcagattttcatgaacattctcggtaactaaactgcctgaatctcccagtctgcagttagaactctctggaactctatcaatgcatattttctttccatgtgttttgctgttagatgtgacagtaacttctggcatctgtcttaatctctttcttcgcaaactacagatagccaaattcagctgcaataaatccagcaaaactaaaatttaaatgcccgtgagttttcttggtagaaaactaaaaacagccttaaaattaattacctttgttggaactggattcttacaaagcctatccaactttggagtggggtctaaatgaagttgaggttgcagtgcttttaatatacgagactccacctcctgcaattaaaagcatcactatgcgaataattgataggctttatacgtaaatagcttgataagagaaaatgcatgcataccatcagatcaccataagtccaagaattatctgaaatcaatggaatatccttcacaacattctctaatga

SEQ ID NO: 194888 - DNA, 2387 bp, Cannabis indica
aacaaaaacgtcccaataacatgcagattaccaaaaaaaaaaaaaatacagtaaaaacgttttatggcatttccttttccaaataacatacaaaatgaagtaaaaagaaagcaacattatcaacggggaaaaaaaaaaacaggacttcaatctttgaatttgagtttaagaaaattgatgagtggaaaaaaaaattgatttaataaatttcgatataaacgtagtgttgaactagacaccccctaaccttgctctgttttactttgactctttagtataagtcaatgttgagatgattcatataatgtgaatgaatgacattccaaacgtatggcttacgtagtttttctcttcatatatatagtcatacgtgtatgagaaatttttcaagtttaaaataaaaacaaaataaaaagagtagcaaaatggccaagtctattttttcaaaccttgtattggtgttcctcttcctcacttgttatttctctccatctcttgcccaaaatgcaattcaattgccattaaaggctgtaaatctaggaaattggcttgttatagagggatggatgaatcgttctctctttgataacatacccaacaaagatctattggtacaaacttaaccaaaacaaaagtgtcttcattaatgtgttccccctcacatggaaacttttttacacacatcaaactttattttgttatattggcttcaacattttttgtatattttcttttgagtaggatggaactaaagtgcaatttaagtctacgaagctgcaaaaatatctttgctcagaaaatgggggaggaaccactgttgttgctaaccgagacaatgcttctggttgggaaacatttcgtgtaagtgcttctactctaattgtattctctaattcgatacattaattctcacgagttattgcacttgcagctgtggagaaacaacgagtcgtctttcaatttcagagtgtttaacaaacagttcgtgggattagtgaatcaaggccaaggaaacacactagtagcagtctcaaacgaccctggtgattctgaaacttttcggattataaggaatgaagatgatcctaatcgagttcgcattagaacagccaatggtttattcctccaagtaatattattgttttgacttgatccaagttattaatttacatgattgattttacatatatatctatataaggaatctttttgggcattgcaactacactactaggcacaatcagatagcccagtgacagcagattatgaaggggcaagctgggatgacaatgatccatcagtttttgagatgacaattgtatctgggattcaaggtgaataccaaatctcaaatgggtatggcccagaaagagcttctcaagtcttacaggcaagatttcctaacatataataatgttacttttgatgatgacgcattaatatctgaatttgatgatcaaatgttttgaattaacttttgagtatgatcaggatcataggagtacatacatcacggaagatgattttagattcatgtcatccaacggtttaaatgctgtaagggttccagttggatggtggatagcccatgatcctacaccaccacatccctttgttagtggctcattacaagctttagataacgcttttcaatgggcacagtgagctacatcctatttcttactgagtcttcaaactaatgtacaagaaatatttgatgaagatatagtaacaaattaaatttggttggatgctacagaaattatgggatgaaagtcatcattgatcttcacgcagtgcaaggttcacaaaatggaaacgaacacagcggaactagagatggatttcaagaatggggagatgcctacatgcaagacacagtttcagtcatagactttttagcagcaaggtatttttccctttttttcctttttttttatttttcttttgctaatgaggatttctgcttccgaactttaacatgtactaaattatgcctctttgaacttttaagatcgttaaaaatactccttgaactattgagattgttggatttaaggatttttgtctaatttcattcaattttacaatttcagtgattttttatgtactaaaccatgctccacatattttgatatctacgaaatcatacccgtaataaattatggtccctgaactttcattcattgttaaacttttttattaaaaaattgaaaaaaaaaaaaaaatccttaaaatctaaacaatcttaatagttgaggaacattttttaaacggccttaaaaaaattcaaaaagacatttagtacatgtcaaaatttaagggagtaaaaaattctaattagtatttcctttccaactaagctagcctaggctagaattaagaat

SEQ ID NO: 194889 - DNA, 1360 bp, Cannabis indica
tgtgcaactttgctgaaataatgctaaagtaatattgtaaaaattgggtagatttaacgtaaggggattcagctatttaagtctattattcaatagatactttttcttgcagataatttttaagtatttgttgatttattttgagcatattttcattgtcacaaagttattttactttcatcaataatccattttgtttttgtttatttttcttccaagagatcttaagttattttcaaaaaaaaaaaaaagaccttaagttgttaattagttagttttacatatattttaatatgcaagccctatggagacgatactcaacttatcattatattacttgttgtcgattgcgtgcacttgtgtataaatataattttcacaacaaaagcttccacagtatcagggaatggtgactgactgactacacgccctcgtacttcatctagtttattattcaacctagtgagaaattaaaacaatcattctttttcaaggtgttttcattgtttcacattgtaatcagtgcataaaggtgtggtctcgagatagaggtcgagttcttgtcacgaatcttttaagtctaaaaaatattgggtgacatattgagtaccttgttacatttttttgagttttgtatgaatctcaaatattgtgaagcattaacgaggtctgagtatataagatgtgcaacatcccagacttccttagtcgttttaaaaaacaagtacttatagatgattttaggatccatagaattaattagccatgacaaaataagtgagttttcagcccgccataccttatgattgtgatcagtgattggtggagcaagaagatctccgttgatatacccaagttttacatgcccaaaaatcaaaatttttatcgactacacccactgtaagtagttttgccttcaagcttgtgagttgtgatgtgtagcaagccattatcatggttgtagagagatccaaaggaactactcgtctgatgttgagaaataaaatcttgagttctagagagactgaatagaaccagagataacaacgaaagaggagcctctaatgaaaatatttgagtcatctgtcgaagaggtcttgtcatccatgatccatccttgtcagagaagatgaagatcaatattcagaaaagagaaaggagaagatgaaccacatgactttgataccataaggaatagaataaagaaataatttttatttattaatttgataagtaaaatgtgtgacctttatataggtataatacataatatttacaataaataataaagaataaaatcccacaaatcaatatcaatataaatatatatagaaagaaaggttttaaggagttgatgtgg

SEQ ID NO: 194890 - DNA, 886 bp, Cannabis indica
aaaaaaaaaaaaaattagggcttgattttgatttcgatatcgaaagagtgaagggcagaaacccaaaattttatagaaggaagagaaagaaagaataatgagaaaagaaaaaggaagagagagaaagacgtgggtgataatatgaatacttgtaaagaggcggtttgttaataatgtggtattattattttttattattattttaaatttttttccaaaaaggaaatttttttattattattttaataatatattcatttcttttgtaaacaaatttcttaaaaatgcaatgttaaattttttttttattttccaaattatgacaagatccggaaattattattgtgagttattttgcttaataataacattttttgttataatttttaaaaatgaagtttatgtttttaatcaatcgtactattttggcattgccaaataaaatatataactttctttcaaaaaaaattaaatatataaatttatttacaaatttgttgatgaccatttttttttaaagaaaataggtaaaatgattgggttgtgttttatgtgtggcaaatcccatctttttcgatgaacgtgtcagaaatggaatttttaaacatgtttagtttggctgtttcgtcttagtaatttatgtagatttgattgacggagaattagggtggggagtttgttaagacattcattatatctcaaaacactaattagcaaatttgactgtcataatttatagttgaatttgtaatttcttttaattttatctatttatatatcacattttaggttcttttcattcaaaatgtgcataacgtatatgaaaacatcaattttactcttaaaaaactgatcattttcaaaaactaatgacaaacttaattgt

SEQ ID NO: 194891 - DNA, 3269 bp, Cannabis indica
aatacataaagtaagtccattaaatattattcttttagcacaacacaatttattatatgaataagaagagtagagagaaaggcaccaatttttctaaaagaaaaaattaaataaataaataaagaaagaaaaagaaaaaaatggaatgggagaaatatgaggtcatatcggagtcagcttgaggtgtagtagccgacaaaccgaaagggatataatgagagtgcgagtaagacaggaagtagtgacatcccctatggccatgtatgggacaagggtagccatggaatcacaaacaaatacggtctcactcccctcaaaaccccagcccatgtggggttctattatggctttatcttcattcagacattaaaacaaacactttccacatgaacataacccatttattcaactatattaaaaaaaaaaaacaacaacacttacatattagagaaattaaacataaatctttttccatatatttatattttaataaaagaaaattgaaaaaccttgttacctttgctcttttgttttccgtttccttgtcaatcccaactacttgtctgctctaatttctatactaatttattctcatcttaaggtcaaccacaaccaaacaattctataattttaatttatagtggtaaaacacgcgtacaaaatatccattcagacataaaaatttaaaatttaatgggttgctttacattatttaattttttttactaattagtcttcctagtagtaccgaaattttcaatttttgtataagtaccttatattaaatgtattttttttttaatatgtatggtaagattgataaaattacatttcgaaatcaattgacaatagaaggaataattcataaattttatatataatattctgtttacacatattagcattgtacgactaattttaatagactatacttacgttgagcctaagaaatatgggtataatgaacaactttgaagagatcacaggttcgaaattgacatttaaaacagtcccacaagatgaaatcaagaaatttgtgggtgtacatgttgggaaattttagattttttaaaacaggccaaagacccctacctgaaatcgacacacattggtcgaaaggtcccaaatagagatgaaaggcagagaccgcaaaagtttttttttactctgacaccgtgttagatttaggattgtatggtaaggtgcatgttgttccatctcaaaactaattgacaatgagaagagcagcccatggatattataaatagtacttgtattataacaagtattaagcaccaaggtatttgtgcaaatagctatgatccctatgataacaaaattatcaaaataaagaattggcaattatacctcaaaatatataaaagaacttgtttttagttattcgtatgctataattggagattatcagcaacaaacattgaataagacagtatgggatggttcacaagtgtctaaatatgtaatacataagggcttattcgatgtaattgtaccatgtaattttttaaaagttgttgtatattatatgcatgttctgatccgcaaggaacatgattggaaattgtttgtttgtttttctccgaggaaaaggcaaaatataattaacttgaattcgacacaattattcaaaatcttagtgaaagactaaatttttgatagtctcaggttgatagtttctatggagcgtatgcctcccaatggtaacggaggcatccaaaggtttcctcgggacagactctttacacatattgataatgtggaactatttctaatacatatttctcactttctttaacatataatgtagctatataacctaaaaatattttttatgtttttctactattaacattacacttcaaatttaaacccattgcagatatctaaaaactatatttctattatcacttttcttaccctatctacatatctaagaaaaaatatctttatgtcattattttctttttaaacaataaatcaatattatattaaatatggctatataacatagaatatattttttaaaacattacaatttaaatttatactcactacacatatttctcttgtcttttatgttattttaaatatatctatatataacaaaaacttttttattcctttttaatattgcaattcaaatttaaacccattgcacatatctaaatttattatcatttttttatccaatccatatatctagaaaatatttttcattgttgttttctttttaaacagtaaaatagaaaaggtatttatatttcttaaataattactattgtgatgtcgttaatattgtagttactaaaaaaatatttttgcttataaaattaaaaataatatggtcaaacaaaaattataattaaccacactttgtgaatattattataatttctttttataagcaacatttaaattaaatatttattattaaaaaataatattgttatttaataacatacaaaaaaaaaaatatacaactaaaaatataggtaataaaaaaaaatattaagaatataactaagtataattgcacgtaatattacttttgtatatatagagtaatttgtgacataaatacttaagtttaactttcgattgcaaataaatatttaagtttaattttttgcggtaataatacctaaattataattcttaaattgaagaaggtaccaaactgttaagtgtcatgtaaattaccacctactaataatttctaattagtccaagtaattaaatttttatttcttatttaaaaaatcattttaatatactaagaattaactcatatactgttttttttaatttttttttttttcaaaatgtacggtttgggtttctaatctaatgatttctatgtaggttattatacgattttttgttgcgatttaggttgcagcgctagttgcaataggggtttctatttaaaatactgtaaaattataaaagaaaaatattttcaagtgttaaaatgaaaaaacctctaaaaaaataccacatgtataataagatgatatttatcagtcaattacttataaaagtttacataaatataatataaatattattaccattaaaaaattaagtttatttatttaattatttgttattaaaattaaactcacctcaaattaatctatatatatatataaatagaaacatgttcatttatttttctaactagatgtaactagtgattggataatgaataattattatagagatctaattaaaagataaaaaatctc

SEQ ID NO: 194892 - DNA, 852 bp, Cannabis indica
ctggtaaaagtacaagatctctttctgcgtcagcacaagtttgccttgtttaacacaaaaaacataccatctcactagaagacaatatacttgggggcaagtgtgcccccatcttgatatgggcccagctccatatgctgaagcctccttctccgcactagctacgcctctcaccaagtatagagagcctattccagaatagtcctagaacactttgaagcccccatggggtttcgtatttcctcaagttgttgtacttcttgaacaagttgacatgctagtctatctcccacggactgtcattcagaaccacttggggagccctacgagtttcctttgtctcttcctttgagtcaacttcctttcgacgagaaggctttgtcatggtttctatacaggaagaaggaaaaccaagaagttagctaccctaactacctagtatagaaagaaagatgagggtcctctccccattaactacttcgagaggtcccaactagacatactacttaaaaaaagattgttccaacgggttgcttgtttcaaatcagaagacaacacaaactagcagtcacccctgaatctgaaagattttgggcaaaaaattggccagcgtatttaatgaaattcctaaacaaaaaatttgaggatagaagccatttataattcataagtttgcctacggtgatattcacacagatgataaaacccaaatttcatctcaaatagagggtgcatatataaatcaaaataagcaaatttgtaaaagtataatacatgaacagaaaggacgtacctagtgcaaacaaggggaggtttaaacttattgttgttgggttcagctcaggaagatga

SEQ ID NO: 194893 - DNA, 1175 bp, Cannabis indica
caactaacaaagagctttttgaaatgcaaggaccagtgcccaagtcaccattataggcctctcttagtaattttttctcagacaagatcttgatcaacatcgattttcaactcgatcaacataaagtaactaagaagaaaatcgagaccggtagaacaacaagacccatcaccctagggttagggtattctctaggtcttgggcccccaataaggcattcttcaggtcgttgtgcacttcgtggtgttttcgggtcaagattctagaatctttttttggagaatattcatttgagatgatttatttaaatgttattttgttattagttacatttaaattataacttaaccataattaagcatatcaaatctatgattaacttgatcatgggtcaaggcccattatgtaacctataaataggttaaattaataagcttttaatttattatattcactgtgattattttaaactaatctatgatatttttactcggataaaccattctaaaaatctggtgttacttatttactatttatgctcgaactaaagtttgatatttttattcagatacaccattctaaaaatctaatgttacttatttactatttatgctctctacatttattatcgttgtttcacatatcttttgtcattgactctttttgctatcaatgaagatatatctcatcatttcaatcttttttgtactctctttttcttttcatatttgtcatgagttgtttataggggtaggaaaacgaataagacaagacaacgcgactcaaaattcacacaaaagttaacggatttgggtttcaacatgacacaaatacaactcataaacacgaattgtcatccctgagtgtttatatgaagtatatatcaaagctagatctccatcaatttgaataacaacactaaataataattctaaaagtaaattaatttaaatttacaatacaattgacttataatcatattcgtgttataggtgtatttagcacattcaaagctaataattctaatattaaaaaaaaattagtcacttacctattcaaacattttataagtagaaaaatggtaatatgatataataattaagaaaatattagtgtagagaaaaataaagaagtaaaataattcaaaattatagtcatatatataccaatgttaa

SEQ ID NO: 194894 - DNA, 1423 bp, Cannabis indica
aaaaaaaaaaaacaccctttgaaaattagagtggattataccgattataggaattttggaccaaattcatctcgttttctaggcaaaaatgcacttgcttgtgtaaaatcctttcctaataataaattcgtctccatcaagattttcctaagcttcatcagaatttgtaatggaactcatagaaatcatgggatggtgtaatggaactcacagaaatcattcttctacttaactactactacattcaactattctgctttttgtttttcaattattctgctttttgttttcaatatatttcttgttttaaattattcaattggtttgtccaaataatgataatgataatgataacgataacgataatgataataattattcaatttggggatgatagtttatctgctattagtgcagattattctctattttgtttgtatattgcaaggaaattttatgctcgtgcaacaattagtaagttttaggaatttgcatcacttggaataatttacaagtagaaagttttaaaatttgaaaacatgaataataactagttggagtcattattataaatgaaaacataagttactagcatattacaaattatttggtgaagaaatattcccagcgcactgcatcctttgaaactgaaagctccccctgcaaaatcaaaatgatcaaaatttacaagttacaacaattatagttatgaaaaaaatgaaatataacgtatgtaatagcagtgtacataaataataaatacatccaaaacatgagagaaagagagaggattaccaatttagcttctgaacatctgtagtaactttttcttcccaacttctgaagttacgtatgcccagtccccaacattgttcaagagcttcaaatatacacatctccaagacttgttgaagattaaagtcccacaaaatacccaaaatccaactacaaatccaagtgctaagcttatgtaaaatcctttgctaataaacccatcgtcgccatgattctctatagcttcatcagatgtagttaccacttttccatttggacattttattggaagtggaactccacaaagtagaggatttcccatgtatgaagctgcatcacgggattggagttgagtgcttcttggaatttctcctgacaaattgttatttgacaagtccaatacacccagacgatccacttgagtgagagttgaaggtatgtggccaagaaaatggttctttgataaatcaagtacatccaaagacttcaattgaccaatctcttgagggatatgtccacttagattgttttttgacaagtttaaggcaatcaatccaacaagtttagatatgtctttaggaatctccccaataagtttgttgctcgacaaatcgatgctcttcaatagtccaacatttttgaattcaga

SEQ ID NO: 194895 - DNA, 1807 bp, Cannabis indica
gaggttccaggatcttttggatccactctttcatgagcatcaattgttggaggagtttgtacgtcaggagcccctttagtcagggcggtcatcacgacttccaatccggtcaattttctgagcaatacctcattgaattggtcttggcaagtcaatatgtttttggtagtggaagttgtttagcataatgacaaccaggtttgattcatcatgttgatccttctctccaacatcatcaccaacagttttgctctgaggatcgtcttcaggtgtatcttcaggtgtatcctgagaattatctttagcgttgttgtaggaactactctctccagatattgcatcttcgattatgggatcgtctcgattttgatcttcatcatgatctttctatcaactagtcacctcatgtggatcgtcaaggtttcctgctttggtgctaggaccagtaaagtgaagactagattttttttgggtgagtaccatgattactgaatgcaatctctagatggtatcactgcttccttaatctctcaataaaagtacctaaatatttattgagatttttggaaaactaattatatataatcagagctgaagaaatatacaattaaaagataaagagtaagaaatacacaaacagtttttacgtggttgaggtgttaactatccttagtctatgattcgatgttattgtgcaactttttagctagaaaagcctttgggaagacaatgagcataagttctcaagttttcttgagagctcaacccttgatccataggattcatcgggtatttatagtatttagagaattacacttagttttccttttttatctattgaggagtttacactgaattacatacttggcctgtctcgtgaagtccagcccatgagaggatgatttgctgactaaccaaaggagatacagttaaattagtcaaaaccgtgtcctataattatgggcaattaatcgtgaattaattgtttgaccactattttaggaagtttctccttttggcttgatgcggtcttttgttgagatttgagaagcagttatttccttatctgtgcacaagaataaaaagggaaactggacgggttttcgaggaacacgctgtctgactcttttgacatcgcaatattgaacctacttccagataagagttttcactggaggaaggtcatgtgatcatggagctaagatacattcctgaaaggtcctatatacattgggcttggcccactttctcttctttggggacccattagggcctttgatgctgacctggattccatgtatccttagctagaaactcggataacaataagaaaaagatgtaaatatatattttctctcctcctttgagcataatttgaaatttctatagcaataggaatataattttttaaatttaaatggtaacatccattcctaatgttactaagactaaggaaaaattagagatttaaatgaaaaagataaatgataagtaaaagatcaaaagtcttttctcttcttctttctctctctaattttcgaatgactttaacaaataggattaggattaaaatccaaataatcctaacgccacatcaaatacaagtagatttaaaattttaaagaaaaagataaaagataagtagaaaaaaaaaaagaataagttttacttctttttctttgttaaattgatttttgaaaaattctcaaggactaagcaagagaatcgaaggtcctaatttattgggaatgcttgaaagaacaaaaaaaattacctaagaatgtgaaaaattgatgccgatctggta

SEQ ID NO: 194896 - DNA, 873 bp, Cannabis indica
ctgtgcttgaacgagcaatcactgtttgtttcttagatgaccatgagattagagagtcacctagaaacacacaatacccaccaacggatttcctatcatcgggacaacaagcccaatccgcatctgagaagccaaccatagacaaattgtcacttggtggaaaatgaagaccgtgatgtgttgttccctttagataccttaaaatcctttttgcagcaccccaatgaacatcagtgggatttttgaggaattgacttagtttgttaactgcaaatgatatatcgggtctagtgtgactaaggtattggagtgcaccaataacactcatgtaaagagtaggatgcttgagaggctctccatcattgattgatagtggtttccctcctgtaatcggtgtagcacatggcttagtgttctccagttgagttttctgcaataattcactgatatatttgccttgtgatagatagaaaccagtgctgtccctaaagacctctattcccaaaaagtagtgtaagggaccaagatcctttagggagaaagtaacattcagttttgcaataaaagcatttacctcctttgaattattccctgtcacgattatgtcatctacgtaaacaagaaccatgatcacataaccggtttctttgagcatgaagaaagaggaatcggctttagaattttcaaacttccattgcaaaagagtagctttcaacttatcgtaccacgcccttggtgcttgcttcaaaccgtaaatcgacttcttgagtttgcagcaaaatgaggttgttgttcatcttcgaaaccaggaggctgacacatatacacatcctcatcaagcactccgttaaggaatgcattatttatgtcgat

SEQ ID NO: 194897 - DNA, 2988 bp, Cannabis indica
aaccagagaaagtcgatacttttaccccccagctttttttggggttgtgtggccatgatgcacacagattttgttcacatttactgccatgtgcttgagctcttctcccgtgtaattgatcgtttatcattccgggataggacaactgaaaatgtgcttctttcaagcatgcctagagatgagttggatactggtagtgaaattggggacttccagcggacagaatctaggaataattatgagcttccaactactggtggacctttgccaacatttgaaggagtacaacctcttgtgcttaaaggactcatgtctaccgttagtcatggtgtttctattgaggttctctcacggatcacagtgcactcatgtgactcaatatttggggacactgagacaagactcttgatgcatatttcaggcttgcttccctggttgtgtttgcaactgagcaaggacctggggcctacttcacctcttcaacagcagtaccacaaagcttgctctgttgcagcgaacatttcagtctggtgtcgagcaaaatctttagatgaattagctgctgtatttatgtcatactctcggggggagatcaaaactgttgataacctactttcttgcgtctcacctctcttatgtaatgaatggttcccaaagcactcagcattggcttttgggcacttattaagactactagaaaaagggcctgttgagtatcaacgagtgatactgctgatgctgaaggcattacttcagcacactcccatggatgctgcccaaagtccacatatgtatgcaattgtgtctcagttggtggagagcactttgtgctgggaggcactaagtgtgttggaagcacttctgcagagttgttcattaacaggttcccaccctcacgaacagcctggatcatacgagaatggaatcagcggagttgaggaaaagatgcttgctcctcaggcctcattcaaggctcgcagtggtcccctgcattatagcatgggatcagggtttgggacagcttcaacacctgcacccctcggatcaaatgaatctggaataccgccccgagaagtggctctgcagaacactcgtcttatcctcgggcgtgtgcttgatacctgtgctttagggaggagaagggaataccgaaggctggtacctttcgttactaatattggtcacccataaaacctgcaatgccaacttctaatgatttatgttggtggattaaatataacccagttttggcacgtgtgttgttgggtaaaaaagttttgaggttgaatttgtatatatatgtagtgtgtagctaatagagtaatttattgtacagttgcagcagcatatcttgtatctcttattttattagacttttgtaatttatgagcttctattaactatggaattgttcatttaatcaatatctgacatccccatatgttgtatatagctccatctcaggttgttttcatccaattgaaatggacccagaggctatgttagtgtcatcatttattttatattaaaaatttatttaatggaccccctcaaattattatttttttcactttggccctcctccactttggccctcctcacaatactttcttcttccattccattcctcggacacccaaaagcatctcggatcacaagcagcttccaagggattgatagaacttgtactttctgaactgtcagtacaaaaataaagttttccccataaatgaggagaagttcatggaatattcaagtgaatcgatgggatgggtagtataaaaggactactagagaacaattaaaaatggcaagagatatgagtttggtgaggaaaatggtgattattgaaaattgaagaaaaatggaagaaaaaaaaaagatacaacacaataacgcccacataacatgtgggtagacgctaaagaaaaacttaaatagtaaatagttatagaaaaaagtattagggggtgcattgtagagtttttaaaaattatattttgaatttttgtactttaaatagttaaaagatatacttctaaaattttgagattatttatgtttactttaaatatttattttgtttttatacttgttagtactttattagctttgtttttgtactattttttatagtttggatgccttttatggcttttgtgtcatcattatggcttgtctttaattgtttaaagtagatctgtaatataatcaatgggtaagagaaaagtttcatattcggtattcatggcttctggaaacgatttttgagatttgacagataagtgtttcaaatcttgatattattatatgaattgttttacaatctttattcacattacatatcttttttcataaaattgtgtggcaatatagttttattgttattttgtagttcgattttgtggagggcctactgttataaagactttgctaataaatttttaaatataatttatttgagagttgtcatctttttattattgagattttcttttattagtttttaatatcatcattaggggttaatctacttttctttatctttttgttttgtagatagtttgtggagcattttgataagtaaatgagttggcgtgtagtttttgttgttacaagttgaaactcttgctattttggtgtaccatttgaggacgttataactttattgtttaaattttcaggggcagtttgtctcatgttgctcgcttactttagcagttcatggtttgacaagcatgtccttcggttagacgatgagctatcctagttagaggaggttcctgtgtggtttgcggatatctgcatcataaattcatgagtgattctaatcactacgtaaaaaaaagacattcttccaaaaaaaaggaaggtaatttatttgttattattacggggccttataaagtctctctctctccctaattcgatgtgtgtgaaagtcaaatgtaacaaatataatatttatatggcttatttgtactgcag

SEQ ID NO: 194898 - DNA, 2089 bp, Cannabis indica
agttggaatgctcgtggtttgggaaactcgagtgctttctgtcatgtatgttttcttgtcaaagataaatccccaatacttattatggaaactaagttaagtcctaatgttatttctcgttttcatcaaattttatatttcaataagggacttgaagtcccacgtgttggtcttagtcaagggttgttattttggaaggattatgtagatgtaactcttttaaaccttaatataaatatgtttgatttctacatggcttgtgaaaaggtccaaaatggcattttactgccttttatggagcactagctactcaaaattgtcaccacaaatgaactcttttggaaaggttaaaagatggtgcacctttgttaccatggttggtaattggagacttaatgaaattttatccaaccaaaacaaattaggtggagccttagacaatgaatcacagatggataaatttaagcatgtccttgacttttgtcacttgtatgaacaaccttatgaaggtgattcatttacttggactactataattctgaccaccgtgccatcgctatccaagtttctctgtaaaatttcgtaggtcagcagtaactaaggcgctttagattttgttttgagaaaatatgattgcaacatgaagaagctaccacccttatttagaaacattggcatccttctactcatagagatgccattatggagttcctcacgaatttaaagagctctactgattcacgacagcagtggcgtaagtagaaatttggaaattacaaaaaaatatttcacaattgcataagtgtgtcacaactttgaataactctagcaatcgaactccaaaaactatgcaagatctaaagcattctgagaatgttttagatgatctgttagtgcaagaagaaatgtattgacagcagcgctctcgagtggattggatccaaagtggagatcaaaatacaaatttttttcacgcatatgcatcatcacgtagacaacataatacaatcaaatcactggttagtacaaatggaatggccatgttgtcacttcaaagtagggtatatctgagattatatcatcttattttgctaacttgtttgtagctttagagattaatgaagaagctttagattttactcttgtaactataccagccacagtcacacctataatgaatgactccctcatcaagcctttcacaagcaatgaagtcctagctgttctaaaatctatgagtcttgataaaagcctggtggtgatggaatgtcagcaatgttctaccagaattattggaatatcgtgggagattatgttaccaaagtcattcaaggggtcttaaatgaaggttgcagtatggaatctattaatcaatcactcattacccttatcccaaaaatcaaacttcctcatggaatgagtggttttcaaccaatcagtttgtgtaatgtcatctataagatcatatcaaaagctctagcaatcagatttaaggaagttctaccttttgtcatctccaaaactcagagtgcttttctctcaataagactcatcacagacaatatattagtggcctttgagttgatccatcacctgaaacataaatcatgtggggctaggggttactcagtgctaaaattggatatgagcaaagcttttgatagagtagagtaattatagattcaagaggtaatgcgtaagatggggtttcacacaaatggattgcattgatgcaaagttgcttatgttctacaagtttttcattcatgctcaaaggtgaagccgtaggccatgttcaaccaacaagagggctccgataaggtgatccattgtccccttatttgttttttatttgttctaaaggactttctaggctactacaatttgaggaatcaatgggaaatctaaagggcttatgcttaacatgccatgctccatccgtatcataccttctctttgctgatgatagtctcttgttctatgaggataccaataatttgactttggctattaaaataatattggacatttatcaacacttctttcttaaagtcaagttttttactgaaagaaatcttttgtctcatgg

SEQ ID NO: 194899 - DNA, 1535 bp, Cannabis indica
ataagctcaaaagtcaacgcctccctctttttctctctctctatactcatcttccacttctgcttcctcatcttcttctgcttcttccttttctttctggcactctggaaaaaaaaaaaaaaataggccatgaattattggtcctagttgttcttacagctaaactaaataggttttcatatatagtgtttttttgtttatttggtttcgagatgggcaacggctttgggaagtttagcgtttgcttcaccggcggtggagaagctcgtcggaaacatgacttgtcggttttggattccgacccactagatgagggtctgggccactctttttgctacgttcgacctgacccgactcggctctcttcgtctaaggttcactcggaggaaacgacaacttttaagacaatctccggtgcctcggtcagtgccaacacctctactcctctttccacttctctcatcgatctttattcttacaactgtatcgatcgagctgcggctttcgagagctccacctcgttcgcttcgattcctctgcaaccaattcctagggggttgatgaactcaggtccgatttccggtaacttcgggggattccccggttctggaccgctggaacggggatttatgtccggcccgattgagcgtggattcatgtcgggcccgctcgaccgtgggattttctctgggccaatggaaaaagacgattccgatcagtttaagagaagcttctcccaagggggtttcgcttttcgacccagatcaaggaaagggaagctgattcgggtcctccgtcgagcgatttcaaagacgatttatcgtggtcagaactcgatcgtggctccgatcaaaggggtcatctcaatcaaagatccggactggattctcggcccggagaagcacaatgagaacctgacggtgagtagcatcaatttgagcagcgaaggtagtttggaggacgatgattcatccgaatctcagaatcttcaatgggcacaggggaaagcaggggaagatcgagtacacgttgtcgtttcggaggagcacggctgggtttttgttgggatttatgatgggttcaacggccctgatgctcccgattaccttctttcgaatttgtactcggctgtacacaaagagctaaagggtttgttgtgggatgaggataagtttgagcctgcatcggcagcaacggaggatgaagaagaagagtcgttgcagactattgatgttgatgatgcttgttcccgctgtgttgagcaagagaataattatagtaatcataatcgtccctgcgcaagtggggatgggaatgtcgattcaaattggagttgtaataagcgcaaaaagggcagtagtaatcagaactcgaggagcaagtatagaggtgcgtcgaagaaatgggaggataatcagagaagatggaggtgtgaatgggacagagaaagattagagcttgatcggagattaaaggagcaattgaatcgatctgattcggacggttcgagttcgattaatcactcggatgtgttg

SEQ ID NO: 194900 - DNA, 2470 bp, Cannabis indica
tggataacactcgaagcgtagagatttcagaggtctctctgcaacctctaatatctccgtccttggctcatgtcgtagacttcactagagatttggaatcgcttgattacatagaacactctatatactatatataaatacgttatgaattatctattgtttcaatttaaacaaccactgatcttctattagcgagtttatatcaagtagggacaaattaattattttaccttcgatgcattttatccttaaaattcttagctacttataaataatattttagtaaattaatataattaccgaaataagagttcttccatttatatcatttatacaagctataagaaaactatcattttacttcaaaatagtttaagctatatgctacaaatctatgattagcgctcgcactcaattgtactactaaattctcaagatgtaagtatgggctagttttgcgggtaagctggtaatgaataagtcaaaaaattcatatagtgcaagtaacctagaacttaaccatctcaggattaagatcaattaacctaagatcaactaagtaacaccgacctagaaaagatacaacaacaagttaataatacattttccactatcaacattggtccagtccgatgtatagctaatacattcgatacaagtttacttcgccactacactgtaaaagacattccacttatccaagtttaaacaaaccatatcgttgattatcacatcagtgtaaatccagtcaactaataaatcatgagactaaatagtttgaagcataatatcatgattatttttcactgtgtagactacactataatcatgaataatgatatgtttgcgatttaacaagatttgtatattaaaacatataatcattaaagtaacatgtgagctaagtaacataaaatgattttttattttttattgattagtaaataatgattctattgaaatgagttttattctgggtataaaactccaataaaaaggacattatttctttattcatcaactataaatgaagtgttgatttttcaaaattaataagagattattccaatggaatagaatttaactttaggctccattttgtctaataattaagaacaacaccaataaaaaattagaacccaaatatattagaaaacaaaaaaaaatgaatattttataataaaatatgtctttaaaactcactactgacatcacttccaaatgaaccaagaaaattttctttccaccacgttaagttattatcatcctgcaaattagtattggtaggtaattaaatctaaattagaataacaacaattgttttctcatggctgggaggaacggaggaggaggaggagatctgatcgtggcttgttcggctgagatgaacagaggaggatgagccttcgatctcaaaacgagcagagatcataccatttaaggtgactcgtgcatggttaggatgaacggaggcaacttcgatctctggatgaatgaagatccaaatggagctgatcgaaatagagatgagagggacggaggaggagagatgagcggagatcggacggagccttgggtctcgccatttgagatgaaaactgagataagagtattttactgttttgagtgagagagagcgcgcgaatgagatctgaaatgttttgagcgaatgagccttaggtattcaaacattttttttttgagagagtgagagagagaagagtgaatagccaatggtttataactgtcagctatagtatagtcgactcttataatctgtcggctgcaccttagtcgatgattatacaccatcgggtattccaatctcataacagtttttaccgatgagtatacttgacgactctttaaaattgacgagtattctcaaatataggcatcagttttagacagtcacttacttttattagaggcagtcctcgaaaaaaactgatttgaagaccaacaagaatagtactttttgtagtagtgacactattttttctgaacatgaaaaaagaagattaaagggatttttttgaagtagtgagcaccaagcccttgtgggactcagagttgcgcctcactctgattgcgtcacctagggtgcgccactcaagggtggtgctaccagtggtaacctgtagtgtcacctggctgatgttaggtttatggacaaaatttagacaatcagagtaagaaatgagaagttagtgctactagaaccggaaacatgtcaatcacagtgcttgtcgaggtactgttgatggcgtcgtgacacaattattattcttttaaaattttaatagctgaaaagcatcataaaactgatacaaacgagattagtgtcgatttaaaactaatgtaaaagagcttaaaatttgtgtcagagtaataattactgatgctattaacttcaataggttaattacaaacctaagcaaaaattcttaaggaaattacattgtatacc

SEQ ID NO: 194901 - DNA, 1722 bp, Cannabis indica
ggtgactcttctccaacaaaaaggtctccaacttttataaacttgttcgtgaattttagtttgattatgttcataaacaagtacaagttttggcactatcatgcttttcattagtatgatcaatgtgattatactttaattttttattgtaaggccactgtaattatgatggacaaaaaagaattcttatgtctagttcaatacattaccctagaagcactaattaggtacaaagttacaaaaattacattaaatgtaattatagtttttctttttcctctatcaccgcactagagaaatggaagagacatacacaacctctttgtattgatctcaagtccaattttaattttatgtttggcacatcattatttaatttatattgtaggtctatatttataacatacacattctttttatttctttaatatctgcatgcttcaatttaactttacaagacatgacggtttcaatttcatttacatatttatgagagtaagtcacatatttggcattgccatgactactcacaagctatagcttgatttggttatagtttttgaatccacgtctcactgaggaagatatgaaatgaatttttaatgtcttcccaaataagccattaaattcttgttttgttgtagagtataccaatttcttaagttcaaatttattattgttactatttaaattttttaacgtgggatcaaattttttgcatcagtaaatttggtacaccttacaatttaaagaattattttcatgtcaattttagaatatgttgtattaatttttgtgaatcatgcttatgctactattacaaaattagattttagaaacacttaattagtaacactttaaaaaagtcttgcgttttgtttattttaagaattagagacagttgtagaaaaaacattgttaaagacttgttccaaataaataaataaataaatatgttactaaattgaacataagtcgacactttctaattaagtgttgttgtatattgaaagatagaataatagaaaataacactttgtatcttgtcttagtttaaaataaataactataaaattaaattatatatatttttgagtattgtttcaactatgtgcctatgaaattttgaaactttaatttaaaagtattaataagaatttcatattacacgttctcgacataataaacttactactcatttactaacttctatcatttaattgttctatgaatattatattttccttcttgataacttagtaaattgtttgccttgcatctgtttttctttgagataattacaacattatttagttgttttaatatatctccaagtttacctaagtaattgttaatattgtaattcttatatataattttttaataatccttcatttagtaaattgtttaccttgcatatgtttttcttttatttgatattttactctttgtcttgtggttgaaatgatttttttgtatcccctttcatatacgcactgaatattaattatatactatatatatgaacatcttaatattttaagtttacgttattctaatgcagattttttttgtagtcaatcagtaccacatcaacaaatatagagctttgattaactaaacaattcaagctttgaggataacatcaactacttttcatttttctctaagctttgtaattagatatatatagttagctaaaattgtaattgtaaaaactat

SEQ ID NO: 194902 - DNA, 1963 bp, Cannabis indica
ttatttttcttttttacttttttctaactaattggttgcttgactctgagtatttcacaaaaagaataaaataaaattaagataaaaaagaattataatttcacgatcaactttaaaaatacttatattcacaagagacaacaatctattgcagtaagtccattcaacctcttagtttgaccattcaactattgtgcagaaaacgtaacatcatgcactactataacaacccctttaacactactaacaacctcttcaggctctaataacttattacaaagataaaacaaaataaaattatgttacaaagataaaactaattatagtaacctaaacaaaaaacactcaaaattatgttatggagacaaacctattcagtgtaactaaactacaaattttgaacaagctacgcctaaacccaaaaaaggtcggtgcgctcttggccagaaaaaagaaaacaaaatatttgaaaaaaaaaaaaaaaaaaacctaaacggactgatttctaacaattgtctatttattaataagctataaatgaatatatttattaaaatatatgtgtaccttataattcgaacatacaccaaattaattagcatgtgattaataataagtaaacaaactcaacctaacctaacgaaaaaaaaaataaagcttaataaaaaaaaatagaaagaaatataatgaccaataatataatattacataaaaatctatatatattgaaaatttttcaaacatgcatggattgttgttttttaatttctattcagaataaaggtgattgagattttcccatattagaacttttgaaagtacctcttcctaactgaagaaaaatattcttaattacttgttccataaggtatgtatatataatatatagatatagttaaaacatacatatttaatataaaataaaagaacataaaatcaactacactactattgataaagtacacatgaaaatatgaccaattgtcaccaaccaatatcgtaataatttaattataattaaaaataataattaaactataataacaaaacaaagattaattgatgcttattcttagctgttagacacatgcaataaaaaaagagcagcctatttaatttcctacattttagtactaataataataagctagaaatccaacaacacaccctaattattgattaatatttaattaatttaatttaagtacaactatataatatatgtgcttgaatatttattatatgtatgagtacttaatttgtttctttttctttattctccaatgtttttacttcttaatttaacaaataattaaaaattaagatattaagagaaaacaaaacataggtatatatttatttcttgagtactcataataaaacatgcatatatataatttataatataattaattgacttaaaatcaaaaatcaatctgtatatacaccacaactataataccatgaaagggggccggttcagtcacccaccagttgaatcatgattttgaacttattaaccctccataaatatatatatatatatataaatatatgagaaacgttaaagggcccagtgatgtctagcaccctcctatgtatcaatatcgctattggtccaactaggtatcgtgtcctatataatttaaataaattaagtttttagggagtatcgctagccaatcgcaacgcgatatgtcgagaaggtgttaggcactactggtggctaatagtaatgctctaaatatatatagcagccagaaacatgataattaatatgataattaagttatctaatctgagtatgttggtagggaatagtctaactaaacaaccacttgtacactaaatttgaatatgcatttattattattttattttctcttaatttattgatcaagagtactgcatgcgattgtgttcgaattcggtaaggcattgaattttaagtataagaaaaaaa

SEQ ID NO: 194903 - DNA, 3549 bp, Cannabis indica
tcataattaaaccctaattatctgctaattcccatgttaaaattaagcggtctttacattgcatttggttctaaggccccatggtgtaatcattgggccatctcttatggcattggacaagaaatacacgcacagaaagatgatctctaccaagtaaggtggcgtttggttagaggtaatgaaatggaatagaatggaaatgaaataattttcatttcatttcctttgtttggttgtattttaaagtattaaaatattattttaatagaatgcctttccaattttggtagaatgactattccaatttgaaatagaaggaaagaccattccaacgtataatttttttatcaattttgttatacattttaaattttattccattcctatttctattttcattcccatttttattcctacaatttcattcctctcaaccaaacgccacctaaatcataagcatttagtaatttatatagatttgtgtatgctttatagaatatgaaactttctttttgtttatattaaccgtatttgtttcttatatgtttatatatcaacaagtgcttgatttagggtttcccttatttataatggcaatttcagaatgataattttgtttgtttgttaataatatttgggaaagtgattcatttaacctatatttctccttgtagagtcctttgttatacatatacctgtaaatatgagcatattggagaagtattattttgattgcatttgtgtacatgtttgaagtaacgattatgattatattccgctggtagcctctaaaaattcaaatctcttctttacctccatacgagagggagcaccaacttataagtggagttaatctattagaatttgtttggcaggtggtattatatcgttttatattgtactatattgaattatattttatgtaatattgttatgtaaaataatatgtggtattgatatttatgggtacctaaatatataatattttagtataaattaaaatttaatatagtattatataaaaatataatatataacctaactcaattcaatacaatataatacaatacaagaccgcactaaacttgcacctagaggtatatttgataaaaaaattctaatggattagcatatatttgtaaaacttagtttaccaatttaaagcgagcttcatcaaatgaagatattatcgtgtttctggaatgcctcaccaaattcatatttcaattatattctttattaatttgttaatggtgtataatatataatgtcttcacactattttataatttttgattatttagttcttactatttgagagcaaatatgaatcatgaacttaggggctttctctctctagttttctctcagctccttgagctggtgctatggcgaagacgagagcaatgaaacagagtaagccaaaatcaccaacgaagaagaagaaaaaatgcggacctgattctactttggatgcgaggaggactaaatccatggatgaagtccttggaattgagcctattttgttctcagatgaagaagatgagaatgatgaagtgcaagttgcagaggcggaaatggagctctctaggagaaggagagtgctggaagagatgagattcgaatggaattcgctcatttcatggaggctaaataattcagtaaagctcaacatcaatcagtgaatgttgtcgcttgaggaaaggaagttattcctcctgtcctaagatctgggaatgttattcgtaacctagattccaagtttgttgtcaaaattacaaaagaggatatataagaagaagtggatttctggacctcttctattgtttgctatgtccatggggcaaatcctccaatgtcgattctagatggatttgtaaggcgtgtttggaaagacaaaattgacaaggtgggaatgatctcgtatagtttttttctagtgcgtttcaggttcatagcagatagagatcaagtgttatctggaggatatattttcttcaataagcgtcctgtgatcatgagagcttgggagccgaacataaattttaaaaaagaagatatccacactgtgcctatttgggttcaattacagaatcttgaattgaaaatattggggtgagcaagtgcttttcaagattattagccaagtgggagaaccaattatgcttgattctttcaccaaaacaagagaaaactgagctatccacgcatacttattgaagtatctatgcagtaggagtttccagagaaaatatgatttgatgataaaaatggagaggacacgacagtctttgtgaattatgaatggaaacctactacttgtgcacattgcaaaggaattggacatactaccatggattgtcggaaaaaaggaagggaaaaaagctgaatgggttgtaaaaaaacaagcaggaaaaaatcaggcagcaggagaagtgacaggtgaagatggcttcatgccaacagagaaaatatggaaggaaaaaattaaagagaaacaagcagcttctgttgttgcagtggtaagttcttttgaatctttgtaagaggctactgatggtgaagacagtgatcacttgttagcataaggaaatgtgacagagaaaattggggatacaagaggagggggagtacatcctcctcccaatggataaaatagtaagctggaaagttcgaagagtcaacaaccaacaaaaacaacaaatggtgaaacagtttcttgctgtacaaaatgttggtttggtggggcttctcgaaactagagttaagcttcaaagctcggagccttatactcaaacattttcaatggatgatttttcacctctaataatgcttggaatttaggagggagaatcatagttagttggaaaccaatgagctataatgtaaatatactaaagttttctagtcaattcattcatctagaagttacaacggtggataagaaggctagctttcatgtcacctttacatatgcctttaatgatggagaaggaagaaagaagctatggcaagatcttcaagagctagctactgtgaaaacatggatagttataggagattttaatgatattttggcaaaggaggagaggattgacaagcgtgtgaggtataatatttctactaattttattgattgtattgctcatttcgtttggatgatattaaattcagtgcaagctattttacatggactaataaacagcatggtgaagatagaatttactataaaatcgaccgagctttagccaatcaagtttggttgggtgatcaccctactactgaagttgtttttatgaatgaaagcgtctttgatcacactccatcagttcttaattttcacaacaaaattgtaagtggaaggaagtcgtttaagtactttaaaatgtgggaaaatcatcttaactatgctgatatagttcagcagacttggcagcagcatttcaatgttactaaaatgttttgtattgtctccaaacttaagagcatgaaaacgtctcttaaggtgttgaatacacaacattttactgatattcaagccaaagaagc

SEQ ID NO: 194904 - DNA, 1153 bp, Cannabis indica
tattttatgattagaactaagaagcatttgcactactgatggatttctctcttgtactatcaggagcataaagaaatccgaagaggatatacctattcctcctctgcttggaagtgctgcactttggggtaagtattgctctgtccttcagatgttttcgaatggttctatgctcagctgttactggtacaaatatattctatgcaagcccattttcttttttggtctcttagctgattgtattaatttttagtggcatatcaagcaaatggtttttcaattctgcaacaccatttgttctgcatcttttacaaaatggattaccttcaccgcggatgattgaaaggatgagagtatatagacaacagaaacccttgtgaaatcactattatagaaaccaataaacaattaacaaaacacttaggaatatatattagttagcttctgaccaatgtcacaagtgtggtactatatgtagtcttgggatattcatgataaaaaaaaatctttctatataaataaacactctatagatggtgtacagttaaataacacataaaaactcttgctttgtaacaaactcaaaaatctttatttttaaatactaacataacttttacatcaaacacccaattgtcagtaatcatttattcatcaatatctacattctatgctcaaaattatgactaaaacttttagaaattagcagaaaacacaattaaattctagagcgcttacatgagtattcaagtgaacataagcaggaaaaataagactttgattacagggactatattaaaacaaagaaactttgaaataagcaatggataaagcatatgtaaataacaactgtttcattcttcaatctatcttttcattcaattaacttatcagttttccccttaatcaggtgtttttcttgctgtgtcgtccaacacacgttaccaaattataaatggactcgaacagcttgtcgaagcatcacctttggcaaaacaggtgccaccagtcgcgatggcattcacagtaggtgtacgattcgccaacaacatatacggtggtatgcagtttatagattgggctaaactgagcggagtgcaatagctgcaatacatataaatgtctctcattttcaatatcaaataagctatag

SEQ ID NO: 194905 - DNA, 1762 bp, Cannabis indica
ttgtatttatttctcattcaaatatttttatcatcattcggttattttatttattttcttattttttatatcatcattaaattattgttataattttattgtttcatatacatcgttatttctaaaaatgtaacaatgaataatacacacatttattgattgattataattttatatttttgagcattgtctaccatttatgtttgctctgtgacagttagtctttttctttcaactttatggttttagttagttttttcttcatttctcttttcttaatcgttcctaccatcaccttcttccttcttttttcttctggtttttcatttctgtcgttgtctttttaagcaattctcttatgcatatcatggattctttccttctagatatctctactgctctaactaacagagagaaggaagttatcactatgtctaacatagctttgcctcctccacgtaccatctcacataggctgctacgcaaaatctactcaaaaagaggttataacccaaacagttgaagaatttcatccatcaacactggcaaggaagatttgctatcgacatatcagattatgaattcgaatccttgatgattacttttagttgtgaaggtgacatgaggagagtgctatctaaggaaccatgacactttcataatcaacacatgattttgtgtctaccaagtgttttgcaaaattcctctatggaaaaaatgactattacgccattttgggtccaagtctaccgactaccatttcttagtaaatcaaaagcacttgctcgtgttatgggaggcttagttggttcttttattgatgtgcacgaagactctttaaacgaaggttggggttcttttttacgaatttgggtttgtattgatgtctccaagccacttctcaggggacaaatggttactctcccatggctggcggacgaactttggcttgaatatcgctatgaaaggttgtctgatttatgttttgagtgtggtatcataggccatgtctttgataaatatcctctgttcttggttagaagttgttgctcttccaaaatcaggttacaataggtatcgataagatttctctagggcaagattttggcctttcatcattcgtttgccctgttataccattgcaccaatcattccctcttctagacaactaccactgcaagcctacttccgtaacatatcgtgaaaatgggaaagccattgcagaacttcttcctgatgcttgtgtttccaactctactggtgcatatttgataatcccagaaattaacttggaagttacctctgataaaccaattagtccaaactaccaaaatgttattttgtctccaaagttgtctttctctccgctcaacaatatggcttcttcctctgatttagtgccctctgcgacttccattattcttgcaaataacacatctggtgtaactaattcaacttcttcagtggctattttggtggcaacccgccagcatatgctcatgtctttccctctccaattagtgtctttctaagggttataaccactcccattgattccatcatctcttcttcaacagttcttctgcccagagccgaagttgggattaatcctactgcatcaacttttattccaagttttgctgagaatcaaatgccatccttgtttttgaaaaggcaattagtttcctcgggtggtaatgttagacaagttctgaagcgttgtcgcaatagaaacactccactcattgactctacaaataca

SEQ ID NO: 194906 - DNA, 1116 bp, Cannabis indica
atatatatatatatatttaaatcgaagaaaacgctgagattaggtcataaggggagctctatatcatcatcacctagtctatttatcgttatttcattcagtgattctaaatccgaaattaaaatttagtgtgcaacgctctgtttggcttgatgctgaatttttacgcaatttaattctgggtaaatgaaattagaaatattaaggtttcgtaatatattactaaatggcttcatgtatttcggacaattaatatgatgtgatcttgttgtgtaagaattgatagagcttgcaattttgaagaatttggtgaagttctggcggatctcactggctttgtgtgtgtttgtgtgtttcttttcaatttttctggttttaagtgtttgttagtctgtgggtttcgtttttagtgatataataatggtgtttaccaatttttcctttgttacattggcttgtgccagttttgtttgatctgtgtccttttcatctatttacactttggtgttgtcactaattcggtttgggttgcctaattgcaatattttaaaagttgaaccactattttgtgtgttggtgtggggttgtgatcaattctatctgtgtctcctagttggggtgagatttgtatttgttccatcattgtaataggcatggttttcttctttaggttactttgttaaatttgtgtagctccttaagctttgtcaagcctgacccctaactttataggactttgttccttttaaccatggaatgatattttgttccaattcaaaaaaaaaaaaatgatattaatttgaatcatttgaagtaacgcattttcctttacaattgttaacacttaatgtgcatgtttgtgtgcacattgggtcaaaattcaaataaagagcttcctcgaaagtgctcaggatgaagagtaatgtataggtatgcatacaacatgtactctgacaattaaggataggaaaattagtgatggtacaaccagctttcattgctcaaattatgagggacaatggagaacataatttataaatgtgtgtgtatgttttcggagtatggcattgtgagcatttctataaatatatacatttgtaatatatatatatatat

SEQ ID NO: 194907 - DNA, 1424 bp, Cannabis indica
tttggaagagtccccttatacacagaaccagctccaccttgtccaattttcgtcgagggactgaaataatctgtggctttctcaagtgtttcgtatttgaaactcacactagacttgtgaaaactgaaagaactcaggccaaggttacgccgagctagatgaaaaaaaaatcaacagaaataaaaatagttacaactatttgctttttcattcttctcaacctggaaaatgttgaaaacagaaagtgacagtgcatgcataccggctttaatcttaattattttagcataggctgcataggcaccaaacagagccagcattaaaaatgctgctaccgctagaacaatagctataattattccttttcttcttgaactgcctgaaacgcaaagtaaaacgtaaaatacgtcagaaaaagtgatgaattctgtttggttactgagaaaatttctggtctcactctttctgttatctgcttctgcctcatcgttatagaacttgtcagtcgaatatctcagataacaccccgcgttcatactcctcccttctttcttaggcacacacttcttggcctccacactagccttatccaagcaagctcggcagccctcggcactgactgttttccaacactgagccaaggcgtaaacaccctctcccgccgcaacgccgaacccagtaccgtttgcagccgtggcggcctttgttgcgttaccaatcacgaaccgaacctcggctgcgaatttcgacatcgaaatcgaaccatccaaggacgcagttaccgagctgcagttgtaagaatcacgaactgggtcggtactctcgttatagaagctgtaattatcgtacctaagaaaacaaccgtcgaggtaaattcgagccgagacggagggcaagcaacgggggagcctggttcgactggcggcgtagcagaggagacaatccatatttgataagtcttgatgacattgggctaatccgtacatgggcagtaacgcatttgtagtgttatcgaaatgagtggcccagtgacttgtgttgatggcttgagctaatccctcgaattctttgacgaaagtcggaaccacgctcacattcgccggaggttttccgacgccgcagtagagactggcttcggtgattctgggatccgagagacatgggcatgagagtaaagagatgattatggcgatcgaaaccaaggagatgaaatcccatgtcctgtttttcccatttgaattcaaaacttgcatggttctcatcatcaatttactggataatgtaagttgccaacaagaacatcaaaacagagagagttaaaaaagaaacaaaagagagagaaagagtaaaacaaaaaagctgccaaatttgactacaaatattactactgattcttctgattgttttcttttatgttttttttt

SEQ ID NO: 194908 - DNA, 728 bp, Cannabis indica
aataaaaattgagaaagggtagacatagaaattatggctgatgttgatgggttatcctgaaaatatcacaaagaaggtgcagagatgggtcaaattggtcccatctccaacaactacttgcaacaaaaaacggacagctgggattgaaaaaggcttcaacccaagttgccaaacactggaatctgaaagaaaaccccattaatatctgacacataaaaccatcaaccaaaaatatagaaaaaagaaaaaaagttaatggtgggcgtgcacagacaattgagtccctctttcaaattcttttcttttcttttcttttcctttattttctttccatccaaacaaacaaaaccccatattttgcattagatgtcaggatatgagataactatgttcagttgcagaggaaaggaaacgaaattcacccgaacagaataacataaatacataaataagtgacatgggtttatccggaaacaatcacctttttttccctctatcatatcatctgctgtgcactgaggcaatcatgcccttttcattttgtgttgctgtctttctctttattcttcagttctcatagtctttgtactagtagaaattatcacccggaccagagaaatacatagattgataattgattctttcacttgtttatcttagagtttttatataataataataataattcttcttattattattataattgttattattattattataag

SEQ ID NO: 194909 - DNA, 2781 bp, Cannabis indica
taagatgaaaaaggcaaaggaggtgaccaatggttaccaagaccgtgtttagcccgagctgaatatgaagttgaaggggtcggatacaatgcccatagagtttttagctgtcggcctcctgaaggatcacactaaggtaatttttatcccttatttatatttagttcagattgcactatgttggtcttctaacttgattgttatattttagattgatcttcaacttgagtatctatactcctaaactaaggccatagccatccagcccactaggaaaagatctggattggaaaaggtctaaggccaactcaaagataaagagactaccttaggtgaagttaacaagaagctggatgagacaacaaaaaaattgaagagttgcaaaagtagatagcttatatgccccgagttgaaaagctaaaggtcgatctggatgtagagttcaagcgagctcacaggctacttgaagagagggacactttttggaggcttcttcaaaatatggaccagcaagtcaaagacctaactactgaagtggccagggaaaagaacgccataactgccaaggaagaagccttgaataaagagatcgaggttcgtactgaagactttgcgccttatccagtgattgacacaaagatctgttacgagttctagaaggccaatcctgaaggtaactatgattatataaagctagaggctcatgattccttgttttggaagaggccaacaaatgaaagttgaagaagaagccaaagtaggcagagcaggccagtcaatctattgatgaagttagtcgtgggaacatcgagcaagctgaagcagccgatcttgatttctgagttgttgatcaagatggttctgcgaccatcgaagacttgaatacgaccactccaatggattgatctcctttcttgatcaagagcatcttttatcttcttttttatttttgtttggtcttcgagcctttattttaatacatcatagtcgaccaatcatcttttaaacttagttttatttttattttattcaaacacacaactattcgggcaatcattaatctcgaactctaatctagcttttggtatatttaaccaacgcatatatacttagctttttcaaattttttcaaattttgcttaagtattttccatgccaacttaccaataatgtacgagtgtaggtgtcccctaagtaaccgagcaagctttatactcttggtcacttgcaaattaaccagagtatttcatattttcatatttgaaccttatacttggacgaacctatttgtatacatgttaggtagttcctgactttaaatataaatcagtaaatatttgcaaccaatcatgtataaaattgacacaatttgaatgacaattaatcactttattcatttattggtcggaatgtattgttacttaagtaacttacatttatttgataataaaaagctattatgtgatcagttcagattttaattaattaagaataatgattgttacaagaagtggtgctttaaaaatggtcattgggaccttagcactaaaaccttttcaagcctttgaatggtgaccgttaagaaggccatcacttaagagtgatgtttgagcattatgcaattacatggtcttctgacctttgtatttattggtagtattttcttagatatttattattctagcattgtggtactattatcaattccatattttcatcatactggcccaatttataagctcatggtattgtaacttcagttacttggtacgaatcttcctaatttggtatgagcacacctgatccactttctttcgtattaaggaacattcttatgagtaccatgcccccccaaaaaaatttcatttcctttacttgcttgttgaagtatctcaatgtttagaattgcgattgtattgcgcgcctcaatttgaggctaaaaaaaaacacaattgcgtgcccctcagtatttacgcctgaggcatacgcctcagacttgcttgttgaagtatctcaatgtttaaaattgcagttgtattgcgtgcctcaaggcgcgcctcaatttgaggcgaaaaaaaatgcacgattgtgtatgcctcagacttgtgaggcggtcaaaaaacgattgaggcgtaaaaacatgtgacgcgcacacctcaaggaaaaaacaatgctattgggtgttttcagcccatttcatttaataacttaaaaaaagctatataacacaacttaagaaaaaggcccaataaaacataataaaaatccaataaaacttaaacaaataacttaaaaaaagcccaactcaaaactaaacctacaccaatatttctttagggtttaaagtagctgacctcctccttcatcaaccttcataattcttctaaaatttcaatcactgctcaggaaaaaagagagagagagaaaacttgctgctgcctttcctccttcatcgttctttttcctttcttctttctagctatttggtgaagctctcttcatgctcccttgctgctgctcttaggtaaatattaattagtttttttttatctagattactagctagatacataaatttcaatatgtatttattattttagttatatttgtgttgtatagatagtagaatggttaaaagatcgaagaagagttgtggtggaggaactagtggtaataatgggagaggtaatgttagtactacgagtagagggaatggcagccatggaaataaaaaagatccagcttgaaaacatggtaaggaggttgatatttcaggaggag

SEQ ID NO: 194910 - DNA, 1526 bp, Cannabis indica
ctctctctctctctcttctgtattgtatctcttctattttctgtagcttatttatagagcagtgaaggtagttgatcaggctggaagttactttaacttctagttcttggtcttgtagaggcaaagcctcctaggtttaatcttgttttctgttatttgttgttgtatgctgatgtggataagatgtataaggactggttataagtagaatttactcaacaatatgccaatataaatagtgagaataatgctaattttgtccatgattatatatttattctggcagagttattaatacttattttgtgttttgcactcactcaaggctggtctataagatatttggatgtcaacaatgctcttctcaaatttgcatgaagaaaaattatatggtgcaaccgcctggttttgttgatccagaattccctgacaaaatttgcaagttgcaaaaggccatttatggtctcaagcaagccctaagggcatggtttgaaaagctctcttctattctacttctcattggtttctcctctgccaaaaaagatcattccccattcattaaagccactcctaacagttgcttatatgttctaatttatgttgatgatatactcattacaaggagtaatgaaactgaagtgatcacttctctcattacatctctcagcaccttacttgctcttaaagacctaggataactcaattatttttaggaattcaagtgctgcaacatacaaatggtattatcctctttcaaaagaaatacctctaagatttattgtgcaaggcacaattgtaaggggccaaaactaacagcgcaccaatgaatgatttccttagattgtctagttctggcaatgatgttgtggctgatctaactctttacatgtcaatagttggtgctttgcagtatgccaccataaccagactagacatagctttcagtgtcaacaaagtttgctaattcatacacaatttatttcaagcatactaggttgttgttaaaagaatattaatatatctggttggcacattagactttagtttgcaccttcaattagcttcttcttttcatctacaagcatactgtgatgctgattgggcatctaatccaaatgatcgaaggtctacaattggtttttgtgtttttcttggaccaaatttgatctcttggtaatctaaaaagcaaccaacaatcttaaaatcctcaattgaagcaaaatttaggagtatagtggttgtagtctctaaaattgcttggatccaatctcttctcaccgaattacaagtttctcaacctgctattcctcatatctggtgtgacaacataaactcagtaatgttggctgataatctgatccttcatgctcgcacaaagtatattgaaatcgatctttattttgttagggataaggtcatcaacaaagagatttaaagctcaacatattcctgactgacaatcaaatttgttgactgtcttacaaagtgcttctgtccaatgtatattcttagagacaaacgtaagt

SEQ ID NO: 194911 - DNA, 1122 bp, Cannabis indica
accagaactcgagcgactcggctctgtaaagcgagccttatcaccagctctgactccttcgaggtgggccggctcatcgggagctatggcttcatgaatgtaacaaggttacacttgaaaactctcatttaaattcgaaaacaaatgtacaatgtttggatttttacatattagtgtattttctgtgcctggttacttaagaattcaaattcatgcttaatctttttgtttgatgggaaatttgaatggaaactaattgcaaaatgcaccgttccgtttgatagactaggactttagaattctcttgaattgatataaattaaaacctaaagggaaaaaaactatctttagactattttaacttatttgatcaaattacgttaatgcaatacatgaatttgtactgtgcgatatagtatcacattgtcatttagaaagtgtttgataatgttttagatcatgtttgaaatggtgtatttttcttctccttctatagtttctactgaaattaattttggggttttctccatttgtctttctccgtctctcatttttcttcatgtgggaatttgtcaatatatctctttttttttgaggcaacagctactcagggtttccatctggtgtggatactgaatactcatctggaggtatggggcaattgagggttcaagatgtgggagaaggcagtgtaaagatcaggtgagcttttctagaatttatgcattaattgaaaatttgaaaatgggaaaatgacattttcatggctctaaatttgaatgtaaactatttggtctgctatcttctgttgttggtcctgatagtactcatggcagttcttttgcaggctttacgaagggagagtctctcaaggtccctatagaggaatcccagttatatttaaggtagtattttattaaaatccgtttcactctggaatctttttatgtagttctatttagattctctagactaaatacatatttaaaaaactgatacagcattttgaatggtaaaggtatatcctggacaacgagctggtggaattgaggctgacatgatggccgcgaatgagctaaatgctcacatatttcttcaagtgagattattatattaccgtct

SEQ ID NO: 194912 - DNA, 3602 bp, Cannabis indica
acttcactcattgccaattgatttttgagatggaaccccataattctcaactacatcacaattaaacttaatccgaaattgtgctatgtcaactaatcttattctcaaccatcatcataatattattcaacacacacaaaaaaaaaaaactattatattttaaatagatttttatttcttttaatcaatatttgaaatatttaagcacccaaaacaatatatatataaatcgttatgacgtggcagtaacggattgatgtatcgatcccacttcaccgtttcatagcgtaaaactaacttaaaaatcatcttacgtgtccactacaataaaatacataaaataataataataataataataaaaatatcctttatgtctaaattaaattacacaaaaaataataaataaaacattttattacattattcgtttccttcttccctatttttacattttcttactcattggccatggccatggcgttgagatccgcaggaagaaatctctcctacgagattctcagccaaagtagttccattgaagatgacgaaactctctttcaccgctccaactccgatccattccacaaccattctgttcccaacccgaaccgaaagaaacggaagaagagaaagaagaagaccacgacgaatactaatactattactacttctaccacgacgatcgagatccagagctcgattccagaggaaccgatcaatggaaattaccgcgaagccgaagccgaagccgattcttccgtcttggacaatttcggaatcgcggagcaaaagtttcaggtttccgggaatggagatagttattgctcctcgaatggttttgaatcgaattacgagggttttagcgttacgcctgcgaaatttgttcgttcagggagtggagggagtgtttgtacggtcactgagcagcagccgggatttcagaatgtgcgaggggagttgagacagaggactgtcaatggtagtggcgggggtgccggagatggaggattggaagatagtgcctcgcgtgtgtacagtgaagggaaagttgaaaccgatgttgaggtgaattcggctgggaagcagagaacagaacccaatggggtcgtccttacgaaattagagactgccgagtccttggattggaaaaagcttatggcagaagatcccaattgtgagttgaatttaattttcttcgcattccccattttctttctgtaaattatgattaaaagctcaaaagaaggaaatgaaaatttctagctttacatgaaaattccccattgataacaatagtgacacaacaagtagtttagaagtagctgtgtaattactaaatacttataccgagtgattaaactatttatgaattcctattgtagttaacaattgcacagaaaattaatattgtttggtgattaatatttaaaatggaatgtttttagtaattacactgtgattacagccaatactcatatgaggccacaagaattgaaaagtgtaactggaactcttcaattacatagttactgtaataattacttcaaattacacccaaatttaattatagagtgactttccaaacataccctagatgaatttcattttgccaatgtggatgcttttattgatgctgttctgaattctgattgattctttgttctttcttattgtcagatatgttttcttctgagaaatcacctttcaagtacttcttggatgacatgttaagtggaaattcattacggaggacgacaacttttggtaatgagaaagaacgagaaagagtttatgatacaatctttcgcttgccatggagatgtgaactggtaaactaagctgcttttttttttctccacctataagaatacttagtctcttgaaaggtttattatgttgtattcagatttggtttcatgtaaaagcaacaaggtttcatggactgtacttggccaagtgaatattaatgtcatttgtttctttgttaaaattattagaactccttacaggagcacataggagtttatgttccataaggatttcatctaaattgatacttgagctttacaaattcttgcagctcataaatgtgggcttctttgtctgctttgattcatttctgtcattgttaactatcatgccaacaagaattctaacgaccatgtggaggtttataaaaacaaggttagcccatttttcttttagtttctataattgggttaatagaatatgttcaatacacattgagttcaaggatgataaaataataacatgtatctaggaaaattattcggtgacttcccaaattattagagacatgaattttatttgtaaagactaataggctgcttgatggtaatagaaagaatgaaagtttcaccctcatgcctgagctaataacttgctaagaatgagttttattgtattttaatgtcactaactctaagtataagctctttttgttaaaagaaataagctctttttctaattttatttcattttataagatacaaagcagctcccttgggaatcttactttcttatttagttaattttgtacatatttacagagtattctaaccatacttgtggcaggcagttcaaaaggccgtctgcagcagagctgtccgattttggctgctttgtaataatggtttgtggagttattcttttggaacgaacaggtttagtaaggatatgtgatattatgctctcttattcaactaccatgctagattttactctttttggtggcataattgtaattcttattacatgaatctgaattctagtatttttgtttcatttgttttagatatcagtttaatatatcatatgatccgtggtcaaggaacaatcaaactatatgtggtctacaacgtgttggaggtaacaagttgacaattaactcaagtgtctcttagaaattttaggattcgttttttctctttattctttgagacaactgtttttggatccaaaaagctcaaggaaagaagaaaaacttcattgcaattatttatttagcctgcaattttttcctctatacaatttagttctttctttctatgctataaaataaaaagaaaaacatatactttttacaaaatgatctctttatctcaaattactagtttagtttacttctatttaaaaaatgacatgattaacctgttattgctaatgttcaaacctacttcatttgatagcgagaaaaaaaaaagagagagaataaattgtcaacatttttcagcccttgttactgctgccataattgttaatatgatttggcactgacatttatatgttatgatcctttacgcctgcagatatttgataaattatgtcaaagttttaatggagatgtgttgcaaaccctatttaattcagcagatggacttgcaatctctccgccagataacataaccttctggatttggagatacatgtgtgacctgactttagctgttgctgcttccaatatccttacctttgtctttaatcattttcttaaatctttttgtgaaaggtgtacaatgagttatttgactatccaatgcgaatccttaactcttattactcattcattctttcatttt

SEQ ID NO: 194913 - DNA, 845 bp, Cannabis indica
ttaatatttaagtgtataattgaatattcacttaaaaaaccgatccaatccaattagtaattagatgagattttaaaatctaattagattgaatcagataatgattttccaaatctaattactaattagattggattgaataagaagaaaaaaattaagagaaagaaaaatattaggagaaaaagattaaattaaattggaagcccatccctacccacaaccacaaacacttcacttaaagttgtgcaagtgaaagtatggttcttattttacaccaaactttgagttgtaattgagaatgaatgttatttgcttgtaatcttaagtattaatgtagtaacattttcttagcatttttttgttgaattgtaactattcttggtttattctattaaatatataaattatctaacataaacattacgattacagtaaaaaagctaaacgtaaaaaatcaactaaaaatttgaatgacatattactgatattatcaaaacaaaaaagtttgaatttctatggattctttcatgtaaatccaaagtgtttaaatttgactaaataaacagaaaagaaactaaacgctatgcaatcctctgtgaatccaagtttgcaccaaatacggcctcactgtagtaacaacaaaaacctgaaattaggaactgaaacaaatcaacgaccattaaagtaagacgtttttaaattgttaaaaagttcatgttatggccaaagctcagatcaaacaaacatgatatagaaacctacagagaaaaaagaacaagatgatcacatatccacaaaagaaggatttcaagccgcgaatgtgactgctatatagaccgcgagac

SEQ ID NO: 194914 - DNA, 1956 bp, Cannabis indica
ggcacaattggttaaagcattcatcaacgcatgcaaattcaaagcgaaagaataccatttgaagaacacaaaggttaaaaaacatactcacgatataccaaagacttgagaaaacacaaggagctttgacaggattattcaatagctgcaaaattcctctattttaaaaaagtgtggtagttcatggcattagtaccaactaactaaagaacgtcactaaaagcttgcaaactggaaaggccttccacagtacctaccaccatttattgaatcagggtctgcattggaatagcagcatatagcttccaaaatgacaacactcgtttgatatagtcagcagtccaaatatccaggaaaacacagcctagttatatcctacaaaacctatccctcataatcaaacctaaaacgtcttaacaaaaacatccctcataatcaaacataaaacaatttggccaaaggtgcaaaattaataactactatgagtgatcactaacaaagcatataaaatacttccatgtcacataatattaaaaaacggatagaacaagcaccaccacactaaacgatatatcaataatcatatccatcacaacacaatacacgtgtatgaaaccatggcactcgcaataagaatcatttaccaacatttacctgctaatggcaagacaacccgagagggagctgcaaaacaaacaagtgtaatagagtacagcatcaaatgtgaaaccttactcgctggtaaggtattagtattagtagaatcaatctgaaattcagtgagcctgaaccccagccaatacttaaagtaacaattcacagaataatatgtaatatttcttaatgcgatatggaatcaaataaagaatctctttcaacatactacacagctgccaagatattatcttttagcctgaagatcatacggatccccttgagatttagaagtcactaaagatatggcctattgcaacgataagcaacaaagaattcaatcagaaaatcaaacagtgacccagttgtttcatacgttcatggaagttaatgcattcagattttgtactatgataatcaaattgggacacgaatatgcgcatttctagctttccatcattaaaggcagaaactaaattgctagtaaccgataaaaagaaattctcaacacaacagatctgtatgtaaggtaaatctctgaatttattattgattttagttctatcaaagaaaatgttccaaatttagcgttggagaagtaacatcaagtacagatagaaattaatctacaaggatcgaagagagagagagaaaaaaaatataaagaacttcacaatttcaacaacaggttcattcaatgtgcagcaatatcactactactaaaaacgtcgattatcggatcagcagcatcaagaacggggctagaaggattctgactcggaaacaaaaccgacttagaagcaacaagcttcttcctctgaggacatctaggtccgaacatccttccggaaaagcaaggaaatccatccatggcgatgaccgtcgattgaccaggcgttgacgatggcgacgaaggaggagatgaacggatctgagcaattgagagaaagcggtgcgatctagcactgattcgcgagtctcttatttgagcgagagcaccaggcttgaggtacttgagaaaaggctcagcccggttcggggacgatcggtgaagagaacgagttctacgattcatgacgacgaagactatgatattgaattttacagaaaaaaaagagagaaaaagagacaaagaagaagaagaagacggcttagggttagagagagagagagagggagtggtaagagtaggtggggtttgggggtttcgttaaaggaagggaagtagtaggcgggaagagtgtggagggagaaagttgggaagcgaagggtttcaggtagtagtgatattgctgcacattg

SEQ ID NO: 194915 - DNA, 2508 bp, Cannabis indica
tcataaaaaatattatatttttactaatttatactataaaaacaaaaatcccccaaaataatacagtatttactcaattgcaatcacttttggaacacatagtaaattttgaaacaatttatttcagcctattgaaaatcgactattcatgtagtagtagtagtagtagttgatcatatgcttatagggtgtttgacaaaataatgttttgtttttcttttcataacattttgtgaaagttgttttgcagagaagtgacattaaaagttgtgttttttctttattggtaggtaatgagctgaaagggaagcttgggaaagaatcatacttggagaattggacaaatatactaaccctttttccattgttagctggggaatcagcttatagtgttcattttgaattggaagaaggatttggtgttcctgaggcttttgtcattaacaacaatcacactactgagttctttcttaagtctcttactcttgaagatgttcctgatcaaggccaagttcattttgtttgtaattcttgggtttaccctgctaatcactacaactatcatcgtgttttcttcaggaacaaggtactaaatatgattttttagtctcatatttttttccgaattataaaaattgttacatatatgtcccttcagttatgttctgctcattttttaaacaattttcttatgtaattatgtctaacaggtatagttgtagtatgagagtatttaacatttttaagataatcaaaacaaaatctagtttaacaatatctctctcgggtttagtggatcctaggcacgagcttaacctgtgttagaatttggagataagatgaatgtggctccatcttaaaaccaattggcaatgggactagtatctgtttggacaagtggctctgataccaggaataagatgaatggggttccatctcaaaaccaattggcaatagaagaagtagcccattcatcttatatatcacaatttaaattcataatgtgagactaactcttaataaccgtccttaacccaatagaatataattgaatttgcaatgatttttatggtttaagaagaatttttgaaacaaagaatagttgaaagggaggacaaatcctatttatgtatttagttttttaattttgtttattgggtgtttgataaaattactcaaagaaaagaaatttgatgaacttggtggtgttatatacagacatatcttcctcatcaaacaccagccccattgatctggtatagagaacaagaactggtttacctcagaggaaatggaacaggagaacgtaaggatggtgatagaatctatgactatgatttctacaatgatttgggtaatccagacaagggcgaaaaacatgtcagaccaattcttggagggactagtgagtacccttatcctcgtagaggaagaactggaagaccaccaaccaagacaggttagttagattttcgcccactgaactttgtcactaataagatcttggcccccgaattataagagatattaaagattctttcttaactttgaacgttagtaatttacgagctctctgttaactaattaacaattttacattctgaagtatattttgctccagagtttttaaacacatgtatgaatttacaatggtttcttctgttgttcatgttttagtttaatgtgattattgtgtgtttcacagatcccaacagtgagagtagggacattgatcttctgaatttgaacttttacattccaagagatgaacggtttggtcatttgaagatgtcagatttccttgttaacacattgaaatcagttgctttaatcattaaacctgccattgagtcattatttgacagaaccccagctgagtttgatagcttcaaagatgtactcagtttgtatgaaggtggttttcctctaccacttacagtgtttgagacaataagcaaaaatgtacctttggaaacattgaaagacctctttcgagctgatggtaccagatttctcaaatatcccatgccccatgtgattaaaggtaatcaaaatcggaataatcagccgaaaaaatgaacgagtttaataataaaatagtaaaaaacaatattttattatgctgcttactaaactggtcggaaaggtaatcagaatgctttaacatgactaaattgtcatcggtagaaaatgtaattactttttatttgtagttttttcatttgggacccttttactttcctttctccttactttatgtgggttccactagtttttctcattacgaaattaagtaaataaatgaatgagaatcgataccatagataaacatgtaatgatgttgattgttaaaatctacttccattggttttgagcagaggacaaggcagcatggatgacagatgaggagtttggaagagaaatgtggctggagttaaccctgttgtcattcgtcgtctccaagtactaactttttctttcctataagatcttcaaagtattttaaga

SEQ ID NO: 194916 - DNA, 1192 bp, Cannabis indica
aaaaattactaattagtctaaataagataaaatgcttaatggattgcaaaacacaaaatcaaaaaatatttttaaaaaataataataataattaaaaaaaaaaacaaagatggtaaagtaaaggttattagagcaatgaagatatggagatgagaagggaaactcaaatgcccgcctccaagaccaaacacctcagctctctcttccggaccgctgcaaaaaccaaagcgaaagctaaaccacctaaacccttcttcttcttctacctctccctctacttctaccgcctccctcgtcgtcgacgacccagctctcaaacacttcgtcttctcggtccactctcctagtcccgactccctcatttccagagtcctctctgagaagagcgttaagatactttcacattctacttcatcagaagaagaaaaccctcctcaagaatatcaacctgcttttgctctttcaactccgaaagtggcacccgtcctagataatggtatggctgtataacttaaacaagaattaaattctgtttaatttttcttttggggtttcacttctgtgaagttaagaacggcctaagaaggtggaatttgtataacgtggattatgtttgctgtcagaaaatatcttacattgttaatatatataaatttatatatatacttttttttttcatctgactgaagaggaaccaacaattttggatactgctacgatttttggtctgactacgaggaatgtgctctcaaacaagatatcttctatattaaatggtatgttctgcttttccatttacattggttgctaagtaatgtaaatgtgtgataaatctgtcttaaaaagaagaaggtatctaaatttccatagcttatttcataacaagcgttgaatgaatgattaacttatcatgtaattgctactttcttataagaaagttagccttattcgtgatgtatttgtgtgacatttctgattcaaaaaataaaaagtattggagtaattttttgtttttttctgtaatttactccagattctccagaatcagtcatttttttaagaggctttaatacatttagaaagctctgttcaataagctttgttgactgaccttatccataattttcctcgaggttccactatcttttgaagtaacttactttctgaaaatgagcatgggcttggtgttcgt

SEQ ID NO: 194917 - DNA, 1639 bp, Cannabis indica
ttttcattctcatggcccaatctaaactccgaccacctcttggtatgtggtgcagccatttgtccaacggcccattaactataaactcgtaaacaatgtagcggtcaccatgattgtagcaacatcctttcacggccaacaaatttggatggtggagccttgcaacccttttaatttctgaataaaactcatgttttctttgaaaactggacctcttcaaccttttaattgccacccttgaaccatcaggttgaagtccgctataggtcccccctgtcttggcatcaccaagaagacggtttccttcactaaagttcttagtaattgatctaagttcctctttagtgaaaactttccaagatgggggtactagtgcagaagctgctgggttagattgtttacgggagcgtttccgcttcttgctccgcttgaatacaagaagccaaatgactacagctagtgttgtaaagagaattaatccactcactacagctagaatgataagatattccctgtggcaatgtatgtgggagcatttattccctgagaaacaacagcaaaatgaagaacagccagctagaaaattgtaagatctaactcaacatgaccagtctgaaacatataaataaaggcatacgacatacctatttcaaccttgcaaataaattcacgagacatgttgcatctatcgccaaatagatatttagttccgtttttaaccaatgtacataattcagtagaattattgctgtgacaagggactctgctactgctacaagtaaatagaaggggagctctagtaaagattgaaccattccacagggaagtattgtcagaccacttccaaccaagactggaagtagaattgatgctccttcccccaatccagcagccattagagctttcaccacaaagattttcagcaatgcttagttcttcagatgttgccaatgctgccaagtggccaccataatgttgacaatgcctctctgactcattccatgatagcatagttttaatatatccaaagcaattggttttgctaggaccaacagtccaattacttgggcatgctgctgttcacaaaattaaaatcacttttatatataaaaattccgggggagaaaagatcgcacaacatataattgtgtatagatttttatgcagtggacaaataagatttataagacattagacatgtgatgtgctaaaggaaatatttgcatcgaaaatgcacttcagaattgtgactctgttgcagaaatcaaatcaaattcagcataaggaaaagaaaaaaaaataaacaagagcgaaaatatggagttacagcgaatcttatactgaatattattcttaacatttaggtcccgcccaaaatctttaaagacctcagaacattgaagcaaaataaataaaccatacccccaatctatcaaaaatccaaatgctgaacttgtttattgtttcggtttaataaggttttcttaacctcaaatttgtttattgtttattgtttgtatatgaacaggtgggatgatcctcctgagcagaacatgagtatcccctgaaaaaatcaaactaacttcttccctatctagcttatctcaacccacaattgttagctaaaaagacaaacatg

SEQ ID NO: 194918 - DNA, 2164 bp, Cannabis indica
ttatttatttatttttttgtagggaaaaaacattgggcacttctcagtttgcgggggtgacggtgaagcatagtgttcgttttccttttttgattggaacatttattataagtttagacccatatttgggtctgatgttgaaacacaatacacgatacaagtttaatttaatcatttatgaactgttaaaatgggcattgactttgttgatgctggatttagattatggaattttaatgctgtaactgaagtaataaaattaagttaagtttgatttctattgaaattgagagtaaaatagtttttgcaagcatctgtgatctggtctattttaaagtggggaaatagtagtcttattttttttttaccaactgtaacttatttcaaaacaattttaatggcaaaactagaatgtgccaaatttggaacaaaacagaaatgatattttgcgatgtttaacaattattgcatgaaatttgttattaaaaaaaaaaagaagagaattgttaaaagaagctagtagcctctttggtgttttattgctattgatgtaattaaatatcgctaattaattgtataacgtcactcataaaaggtactggacagcactggtacttaatagcaatgctaaaaaaacagaatgatgcttaagtactttcgctatgatggaataataacgtattttttggtttacaatactgatgttttagcgatgcttaacgatgcttttaaaatgattttcagtcagatagttttaacaattgtaaaacaatattttttaactttgcgacagtataataaaatgattttaactttggtaattgataactgttcacttggaggtctacacatttagaatgtgtataaccttaaatgtgtataaaatggaaattttaaggcttaaatttcattgtagcctcaaacgaatagatttattattctgcgtcccaaagttataaatgatactgacaaccaagtgaacagatttgtttccccaaagttatctaattgtatcccttgcaagatcatcgttaaaaatgagggaaattacttcgtatactgttttttttaatttttttaaaaaaaaatttaactgtttgagtttctccggtggtttctatatgggttactatacgattttttattgcaatttaggttgcagcgctagttgcaatataggtttctatgtagaattccgtaaaaatgcaaataaaaaatgtttttaagtgtaaaaataaataaacatcaatattttatcattatttttggccaaaaaaaaattaagtttccatgacatcattgactaagcatcatttttttcccctaacaagttttcatgtcaccatcacaaaaaacatcgttaagcatcgcaaaagtattactgtttaaaattatgcaaatttagttacatagctaaaaattgcaaccaaaattagtaaattatatatagatgtgttcgaaatctttaaataatagttttaagtattagatttgattttttatcgtaaaaaaaaaaaaaaacagattggcaagattgattagtgcagtgtcaatgacgaagatggtgttaatagcaagagctacattgaggcagtgttctgcaacgagggagggttgttgtggtgccatcatgagagacagacatagtttgaaagaagggtcgttgatgaaaggagcagcatgctcaaatttatacaaagtaatgtattttcagttagggtatagtaaaatgcataacaactgctttcctttcctaatcaatcaatatatagagagagcgctggttgattggctttcagaagtcacttttagacttttgaagctccaaaagcactataggttgaatgttcaatgcactggtacttaatgacatttttctattttttttttctcagagtagtgctaattacaaccttctattacaattttttttctcaacttttgcctccaaaaatgcatgccggaatattttttaaaaacaatttttacggagtttgttatagttataatattattattgtaaatttctgcgaaattccgaatagtttacagtgttgaaaacatgtttgccttgcctttacctacacattaagcacatatcgtcccgaagtgtgcaatcttcatggagctccaaactgaccgcttattcagtttttgccttgcc

SEQ ID NO: 194919 - DNA, 1911 bp, Cannabis indica
aattaccgttccatgcattgatctatattcttcccaatatgacacgtattttccgttgaaatggtagccgaatttagggtataacaccatgcaaactgagaatgtagctctcaagaagaacaagacatggtccttggttaaacttccacccaacagaaccccgataggctggaagggggtttatagagtcaaagaggatgctgagggcaatgtcaccactcttaaagccagacttgttgctaaaggttatcaccaacaagtcggctttaattttaatgaaaactttggccctattgtcaagctaatcatcatccgagttattttaactcttgctgtgacaaaagggtggacaattcgacagcttgatgtcaataacatttttctcaatggtgaccttcaagaagaaattttcatggtccaatcccctagcttcattgatccaaatgaacctgacaaagtctgcaagcttcacaaggccttatatggcctcaagcaagctccaagaacttggtttcaaaagcttgcctctgccttgacaagccttggattcatctcaactaaaatagaccactctctctttatcaatttatcatctcaatcatgcatctacatcttaatatatgtagatgatattttgatcactggcagtgacaacacccaagtctctcatctcatatctgcccttagcaacaagttttccttaaaagaccttgggacagtcaacttctttctaggaattccggtaattcctaatgttgatggcattttactctctcagcaaaaatatattcaagacctattgtgcaaagctgaaatgcaaggagtcaaaacacaaagcactcctatgaacagtggtctaaggctctcaaattatgggagtgatcatgctcttgatccctctggatataggtctatagttggtgttttacagtatgcaacaatcaccaggccagacattgctttctctgtcaataaagtctgtcaattcatgcgggatctgttgcaatctcacattgttgctgttaagaggatactgagatacttggatggttctttagactatggcttgcacctgcagaaagctactcatctcagacttgaagcatactgtgatgcagactaggctgcagatccggatgatagaaggttaaccattggtttttgtatcttccggggtgacaatctaattggctggcaatctaagaaacagactacaatttctaggtcttctactgaagccgaattttgaagccttatctttgttgtgactgaattaagttggattcagtctgtattttcagaactaaaaatcccagtttcaactcctcctatagtttggtgtgacaacctcagcacaaccatgcttgcagccaatcgagtgcttcatgccaggaccaaacattaaaatcgatttatattttgttagagacaaggtgctcaacaaagacatcctggttcaacatattcctgctgacaatcaattggctgactgccttacgaaacctatttccaactccaattttccctttcttagagacaaaatttgtgtggcttcttcaaccacactaagtttgaagggggctgttaaggatactacaactaatgatgagctggcagattagttagagttggttaggtttctgttatcagttagtttttactgttggtcagttagtttcggttgttagcttctttctctctgcttgtatatagactctgcttttgcaactattgattaataacagaaaatctttcttctctttcctttcttaaatctctacacaaagatgtatttgaatgtctatacgtttatatacaaactcagatttttaaaaacaaaaacaaatatgttacatgcactaacgaaatcctaaaactgaacccgcctagagaccataactatagtgtata

SEQ ID NO: 194920 - DNA, 1431 bp, Cannabis indica
ggattgatcaacattttcctgcttaagtttaccacatttgattactacatttcatggaagtgctacctatatttttgtagatgatataaaaaaatactaatattacaattgcaatttaaaaccaccacgtatttttgaaataaaaaagaaaaataggaacttattattgaatttaatttgaggtggtggctactggttgtggttgtgggacctagaacactcaactatcatgaatcatgatcactaagacttgatgcaattgatcatgtacaaaaattgctttagatttgtgtcaaatcatgagcatggccttaaatagctcaaagaattattatcatttataattatatattatatatattattacccccatagtggatttgacattacatcatctcttaaagctattgaaattgatcgataaggagttatttttattaacattatattagccatcaatattattcattatttgtcttctttaaacgacaaaacgtggtaaaagcaaagtgtcttaggtttcgaacagattattagcaactaatttctcctaaatttatattatcttgataaattgtttgtgtttgacaattggcataaaaaatattagggtaaaaaaaattaaataatagaagaggatggattaatttggccccacattattcttgtgcatagttccatcattgtatatctataggctttttatttttaagctcattagggaaagaaattaagaaaaacttgtttggaagctttagatatatttatttttatttttaacttttattttcgctatcaaacaaggaatcaaagatcagtgctatcttaatttaggaaaattacacattttacatataatttatgaatacatatatttattttttcaaaaaattactttatatatactatgttttaatttttttcttcttctaattcataattattccgttggtttttgcaatataatttgctcctaagtttttatgtaaatttttataaaaatataaacaaaattattttaaagtttacaaataaaaatactttttatttttcaaatacattattttgcgaaaaaataaaatatatgagaaaaacaataacatctgatcactctttttttttttttttggtttttgccttctttattttgttttttttttctcatattatttcttttttttttgtgaaaaacttttttgctaaaaaaactataaaaataaaaattcttcacaccttaacaaaaaaaaaaaaagaaaaaataccttcattttgagcctcggtcaaagaactcaattacatcaaatatgaaaataaaataaatattacaaatggggagccccctcccaatattatatatattgggcaaaattttctttaaatacgtatattttctttgaaaaatacattgtacttgcatatattctacataac

SEQ ID NO: 194921 - DNA, 1039 bp, Cannabis indica
caagctagagaggggtgtttgtgctgacatagaagttgaagatgaaggcagccgaagtagtgttaaggataaggatgatattgaaaatgaagacaatcaccaaactggtgttaaggagactgatgatcttgaagatgagggcaaccgtcaaactggttttaaggataatggtgatcttgaaattgaaggcgacgatcaaactagtgttaaggatgatgatgatcttgaaaatgaaagcagccatcaaacaagtgtaaaggatagtaatgatctcgatgaggccccctgtacagatagcaaaacccgggtggacgatgcaagtctacatggagaaggagataagaaaccatctcctcctcttcagagagctgttctcagtcaactccctggagaaacttttgcaaaagatattgaggttagtttacatttggaggctactatgtttcctttgcatatttcaccatcttgtgtttaacatgtaatttccatccagtgtgaacgttaaaagatcagaatttatagactattatttacactaagaaaatagtatgttattttcttcctcagcattatcttatggttggaattatactaatgcaggtcggagaccatgcagatagcaaaagcgctgaggaagattcaagtcctggtgaggaaattgaatctgaaatcaagaaagattatggtatttatcttggcgtaaacgatgtagatgaaaatggtacggaggatgatggtcttgaagatgcttggaatgaaatgtcaatggcattagagcttacaaaggtatctttacaatccaactatgcaacaagagaatgaccctcttctctatcactctgtatattgttcttttgaaatgatgatacttttttctagtttttccttggcataaattgcaataagattccttactatatttataactgttcatttatttgggtcattaatatttgatttatttgaagttggtgaagaactattagcaataggtatgcaaagacaagcctcagttagtgctatttaattgagttttggg

SEQ ID NO: 194922 - DNA, 1697 bp, Cannabis indica
tatacataacaaataacaataggtgaactcaaattcttgcttctaacaaaacaaatctaaattggttaggaaatggtttattaagagtttgtgggtgtatataattgagggaaacatctagttaatggcatgtgaaaagttaaaaaaatgtattattggaaattatctaacctttctttgccttgttagtcttaataaagcctccagttgtctctccttatgagcaagttcatccactgttagatgttctacatcgagattactgtgttcaatgtgtaaacataaacaccaatattaatttcaatctccatataatcatgtagacatagtcttaaataacatacctaacccctttcaacaaatcaacatcttcccaaagtccatcatagtcacaattctgcataatcagccaaaacaagtgaggatttacacaagaacaacatactttctacatccataacatacctttgaacatttacattaagactgtgtttagtaaaagggagaattggatagtttgattctctcatacaaaagtcaaattcctttccttagtgtgtgtatttcttctccctaatataggctaaactttgttcatattattagcaagggcatccacaatatttcacaatgaaaggtttgcttctctttaaatttgaaaatggaataaaaccaaccaaacaagggaatgagtactctacttcctatcttccttcctaaacatagccaaagtctacaatttgattattacaggcagagtcaaacactgtttttattaatgttattattatgatcagaacaaattactgtttgcttcaactatctaatcataatacatgtatcattcactttcacacgttgtaaaactaaggtctaaacataattacacttccttggttatatttatagccaaataagagtatcaaaataattggtataagaatggccattcaattaaagaggaaacattatattagataaaagcttttctattgaagaagtgcggttgacctccagttcattagagctcttttcttcttttcctttcgtcttgtagcgttcgattgtgtttcctaagctgaagaataacataatgttaggatataatcatctgaaacatgtaatttgaattcatagcaacaaagaagaaggctatatgagcaatataacaaaattgatgtatgaaagctaaaaccaattaaaagtgattattgtagcatttgaaggggtaggcctatttaaggacattgaaatgtttatttttgataacgagttccaaattgataatgtgtgtaaacttaatgttatttataagatgtataagctattcttctcattaccaattaattttgagataaaacttcagactttttagtatataccttaccgcattttactttttaaaccatactgccacattttaacatggtatcaaagtggaaagaagattaacaagtatttgatccaaattcaaaaatagattgaaaaatgagggcaaaaagtgccacttgtgatttgtgattagggaatggtgagtcaaaaatgagctacttgtgatagctgtttaggattggtgaacaacaatagctacttgataggaatattaaagaatccaacattaataatgcgtggaaacttaaaactatatagaaaatgtatggactacttaactcattgtaaacacctccgcattctat

SEQ ID NO: 194923 - DNA, 2256 bp, Cannabis indica
tttaattaaggatggaaaattagagaagcgaatcttattaatttaattacccaactgttaattctaattactattctctttcttaatgtgaatgacatattctaaaaattaacctaatttttttcagatcttttaggccctaaatcacatgttatctaatcatctctgaaatagactaacatataatcagcattaaacaataaactcatcttctctaagaattgcactctgagatgccgggaggatattttttccagtcttgggtttgaagaaattacaaaaggtgaaaaatttcttggaaatcctttgattgtcagtggcaagaacaactccgagttcgagtttattatagaaaagataagcatgcggctagaagggtggagagccaaattattgtctcaagcggctagaacaactctgattaagagcgtgttggcctcgatcctgatatatactatgtccgtatttcttttgcctcacaagatgacaaataagattgatggtatccttcgtaaattttggtggactgggaatactaaagatggtagatttcttgctctcaaagcttaggactccattttcaagccgaagtcttgtgatggtttaggccttagaagaactgaggatattaacttttgtctgatctctaaacttggttggatgatggcttcagaacacatgaccatttggaagtcagcgctgttggaaaaatactgtaatagaactgattttctctcttctaatctgccggcctcagcttccccagtggctaaaggtatttgggcaacgagaaaattcattacagatcagagtgtgtggatgattgggaaggaattaaaggtgagtatttggagttgctggacaggaggagacgggtttgtttgtgacaatagtgtcattaatccgagagtcacagagaatgttaatgttggggatcttatgttggattcgggattagattggaattatcagctgatctcaacctggtttcggcttgaagctttaaatatttttaaggttgttgatttcaactcccttcagtttcatgattctttgtgttggaaatctgctccttcgggagaattctccattaaacgggcgtattgggatttgaatgaggctcgcttcaaccttactaatctaacttgtagccgtatttggaaattaaaattgcatgagaggctcaagctttttctgtggaagctttgctaggatactttgccgtttgggtccaagcttcagtctattttcgggcatagccctggacaatgtgttctttgtggtgaaggtaatggtgatgttgtgagtcattttgttgctcactgtaatgtcagtaatcatatctggtttgctagcaaatggaacatccatatcaactctttcaattttgagagtgggcgtgaagctgtcacgtggcttcaaccccccattttctcaaaatttgtcaaagagcgagcaagatgaatttgttctttatggtgcaattgtgtatcataaattgtggagtgttaagaatgacatgttccataacaaaactcctttggtgctggatgggttaagggctgttgtggagaagtgttaccaagaacatagttctttgttggtccctggtttcgtgagtgatgggcagagtggtggcattgaggtggttcgttggggcctcccgagaccagaccgagtgaaatgtttcgtggactatgcttctgcaaaggaaggtggcgcggtggtggctgttttctttgacaatgatgggtttgccaagtgcttcagggcaaagaatgtgaaggcgatttcagtcttacagggtgagttggaggcgctaatgtttgggattcacttggcctgtgctgctgctgtggaggaagttgatttcttttccgacaatcgacaattggtgcaagctttggtggaaggtcatcggccgcactggaatgttcaattttctttcaataagttgctccgtgttttgaataggaatgtgttttctgtaagttggatcctgcgagagtctaatgaggcgactcatgctcttgctagatgggcttgactcatacttgtaatggttcttcgttttcgggaagtgagctcccatgtgctcaccaaacttcacgttttagcttaatggaatttgatcttttaagacaaaaaaaaaaaaaaaactctcaaatgtacacttaggttatgcaaataaataataatataacatcacattcacatctagtaaacaagtaaacgtactaataataaaaacaaaac

SEQ ID NO: 194924 - DNA, 2062 bp, Cannabis indica
tttctttcttttgtaaaaaaaatagtataagtttttagttgtttcttcctaatgatgccttttccatttgacttataggatttgtgttcatatatggtctattaaaaaagattgcttactcttctacgtaatactttcttgttgattaagcaaccaaaacccacacattacattaatataaaacaccaatgcaaacttatcaaaattctacaaagtatagactaaagactcatgaaagcaaagactaaatgatttcaagcccttaaaaataatggtttctttagctggatagatatattaaattaggtgatagtttctgatcaattctcgctacgtataaaaatttgtgatttttctgcaacacatatgtacaaatcataaaacaagacaaggatcttcaagttcaacatttaattaaagctgatcacaagattatgctaaaagttaaaatagcatatggtagtccccatcatgaaattgaagtatatgataggataggattgataggcaatgagctgtgcattttaaagattttaatactattttttctttcttccaagcatatagataacaaacgatatggtccatgcagctgttcaactttgccaacacccaatattatgcattcatttcaattttaaattcacgctcaccgctacactacagtttgatgttagaatattttatgtagactacaataattaattgttgttcactccatgtcagtattaatatataataattgtataattggtaatgcatggtattattattgggccataatgagatagatataacgtactaacacgctctaggctcatggacatgctctaaaacgtctttagtcaacccattgagtcatgacaactattttctcacattgggcatgtagctccaattgacccataattccttataaagaaaaaagttgtgctcttgattgggattaaggtggaatgggtgtggctatggcgtagagagaatgaaagagcattgttcatcatatccgagctctcttttctccatatgtgtagatcaaaaaagtgtaatcaacattatcattggaaataaatatcaaaattaggtatgcctattattatgtccatgctctatgttaaaggagttagttagtctgttatatttccaactgtttgttctgttattttccttgccagctgtcctggttgttagtcgattctcctttggttgttagttggttattgaacttggctcattgtatatatgttgtaatcaactctttaatcaatgatattctttcttctccattttctttctctctgtcttttctctttctctggtctttcgttcttgttgttctttcttgctgttctttctgttatgctatggattgtaggtttaacatggtatcagagcattttcctacgttcaatgctaacatggccactgttgtagctgctggaatcaacaacaacggatcgagcttcaatggagctcaaaccagatctcaatcttctgcagaaccagtgtactttaatcatagcatctctattcgtctaaacgatcacaatttcctcctttggaaacaacaagtgcttgctatcattagaggaaatcgacttttgaaattcatcaaggaacctcctccagctgaatttcttaccgaggatgatcgcgctcataacagagtgaactagatcttcatagattgggaggtgcaagatcaattactggtgtcgtggttgctgtcctccatgaccgagagtctcctcacaaggattgtaggttgcaacacagcacaacagatctgaacaactttggaaaagcattttactctgcaggtttcatccaagattctggagtttcgaacgaaacttcagaatctcaagaaaggaactttgagtctcaatgattacctcttaaaagtcaagcagaatgttgatttgcttgcatccgtgggtgaaactttaagtgatcgtgatcatgtggctgctatattcaagggactcccgagcgagtatgacacatttgtcatttcgaccaatactcgagttgaagagtacactgtaggggaaattgaggc

SEQ ID NO: 194925 - DNA, 1995 bp, Cannabis indica
gccggcaataacagtagtggtggaatctttgcctcctctagcttgacaaaaccttagctataacaaaaatcagcaacctttggatgataattcacatcaagaagaatattagttgatttaatatctctatgaataatgggacgagtaagatcatggtggagataagccaatccttgggctacccctagagcaatttggtgcctagttggccaatccaaatggaaattattattccaccttttatgaagtgcatcccaaagatttccattaggcatgtactcataaaccaaaagattacaatccaagctcgagaaataacaatacaacttaactatattcttatgccttatgctccctaaagtctcgacctctgttttgagctccttgttcaatatcaattgctcatcatcatcttctgaactccacttttgctctgttttactccatagtcgtttgactgccaccacttcattgttgctcagctcgatcttgtacactgtgccagacccaccacgacccacaatattcttatcaaccatggcttccatgatttcacgttggttaaaagttacacgatgaaagctcttgacttcgtaggagaagtaagaagataaggtctcgtcgttttccactgaggcttgttctttgccaaaacgacgcttaataaacaaaacaacaccgattataaggattgcgactgatattgatattgcccgtatggaatttagcttcttttgattgtatgatcgtgatgggcagagaaggaaagttatgttcttatgggaattataggttttggccggcactgatgagtcaacgcatagacctgggttacctgaaaagctttctactaatcctcctttgattaatgagggtgggattggacctgagaggttattgttggagaaattgattgagtttggtaaaagctcacatagactttctgggatattcccagtcaaaagattgttggaaaggtcaagaacattgagagatttaagtgaagagagtggatcagctgggattgaagaattcaacttgttgccttgtaaaagaagcaaattcaattttttcaaatctctaatttgggatgggattggaccagaaagtagattgttacttagatcaattttaaccaaattggtagctttagaaatctcaacaggaagcacccctgaaattttgttattctgtatgaacaactcagacaagtttcgagctcttccaatggaatctgttattgggccactaaaattattgtaaccaagatcaataatcgaaacatgagggagagccaacagtccctcggggattgatcccactaattattagcactcactctaaacctcagtaatgaataacaatatccatagctctgaggtaactcccctgagaacttgttatcaagtaccaaaaaatattgtaacttaccagctcgacaaacgtaagcagggagtggtcctgtcaagttgttttcagacaagtcaaggacttccataggcgacaactgacccaaattccaaggtacttgaccaatcaagtaattgtcgtaaagcgacaagatcttcaatgtggttgattcagcgatcacacttgggatttctcctgtgaggctattgttatagagctgcaacacacgaagattggtcaaacgacacactgagactggaatttgaccagtcaaatggttgaccgacatgtccaagtcactaagctccgtcaggttcccgagttcctcgggtattggtccctccaactggttgtagtaaagctccaacaatttgatgttcttcaacaaccctatctcgatggggattttacccgatatgaagttcccactaagctctaagtcaactagtgacgtcatgttccctatggagcgtgggatttttccatacaccatgcaagtggtcaacaccattgacttcagcttctttaagttggcgatactctctggtaattgccataaattgaagttcccattctcgttgaagt

SEQ ID NO: 194926 - DNA, 1590 bp, Cannabis indica
gagtagtactgagatagctggagatatccgcgtgtgaatcttgatggaccttgttcctgtccgttgggtctttcttcgacgccgtcgttttgagatccaatgtgtgtgttgttgaggttggctcggcaaacagggcaagtagacttggattttagccacttatcaatacaatgtgcgtggaaaatgtggtagcaattggggattaaacgcaacctttcattgtcttcaaattcaaggaaacacacggcacatttctgttgatcaccttttccaatctcgagcctactcgcctccgaatacacaaatgtgggaaacgtctcaagaattgctgcatcgagtcctcggcctcctcctccacctccaccgcctacgcgtccggtctccacccacgaccacgggttgaagaaacttatgagcgagtacatgaccgaaaaaagtacggagaatatgccaatgaaagcaagaaagaaatacaggtaagttcttgcatccaacttccataatgtcttctggtcaccatcatcactacttgtatgatcgtattctgaatgttgtggcgcctgagctccaatgctagctaacgccgccgctaagagaagtaacacaaaaagaagtgcgtcaatttctcgtttggagaagtagtaccgcgaattgaagcttgccatggtgatgagggtgtgtagagagaaatttaggctttgagaaagtggtagagaagaaatagaaagaaagagaaaggagtgatatttataatataatataggacacgtcattggtgccgcttacaatcgtggccgtcctttgtgcctagtttatgatctgatggttagtactcgtttaagaaacttgttagagcactcccttagctcttttcttcaaaatagataagagaaaggtgaaaaaaatgataaaaaattagcttcatcacataagttattttagcttcaagtactattcaagtttaaagtaaagtaaagaaagtagtttgtttgtcttttcacaatttcacaatttttttttttgggtaaatcttattttagatgtggtattttgtaaaaattactaattacaccatctgttttgttaaataataaaatgaactttacattttttaaaattgtacaaataggaccctaaattgattttttgtcaaaataaaacaaaataataatctgatctagagatgttatgacaataccggttacattttctgtatctgctcgtattaaaaattgtcttaaagttggttatattaaaaaataaaattattaaaaattaaactcagggtcctatatatatttttttttttaccattttagaaaataaagaatcaattttgtcatttaacaaaacagagagttcaattagtatttttgcaaaacacagagtctaaaatggtatttaccatttttttagtatgagatatgctaaaaggtatcatacatttatttataaaattaaatatcgaatcatataactttaaagaatatcgctaatcaccaataacaacgttgttcctagtactattatcccattagtgattgtcgacatttattttgttgttgagtttacttttaaaaaatgtcatta

SEQ ID NO: 194927 - DNA, 1869 bp, Cannabis indica
aaaaatattgttaatacttttatattgtattaaagtggtttttctttctattttttaatagaatagtcagtcattcaatcggaatgacattccaccaccttaagatacaacaaaacaaataaatggaataaaaataattcattcttcatttcatttccttacctccaactaaacatcacctcgatgttatttcttttgttaaacgatccgagaagaatgcgacacatttagggttttgagtttaagttttgaataaatgctcgttgtttttgctccgttagttgaaggaatctttttttttagaaaatattgtgattgtaattgtattttgtggtggtcaatgcagaaggtgaattgtttccgaggtttggaatatgtctggtggccctggacttgagtctcttgtagatcgtaagtgaatgaattcataataataatccctaatatactcatttgatgttttagaggatttgtagttctttatgtgatcaattaacagaaaaagaaaagaggggcaatggctcaatattgtgttggaaatgatgatacttttgtgaaagtctttgcatttcatttgctttatcattgtgtttgtatatatatttagatttagatagaaacgtagttctcagttcatctcagatcagttgcatttgttagtgtgttctttgtcaaaggttttttttcttgttcttatctgtaatttccatatttgtgcagaaacaatatcggttatcacaaacgatggacgcaatattgtggtaatactatgaactgtattaagactgctattccattctttttttctctttatcttatcaaattgtgatcagtatttgtttctttgtttagggagttttgaaaggcttcgaccaggctacaaatatcattctcgatgaatctcatgaacgggttttctccacaaaggtctgcatttcttttttctttgctaagatgtaaaactatgattctttgtagatctttaccttatttgcaatcacattataactcgtcattgattatgatttgcaggaaggtgttcagcaactagtgctgggtttgtatataatcagaggcgacaacatgtaaagaatctactttgtagtatttcatttctttatcgtcattcttgtatggtaaatttgctgttttctcaaagccatgatactactttgttctacattatgcagaagtattgtcggagaattagatgaagaaattgattcatctgttgactggtcggaaaaaagagctcatcctctaaagcctgtcattcattgagtggcttggaaggcaataaagcattagagctgttgtatgtagattgtctggttgattaccatcccgcgaaagagtttccatggattatagtttgtttatcttgttcattgcttttttctatgagactgttctgattgggatcagaaaaaaggaaaaaagaaagagaagactgtcttcatcccaaattttaccaaatatttaaagctgttttgtgctacattttatattctattttcattggcattggtggtggtggtgtttattttctcatatcagaacaatcaaaattgtaaatgtataaagtacactattaattaattagtcagacaaagaagtgcatttggaaaacattttgctcatacatatatatatatatatattttatataacaagcagatttttgattatagtgcattcaaattgtgtgccaatttgcataatagtttaaattcaattctattcaatttgtaaaagtgcttggttattttggagagattgtaattacagtatcatacctgaaagtgctaattacaatctctttgttaattttcatgtctgaaatcacttgttaataatatattttttttt

SEQ ID NO: 194928 - DNA, 2394 bp, Cannabis indica
tctggttttctcccttctcttcaacatgaccacaccattaactactcatccttcacactgtgttcgatctcaattgcttattcttgatttgtccatggatccctacaaggaaaagatgaaacaacccttgaaactaacagaggatgaagagtttgtatttgatcttactgatatggcaattcttgagcaacaagtcgcctctaactatgtgctatttgctaaagtgcttacgaacaaaaagtctggctttcaacctttaaaaaccagatggcgcaacactgaaatggcagattcccggtaacaattacggaatcttctaaaatgttttctctaagttttagttgtgcaggagacaaaacaagggttttacttcctgaaccatttcactttcaaaaccaccacaatgtgttacattctcctactccaggacaaagtgttcaaccaaaatcactcatctatacaccattttgggttcagatttttcgactaccattccttaacaagactaaagggcttgcaattgcccttggtaacatcattggtgaatatgtggatgtatttgaggactcactcaatgaaggatgggggccatttctgcgcgtaagagtgaaaattgacatcaggaaaccacttttaaggggaagaatgatcactttacagcaagcaaaagaggaattttgggttgaattcaggtatgaacgtttgcctgaatactgtatggaatgttgacgattgggacatccttttgataagtgtttgatctacctcgaaaagttggacaatggtgaagaaccagatttagagtatcggccaacattgaaaggttcaccactcccaatttcaagttatgatcgctataggactgatttttctaaggggaatgcttggccattactcactcgattggcaaaaacctctttgatctcggccattccacatttaacaaatcgaaattctcctcagccaggacacttactcatggctgaattttcacaatcaaatgtcgtttcctctgccatttctactggagtacatatcaactctgtaccatccacacaacataacacaattttccattctggaatggttaatactctgcctactggtgctgttaatacgcctgctaacacagttttcccacccataatcaacttcacaccagcaatacttaacccaaaaacagtcccaaccactaaacatcaaactagcaacatgctacatttttctgcagcaatgtcccagactacttcgaagccaattactactgatagtgtggatgatctttctggggtctttattcctttggcagtaatggatatgctgccaaatgtctttgcaacatatcccccgctaagcccttcacatcaggcctcaactttaaaccaaataaacactccagtgccaaccaagctttacaccaatctgacgccaactgtcagttctagtgcagaaaaacaagtgggaaaggaaaatttatcaccaaatcgatttatcaaaagagcatctgagggtataagtctgaggtaaacactaaagcgatgcaggggtaaccaaccacttttcatttctccgttgtcagaggaaaatgaatcacactttgatgtttccattgatgaaatggattctactggtgtcaatgacaccaacgcggagtctgaatctcagctccacaagcagccatgaaaatcttaagttggaactctcgtggtttggggaacccgagtgctttccgtcatctcaaattgcttgtaaaagagcaatccccgtttgtcttatttctaatggaaactaagttaggtcctaattctatttcccgtttttcgtaatgttttacattttaataacagacttgaagtccctcgtgttggtcttagtggaggtctaatgttgctttggaaagatgatgtaaatgtaactttattaaattataatacaaatatatgtgactgctacatggcttgtggaaatggtccgtcttggcactttactgctttttatggtgcaaagattaaaggatgttgctccattgctaccatggctggtaattggagactttaatgaaatattgtccaatcaaattaagtctggagaggctcttcgtagcaaggcacaaatggacaaatttagacatgttcttgatcgttgtcaactaaatgagcagccctttgaaggtgatccattcacatggatcaaaggaagacttatagttgatacaatcaaggagagactcgactggtgttttgtcaacagaacatggtgtgatacttttcaacaagtccttactcaacaccttgattactatggttctgaccatagagtaatctcggtacaagtgttgcagcactctacaacacaccagcaacaccaaaggcaaacaagattcaggtttgagaa

SEQ ID NO: 194929 - DNA, 1217 bp, Cannabis indica
  modified_base (1205)..(1205): a, c, t, g, unknown or other
caaaaaaaaataaatatacagtgattttacagaactgattctctataccttacctgtatccaatttagggttttttttaaggaaaaaaagaagaaagatttgatttttctgcaatttgtggaaccaaaaatgggggggcgcccaaattgttgtcacatatccttagctttcgttctcaaattcctcaattttcttcaagctttcgtcggtatctccataatactctactccttatggatggtcgatcaatggtacaatcacatccctataaacccaccaccaccacctttggctccttcgccccaagtttctgaacaaatcgctccgtttaagctcgctttcgatttggtttctggattcgatcgcagtttattgcttaatttgcactcccttgatcttccagcaccttggtaaatttttaatttcaccattttttttttgttagaaatcgttaaatttgttgaatttaatgactgatttgattactctgatgctcatttctcgtgcttctgaagattgtcgggtagtataaagtttaatgctttacagttagtttttctttaacttgggtttttgggtattcaatgaatgaaaaataacattaattggattatacacaatattaattatggcacatttttgatgcacaacaaaagttagtatacctgaattttaccatattaataaattgtgggctccatagttgaatttcttctgcaccagaggtgcttttagttttaaaaaaataataaaaaaaaatacaattattgaagtaaaatgaaggagagaattcattagctataaaaagtttagactttgttcatccttctttactataaaaacatttattgtttgctttgcttgctactgattattttgggagtctgtattcttttaattgagttcagtgatctactagtcctatagaaaggggccatttctgattgttgtgataaatatttataagtcagcattatatgattgcttagctgggggtgccttctatggagaaaaatgtcagtgttattagtataagaatttgaatgtcgtttggtttggaacagttattattggcttgatgatttatcaatgttggcaggttcatctactctttcatgggagtggggattcttttgtgctgtatcacttgcataggttgtcagttgcagctgaagcaagttaatggctgctgcctatgttttgtntcctcatcgctt

SEQ ID NO: 194930 - DNA, 2158 bp, Cannabis indica
gcgtccagtaaggtttttaatttgaaagacttagaagaacctgctcttgttaagctcaaagctgagagagacccagataagctatttcagttgtttaaggctaatgcccataataggattgttattgaaaatcggtttatatttgaagatatggtatctcgattagctggggcacggcgttttgactatatagagcatttgctggagcatcagaagactcttcctcagggccggcgtgaagggttcattgtgaggattataatgttgtatggtaaggctggtatgaccaaaaatgctattgatactttttatgatatgcatttgtatggttgtaggagaactgttaaatcttttaatgctgcacttaaggttttgacacagtctcatgatttaagagcaattgaggattttcttagagaggtgccattgaggtttggtattttgttggatgtgttttctattaacattgttattaaagcttattgtgagatgtgtattttggataaagcatatttgataatggtggagatgggaaaggtggggatacagcctgatgttatcacatatacaacattgatgtcagctttttataagtataataggtatgagattggcaatggtttgtggaaccttatggtgctaaggaggtgtatgcctaatattgcaacgtttaatgttagaattcagtatctggttaataagagaagagcatgggaagccaatagagtgatgagtttgatgccgaatattggcattgcaccggacgaggttacctataatttggtgatcaaagggttttgcttagctgggtacatggaaatggctaaaagggtttattctgctttacattccaagggatttaaacccaacataaaaatttatcagactatgattcattatctttgtaaagaaggagattttggtttagcttatacgatgtgcaaagactgcatgcaaaagaattggtttccaaatgtgcttactatccatgccttggttgaaggccttaagaagaatgggcagcttggtaaggctaaggcaattattacattagctcagaaaagggtacctccgttttcttcaaaacaattaggtgctcttcgttctgttttgtccaagcattgaattagatagaagacttttgaagagaaatttctttttttgatgtaacccgggaagctcaacaggagctggtattttttttcccccatttttatttgtaaattttttaaccatttggatatgaactttctggaaatatcacaggaagggcaggcttttttttttccttagtgaatttgttgtaacaccacaataaagtttgtcactaaatgagatttcgcaatagaaattgttctttctgcaataacttactctttccattcattgtgtttcatgcagctcatatgatgaacaatttcctacaagttttatttccttatcatctctttgctctctatggtatactgcagtagagtgctgtagttaccatactcctgtaatattgtactttttattatttaatttataataaaaagtacaatatgaataatcaaagatattatgaactctaaaactttggtctattgccacttcatgtaaagaatcgtcattctgtatttaatcctggtttgttcattcctaggtaagattatgctgtgtacataattatttgtcttatttgattaaagaaaattatctgatcttagacatcaattaattcctgatatattaatgacattttctttccattacaggtttgtttattttatggtggtagttagtttctggtatcttacatgctttgttctgtttcagctttaatggtgaaaaacagaaggatcgaccaagttacaactaccaagtcataatggtaaataattcttttgctgtacttgtagttgtagttgtaggttagatttatttattgttctctctaattcaatatgaaaattggtagatgcatttattttcattggagtttaagctgatgagtttcatgcataataagatctaaaaatggagtttcatccattgactatatgaagttttcatgcatatacagctccactttgaagttatcatttctcgaacattgatcgatagctgttatttgggaagcaagcctggttggggtgcggaaacaacagtcgagttg

SEQ ID NO: 194931 - DNA, 2324 bp, Cannabis indica
ggatgcaggccaaagggggacgccggcacacataattctcaacgtggctcctgtacgtttgcttttgtttatgtaataaaaaatgtaccaataatatataattttatatatgatatgtatgtgtgtgatttctattatagttatatatgtcaacataacacagaagcaatgcttctctatttgttattatagttgggtttgttgtttttctttcatcatttttagctgtaggttgatttaatattcttatttatgcaagtatagaaaaggcctaaaatgagtttgataatgatgagaaacgtctaataatgatgaaaaagcctgaaatccaatccattattcttatcaagcatttttgtgttccttaaccgatggaactttcccactcaacatttgacttctaaagtttatatcttcatataaccgtcctacctaacagacacaagaaaatggcgaagtaaggatacaatataaccatataataaccataacaaaataatttcgtgtgtccaaaaaggaaaactacaactaacaaacgaacaaattgaaagaaaaaaaaaacgaatgagctgaataatatagcaagagcaggtatattaataagaaatgatgagttgaaaaaatagtttcatgtctttacaagctatatcatctctcacttcttaaaaatgtcaccaatgctgattttaactagatatacatcacacaaaactagaagtaacaaggagaaagaatgcctcttttaactaccaaaaatcacaattacattacgccaataagcgactcatcaatgttcagaaaaaatatacaccatatttggacacaacactattaagatatgatcatatatatgactaactaaatgaccacaaaggcctcgaaaatccagtaagatatacataattccatcgtggatcttatacccatcgtcgtgtcatccctatctcaagcttttgatatttattatatcatcctttacaccctaacttgtctgaagatccatagccttgctgttttgtggttactcatcttggctttgattcacttcctttgcctcggaacgaagagagcgagaagaatgagcgtggagctgttaacacaaaaagaaaaaggaaattaagtacaaagttaaaagaattctaggcaatctgtaaacatagaaaggggtaattacttattatgtgaaaaaaagaaaataccatgctcaatgtattcgccttcgttgttgaagctgtcgtcggaaggcccctgaaagaagcccattcttgacttcctcaagtcctctgatgatcgattggcaggatctcggccatcttctgtatcatcatcaccttcagaagtcgtagcagagatccagtcgactaaagtctcagttccacgagtttttcttccaaactttaatagccgtttgaaacctttagtcatgtccttgcgggattgattgtgggatgagttagaagcaataataggcttctgagcacttccccatttcttcctcattctagctgcatcagcctctgtttgagcaagaccatgagaattccaagaagcagggctccaattggagagtccactgaagcatcaatgtcagaggtttcatgtgggtaagaaaatggaaggtgattgcgtgaattccaagaaacagggctttctccaggtgagtcttgaatagaccctacagcatgaaatgctgaaggaatagcagcaggtaattctgcaactgaagcagcttgagaaagtgatcttgtaaaatcaccattatcaaactcagaattaccagacttatcagatccctgactcagccttgattttccattatttgcacaatcattaacctctgttgtttcaatatcaatctcttcgtcttcgtcttcttccttagttacgtccacaaactcatctgcctcagagcccaattcatcaaattcttcattttcgagattttctaatgccaccgaagctttcaacttggcaatactagctccagaaccaggacctatgccattacccttcctaagatatgattttgtctccatgcttttctgaaacttttcatatggactagactcagtttcttctttatcgtatttcaacggtgtcaaaacaacaccttcagagctcaaaggaggcacatctttaatatctgcaggattagcagagcttttcctcaaggactgggatcgccttggcttctcctccttgaaacttggtgcttcttcaatggtactcctgttgcgggcataggttctcacctgtgaacgcgttggcttgctgactccagaagcaggcttcgtgttttcttttctgaaatcagagaagtttgg

SEQ ID NO: 194932 - DNA, 2244 bp, Cannabis indica
gttatggaaaactgcaaactatttagaggatgccatcttagtggtgcctcgtaacaatgatctttgaaaaagagtgcttgaaaaaaaaagctaaaaataaaataaagataaaaagggagagaattataatgatggtccttaaagaccaatgaagaaagcaaaatcataatcttaaagatgctttgtaaatgaatgaatataggtgcttttgtttttctaaaaagacatttttgtgagcaccaagagaatttcttctcttttctctctctctctctcttatttttccccactagaagcacaataagacatgacagttcgtacccaaagttctttggaatttaacaatttattgagacacctatttttgtcttgatctcaagaaacaatggagttcactgaaaccagctatggctaattagaatagagatgtctatacctgcggctctcctataccagcatagatataccaatcaaaacctgagctggctaataactaaccctacactacattattcttctgaatggttattcaaaaatgataagctggtctatttcatagaataatttctttgttgaaagagtgaaccataacaaaactactattgtcagatcctagatcgatatctctaacctgcatgcataaattgacttcaaccatacaatattctatattaagtttgactagcttaaagggtgtcattttcagatagctacaagcactggaagaccctgtggtgtattttccattgtgaaaaagtgtaaaacaatatacgaaccactattataaggataggattaaggagtacctgaacctaatactacatgacaaacagttcggcaccgcctttctttccacctagctcaatttaagcttattgagaaaatgaactgcatatgatatccagttaagagaatatataaagtggacatgaacaaaaaactaattcactaaagtaactttctgtataaacttcacactgaagtttggtaaagttaatcttccaattaatgggtgaaaattgacagtactattaaggaatgaagtctattgattgttcatttcaagcattatgacttacatgcatctgtaaatatttctctttgccatacctgaaaaatagtatatgacaaagataactttataagatgtatttttattaaccgttttctaagataggcatcatactgattggaaatggtcatcaggacgatgcattgctgccatctaacgtcagtaacaccttgtataattctggacgtcgatcacgaaatattccccaactgtgtctttttgacttgatttgatccaaatcaaattgtgctatgagaacagcttcgtctttatcatcagcagctgcaacgatttctcctgtcggtcctgttatgaatgtatgaagacttgttaatatgtaatatacaaagaaggcataagaatacgccaacaaaccaacgaatgatacctgctatgaatgagtttccgtaaaactttatttcactttttccatgctctgtctcgattacctccttgccaatgcgattcgaagcaactagaggaacctgaggtcatcaacaacaaataaattcctatttgcttcaaattttcaaacagaaatgacaccaaaacatgccataattttgtcaaaaaaattctcaattatgtttcacttcaatttatattataaccctagaccatgtaaaaggtgacattgaatactctatttactattccattagccaaacttcataaatagttctttttattgtacttcctaattatagcttttaattttaatagagagaagtatcaagtatgtcaagtcactttttcccctcatttgattggtggcatccacaattaaagatgctattggtttcaggaaaatacaaatgaagttttgcgcaagaaaaatactgttttgacttaaaaccgagctggtgcattatacataaggagctaagactcaaatcattaatctatcattgtcattaattctactatattatgggaaaaattactgtccctgtttaagctgagttaatttgtgttacaggataaaataggcaggggcacttcagtctttatggtctccaagttgttggaaaatggcaatccctatgcatatcacagctgtcaattccttaccgttagcacagattttttagagattctatttctgttatgcaatgattgtaatgattggttgtattgattagctccacgtgtaaggctcagtattttagcca

SEQ ID NO: 194933 - DNA, 2645 bp, Cannabis indica
gttatggagcgtgacatgaaagctgttagtgaaggtgcaaaaagcaaagatgaagttttagaaacttgtttgcatcagatgaaatcctgctttttagatgtaagtacattgttggtatctctgtggctgtatgtttctcttcagttcctgttgtgttccgctctgactttgatttcctggatgtggttcatagctttgtgaagttgcttttttgcattgatgaaattaagagactgatataatcacctaacccatgttgatgtttattattattgtagtctttagtcaggcaaactaactcttttttatgttgacagtctcgtatcatctctaagattttaaggatcattacaattaattcaggaccacacggacgtcacactggtctaagcttgatttatgagaaaattataattagaaatgacgtattatatgtattagaagtaattgaagacgatttgctttttaccgtggttttgggaaaattgacgtattgggttatggagttctaaaagttctagttttttatttttgaaggatttgggtatggtgtcagctatatgatcaatatgcttattattcaatgtggaaacctactacagtagtttcttatgttttctgggcagtcagtaacttaggagacaaggttttaagtttacattgtagagttttttgttttcttaactggtaagtatatgtaactcttgtgtctgctgaattgctttgttaccacgttacttatgacatattctccttcctttcttttcactcctagtactcttgaaatatttgagtgaaaatttatcttttgtttcttatatgcaaatatgggggcattacaatctgtgaactcatcgtttatttttagtgattgagagttcgccttaaagagaagctcctccagttcatctttacgggaactgaaaataaactggggtgtttgcaccttgcgcggactttctcttctatctaattccatgttcattaatattcacaacatcagtttatctttgcaggaactgaaaataaattgggttgtttgtaccatgtgcagactttctcttatatctaattcccatgttaattaatattcacaacatcagttatgtcattataacatttggcatatttgcaggcaaggctgaacaaagttaaactcttgcaagccatggaaattttctttgagaggtgattttatattattgtttgcaagtgttgtaacataacctttgtattcctaagcttgacacatacattttatctttcacacagatctaatagacctgctggagaggagcagcatacatctagagaagttatccgaccgtgtggactttgccaggaatcaaacatggtgcttaaacaaaaccgggtaatgtgttttgatgtgactttctttaaatcgagtttctagcttgtgattgtgttttatttctgcccaagagcttgcattattccacatctcaaaacgttgtcagagttcgcttgtgattgtttcctcctttaactatccagtcttcttttgctctcatgattgtatgatttggtgtgaagcataggtccttttttttcgctgaaatataattaagctcctcaccactggccaattgaacagtgaatattttttgaaaaaagagaaagaggtcacttgtctaagactgaccccacccccgaaaagttattgaaaccctcacttgaggcggaggaataccatgcatacaaaagctttagctcaaaacgaactaaaacaaaacagcaccagaacagtacaaataatatactgaagttcaaatgccccactaagatttaaattacaacaaagatctccattctctacttaagtctaagaaggaaaaatgctcaaaaagcttagtcttatacaccgagctgtccacagtcttatcttatccgaaagatcatagtcttcagcattgttaggatcttacttgaatttaaggatattccttgtttctttacactttacactttttaaactaatttggttcttatactctattaattaaaatattgcaaatttccaatgtttaagccaaagtatcaaaattttcaccactgaagtgtaaaactttttttttttttcttagaattttggagaaatattgaggatatattaaaaaaatgtcaatggcttattgatttcagtatagtattggttgaactgtgatattcttccaaaatttcttcatatattaaatgtgtctatttaatagaaattattggtttaacgggttttttctattatttattttttcattaaagttaacggttaaaactaacattgttaatcaatcaattaattatttgtttttcttttaaaaaatagttgtaaatttaaatttaatttaaaattatctatataattagataattattttttatgtaaattttaatttaaatttgaattagacgttaattcaattaattaatcatactttataacaaatttataaattatattatttaattaattaattatatttcataacaaatttattagttatattatttaattaattaatcatactttataacaaatttataagttatattatttaaaatatctaaacttatttatttattttattgtttaataaaatggtgaatactattttgtacactatgtt

SEQ ID NO: 194934 - DNA, 1492 bp, Cannabis indica
cttaatctttcaggggagattggttgttcaagtaagttattaaatggtccattcttttttgttatcatagatcattaatgtcaatttaatcaacctttttgcctactgcatattattagatcctgggcgagagaaagttgttgctccaattatcagattcagagatgccaattcattgtctcgttcatcagcagttttgttgtctcttaatgaaattcaggatttctttatcaggttgttctatcagttctttctaattggttagttggtttgtttgatagcaaggcaagatgttcaaacaaaccggaaaatgaaaatagattttcaaaatctttccttttcaaaaagaagaaatcattcatgtagtaaaatccctagaatctttcaacagaactgtaggagatgcaagttttatggagtatatatttgtttgtatccttacatatggaagacaaacactttctctcaataaagttgtgatgtggatatcacttttagctgccttactttttgaagtggtgcttacgtgttagatatcatgtcctgtttcagagtctccactgattcaacttttgctagaaacgtgggtggtgttttagttgaatcaaaagccgacttccaaaatatgtcaaaaggtgagatacagttatccatttaaatagcacattcacaatggttcctatcctgtcgtttaaaatatatttccaaaccctaccttttctattgtgcatactttataatagtacacactgtatatcagttagtttatctattttattctttgtgtcatttaaatattgtatttgttaatctttttattcatttaaaaaaaaacaaatataaagaaagaaggaacgtaggcaaaagaaactaattaaagatccttaatagtatttttataaatgtagaaaaatggcatagcgaaatgtaattttttggatattacaaatctgatggagtgcaattttaacaaaagaacgtaatttttttgtatattacaaatctggagtgcgattttaacaaaaaagatctttatattttaaagaagattctattatacaaaagctatggtgggtgctcgtgtattcttattataaaatcatacactgctctaaattttttctcatacctgataaatgcactttcatttgtaggattctctccagctcatacgttccctcaagctgaattttctccttacaaaaacaccaactacaagtggaaccctattgtatgttatttttcctctatcaaaaagcttacatgtttgtgaactctaaaataaattattaatgtggtacatgctgtagtagtcattactatataaacttgtttgttggttgtttgcgaagatgctgctttgtacttgaaatgaatagtattaaattactcctttcttttattagtgtatctgatttcaagatttctgtaatactctgtcaaacccaaaatgcctctcaattccttgagagattgggcaagttattcattg

SEQ ID NO: 194935 - DNA, 3772 bp, Cannabis indica
agaccaaaataccacactcggccaatctcagttagttggactctataaatccggtccctccgtcccctcaaatgacattgtgcccgaagctcaactcccaatagctccccctccccaaaccgaaaccaacacaccaacttttacagctcttttaagcgccaccatgagtaccactagtacccaaacagcccctcaagcctcggcttctagcctctcctctaactcgcaaagctcaagtacctccaaagccattagtaccaagcattgcaatgttcctctcccaatccacattccgctccttgatactagtaagagactggaggctatgaacttgcactaccatcctgggacggccactccatccagttccgcgggcaaacagaagaaaaacaaagtcaaagtgaaagaaaggtttaaacgacaagccgaaatggtcaatggagagcttcgccaaactgtcaagcgctctcgctccgagagctataccgagcctggaaactcccctgatagcgcaggcctggccttcgagcaggcctgcctgcagccatgaagcttctcagctggaatgctcgcggtattgggagtgaacgagcattccgaaacctctcccgtttagtttcttcttgtaaaccggacattttgtttgttatggagtcaagactagttaaaaatgctgttgacaatcttcgaattaaattaaaatttgactctggtctggaagtccctagaataggtagaggcggtggccttcttttgttatggaacaatgatgtaactttaactttgctgtctcaatccatcagtcattttgattgttatgtctcgtttcctgttgataataagttttttcatcttacgtgtttttatggtccccattcgtagcccaaaggcctcatacttggcgaattttaaataggatcggggataataatcctactgatccttggcttataattggggactttaatgcgttcctcagtttggatgacaagcaaggcggaaatcctgaccgaggtccttccatggactttcgacgccttcttgattccttcaatttagcccctattgaccccaaaggaccccttctcacatggaacaatcatgttgctgcccccaaaaacatccaacaacgaatagattggtgcgttgttaaccccgtgtggactaacctttttccggacgctcttctttcccatttaggtttctttggttccgaccatcgcgctcttgaacttaccacggaaggaacatccaagcctcctcaggaccacggtcagaaacgtttcctttttgaaaatgtctggctttcagagcccaaatgggatgatgttgcgcttttggcttggaagtgcccaactcataatcttgagatcattcctcgtttggttgccactcaatcaaattgcgctgcccatctaaacgactggaatcacaagaaaaatttccacttcaaaaatcgcatttctagcctcgaaaaagaactggagcaagctaagaatagctcgaattgggatctcgatacggtgaacaaaattaaaagtctccactctcatttggatgctcttctttacaaggaggaaacctattggaaacaaagatcgagaacccagtggttagcccagggggacaaaaacacaaaattctttcaccgtcatgcatcccacagaaggcgaataaataggattcttaagcttcataattccagtggcactctcctttccaaggaagaggacatcaatcacgaaattgaatcctttttccaagcgctctttacatccaccaatccttctaattccgacatgcatctggcccttgagggtatcgactcgcgcttgactgataatgacaaatctctgcttgatgaaattttcacggtggatgaaattgaaaaagctttcttccagcttccggctgacaaagctcctggtattgatggcttcaattctaatttctacaaagccaattggtctctcgtgaaaaatgatgtcatctcagctgctctcagtttcctgaatgagaatggtgacatcagccctctcaacactaccctcatcacccttattccgaaagtgaagcagcctctttcggtgaaggattttagacccataagcctttgtactatcatttacaaaattatctccaagaccattgcaaataggcttaagctagtcttaaataagctgatttcttctaatcagagtgctttccttcctggtaggctcatctcggacaatatcattattgcccaggaagtagctcacaccatcaaactcaaatcccaagggagaaaaggttggatggctcttaagcttgatatggctaaagcctttgacagggtcgaatgggcctttcttagtgctatcttaaagaaaatggactttcccccgcgtttctctaggcttatcgttgattgcattacgaccgccactttcaagatgaatgttaacggtaaagtctttggccatatcactcccacccgtggtattcgacaaggggaccctctctccccctatcttttcttgctctgtgctgagggtttatcttctatcattcggcaatttgaacgaactggggatttatctggatttaaagttgcccgcagagctcctccaatctcgcaccttctttttgctgatgacagttttctcttttgtcgagcctctataacatcctgcaacgcgattaaggaggtcctaagcttgtatgatcgggccacgggacaaaaagtgaattttgataaatcttccttgtatttctccccaaatgttaccctcacggaccagactttaatttcggattacatgcatattcccgtgaaatcatcttttgagaaatacttgggactcccacaacacattggccgaacgaaaaaacaagtctttcattatctccacgacaaagtttgggctcacctcaacaactggaagcataaagttttctcaaaaggaggcaaggaaatccttcttaagtctgtaattcaagcaatccccacctacacaatggcctgctttcgccttcctgtctccacttgtcgttcccttgaatccatcatggctaacttctggtgggggttcaatgagaacaaccgacccaaaattcactggcaaagctggcctaagctctgcaagtctaagaagcatggtgggctcggctttcgctccctcgttcacttcaatcaggctctgcttgctaaacaagcctggcgcatcctcaagcacccaaactcaatggtggcccaaatcctcgcggcaagataccacccgaactccagttttatgacctgctctctcgggcactacccctcttttgtttggcgtagcattttttggggaaaagagttattacataagggtctaatttccaaaataggcaatgggcagaacacctctactactcttgacaactggattcctgggcataacagagtcacccctataggtccaatcccagatcgagtgtcctcctttatttcacccaatatgacctgggaccttcctagtcttcagagctgttttccgtcttatattgtccaagaaatcctaaccattcctctacccttatcgcccatgaatgacaacctgatctggaagctcactaagtctggaacctattctgtcaagtcaggttatcatcttagtttttcctcgacctcgcctcctgatatcccctccccttcctccccatctccctggtggaaaaacttatggcttttgcatgttccacccaaggtcaagcattttgtctaccgtgcgtccaccaataccctcccaac

SEQ ID NO: 194936 - DNA, 2557 bp, Cannabis indica
cttaatcattcaaaattattagtttttttcttagtttgtaagattttaattaatagttttgagaaagttttaaaaaaaaatgaattacttatagttttttcagaggagatacaattttattattgtcaaagtttatgagctaaaaatactataatttacaatgattggtgagcatttaaacaacaaaatagaatacaacctaactaaaagaagtttttctataaatataaaagttaacataaaaatatttatatatatatattgacattcgaagaagcagagctagtaaggctcctacggggcctttccccctacctctcccaaaatattaagaaaaaaatttacataataattttatactgaaaattttaattttttaaatggctttgtccctaggcagaggggagattgaactagggacctcctttttgtgaggagaagtgtgaaaccactatgcactattaaaaatagagccttaagtatagttttttcgtccctttagtttttgtgttggagaaactcgcaatagtaggctttgcagacgcatttaaagggaattcgggtaattgaagacataagggtctcatatgtcttcacttattatataataactaaagtcataggatcttcgcatatgcagaagaaatcccatattgccttggttattacataataacaaaagcctaatgttcagtacaccttcagtattttgtctaattaccgaagctgtagttcttttgtataatttttatttaaaatttaattttatttgattcatatatattaataaatttaaattaattatatatcctatataataagaataaatagaaattaaattgacaagataaatatatatatttaatacatttagatttaagtatatattctatataataattataaatgaaaattaatttaataagttaaataaatatttatagcaatatttacattattctaagtaaatgtattttaaaattattctaagtgcttaagagttatctaaatatgaaaaaaaaaattcttatataagtgttctaatcattaaaaataccctaatcaactttattaaccattcttgttgtaacggtagcaagtcctttttgcatcttattgcaaaaatgtcctaaacttttaaaagaataattaaatatttattagtacatatatattatatagtttgttaatattataaataagagaattaataaaaaattacttttttgctttctacgaatttgcaagcgtttgtagattttacatgtcattaatgtatttcaagatataaaaactacattcttaattttttggttgttttagacaaactgcttttgctattcctggagatggctcgagtaactcattgttaccttgatctttttgtatgcgttgttgtaaaaattgtattattagtttaatttgttaacataacttatctatttttttatagagagtaattgaattattaccacttcaacatattattaatatctttgggacattcatggtccttcagatgggctcaaatgtataatctttccaggtgttattcacgttttcaacattggacacgtggaatccaggtcagcattcaaggcccatcagtgggaccctcagcaaaagtatagtgggccaagcccatttggataagtccttccaagaacgtatcccaactcttcaattataaagcctttcgccttcggtgggccgtaaccaaaagcatgttcgttaccatgagaccagagggacaagacactgtgttttcagaagaccattctagcttcccttcttattccttcacacaaataaggatattccagctgccagatcacattagaatatcttatcaggattaatggagaaactttctataatgaatattaagaaattaatctatagattgatttcccataatcaaagcacacggtgttgaccaaatcatgccaaattcaatccgccaagttagcagattgtctccttcatgggcaggacctcgtgagatagcctaagtgtattatttactataaaaacccaaaaaaaaaaaaaaaaaaaatagatgtaactctcaaattactataaatacccatcaaatcctataaattaagggttgaattctcttgcatactttgctcaagaaaacttgagaacgtacattctttgtatcctcgaaggctttttcaatctataagaactactaaataatattgagtcgtagactaatggtaactaacaccataaccacgtaaaaactgtttgtctcttatactctttctatttaaattatttgtttcttcagctcttatcatttatattctattccgtaaatcttgataaatatttttctacattcattaagagctaaagaatctagtgagaccacttgcaaattactttcaagtaatcatggcctcacccgaaccaagtcttgtctttgtttcactggtcatggtgccatagctggagactctaacgatccctaagaggtgactagacataaaaaagtataccaggacgaatattagaatcaagatgatcttatcatcgatgacgcaaa

SEQ ID NO: 194937 - DNA, 1760 bp, Cannabis indica
tctcttttcagaacccaaattgaaaagtctctttactttccaaaccaaaggcgaagacctcatggctcgctcggctgacaatctcgaagccaagtcaaatgagaaggcgaattctgacatgggaacagaagaaatcgcttccagacgaatcggatcgagcccgaacgagaatcgacatatggtgtcaaaggagaatcggcgaaacacttcttgtaagtccagaaattccgaggtctgtacggacgaaacgagaatcgggacgagacgagcttgaatctcgctattgataatctcaaaagcgaaagatttaatggaatatctatggagttggagacttgacatctttctttggaacctccaaagctctccgtcgacgttgaatatgccttgacctagaaaatctcctaatattgcagagaagggcttcccttttgggaaattttcaaaacgggtcttcaacatgtactccacgttttccgggttagccgttatggtgttgcccagtacgtgtatgtggattgttttggtttgagattttatgaggagatgtgtgtaccaatcgcagagattgacgaattggtttgaccaactcgacgttaaataactctggcatattttgcaattacaccatagttttggcctcactattaattggaatattgttattatggtcgtgactattaataataacgaaacgagaagagataaagttgtactgaaaaatagagagaataatgatgaaaagaatgggaagaagagaatttcaaattccgccatagatgatagtactataaacatggatattgagaaaaagtagtgagaaggagaaagagaagatcatgataataaataataaaaaaagaaggagggtgagtgagtgagtgtgatgagagggacaagagggcatattgaattaaaaaataaataaataaataaataattattactttcttttttgttattttcttgaaattattaacagtactgtactgtttgagtcagtgtgagatttttttttttcagctttatcacctggctataatgaaaagatatataaaaaattatcaataaaaatgtttgaattgaaataaaataaagaccatgtagaacccgtgtggaaaaaggcagaaaaaaatacttatacttataatacttctactgataataataaattataaataattaattatatagcatatatactagaggcatcttttgttcctgctcataactaagttagagtcaagttagataatttaatggattgtatttattcacccacgtgcttttattcgcttgtccgtactgcatgttttattatttacaaatttaacttaaagcctaaatattgggccaataattacatgttaatattattgtattttgccccacttataaaaaataaaagatggaataaacaaaaacatattgccaattttaaccaaaaaatattgggacaacaagtaccttcttataattatatttaacaaaacgtttaacaaaaaaaaaaaaaaaaacaaaaaataacaaaaaacaaagaaaaaaaaaaaaaaaaacaaaaagaaaaacaagtatatataaaattataaaaattagggcacgtctttttgtatggccccgtttatgtatgtaaatggtaatatattatcaaatttacattgtgcttgctgaaagtgaataaattaattttacatttttttatggccccgggttgatatatgtaatagggtttggaataaaagccatatccacagtagtac

SEQ ID NO: 194938 - DNA, 973 bp, Cannabis indica
ttttttttttctctcataggaaaagttgaaggtttttggacttagaataaagggagttaaataaagagaacagattctatataccataagctgctatagtagtataaatatatatatttactaaattcttttttttttttgtgatatttagtagaagaattttttacaaaactttatgtgggcaagtgacaaatttagaggaccctgaaaattaagctttcgaaatatgattgtaaagagaaacccatatgctcgtggggttaccctgaaaagtttatatagcctatatatatatatttatatatactacttataataaaggtttcaaaagctaaaatgataaatatggttcatttttcagatacgatttttgattttatgctgaatgcaagacagcatatcaactctctctggtccttcttctactcattgttcaaatttgttaatgagaaagatatatatatttatgtaatatttttttttctcttatatattaaaaatcatatattaattttaaacatatgtcatataaatatatatagtaataatgtaacttcaattctacattctcatctcatcttgtaaatcttttaacttttgtaatacgcatattattattttagttattatcaaatcaatgtgatcacaacattagtttatatatatatatattctttttaatcattttatttacacataacaaatttagattcaccatatatgactcctagtttccaaccaccaatgtggtcaaatatttaggattgtttatataatttgtaatgtgtgattctacaccccaactaatttgagtctggaccaaataaattcagagtgaatggtttcatcaagctgatactgtttacaattctctaattcattcacgattttaaaattcttagcagtggttagaaccaagcgaatttgtataattctcttattatacttaatgttatatagtgattttacaaaa

SEQ ID NO: 194939 - DNA, 1787 bp, Cannabis indica
gaccaagcctccaaatggccttgatcctattcctaccattaataaagttctacaaaattgaccctgatcctaaccctaaccctagccctaaacataatattgttatcgttttgggggtctaaacacaatatgtctcccattttgtaacttatttcttacttaactgaccaatttccatccttaattcatgtttagattaagtaaaacaaacctttttttaaacttcacattaccacttttctcttcttctttcccggaccacacataataataaaatgaaaattccccacataccatatatatatatatatatattgtacaaagttatattaattgtgaacaatcccatcacctatatacatctttttttccctacaaaacccttattttctggaactatgccggatattcatttcatgttacaaatactttaatagtattattactatatttattttattcactatatatgaatatttattgctaaaaagatgtggcaagtgggacttcaatagttcaattaaagcacacagcacttatagcttctttctattctatttgtgtcaataatgattattattatgaaacctaattgatggctttccgcactactatgagtatgactatgcataatgaatagaaaaactatttcatgtttgctttaaatatttatcttttaaaatttgaagatgaaagattgtacttaagactttaagagattaattatattattatttgagtatggtttaattattatagacttagggttgaaaatgttaatgattttgtgagtgtttttgttgttattgttgagtaaagtccctttctgatgatcactattgttggccttgaggatctggtgactaatatcactatcaatgaccaaattacaagtagacaagccacctgaaagatatgtttaataaataaaataaaataaataaatatatatatcaaaattttcttggaattcaatcatccatagcccataaatgtggactagttgttcactttcttcaccagttgatcttctttcctgttagaaatttttgatcaattgctctatatatttgaagttctttcaaaaaagaataattactcagcagtggacgtgactttttcttttctttcagtatatgatatgatacagatgtaatgtgaatttgaaaaaaattatcaataatttcggtttacgttaaaattttctttttatcgatgcttccttaaaattaaactaaaaatagctcacactagaaaattttacatgcttgaatttgcccaaatataacaattgcgtggccgtatatttatttttactatttcatatttgggtttattcatttatacattcaaagtatttttttttttcatttatacaataaactgatataatttacaaatatacgatactttagtaaatgtcctaatcgtaacacacacagtcagtgacagacccagaaattttactttgtgaggacttacttatttatcattacaaaaatatttatgcttatagtataatcacttttaataaatttatttaattttgtaaggatttttttttactattttggtctataattatcaaataaaaaaaattacatttaatgttttaaaagacaatatttttgttagtggaggctttgtccctgcacatagcaattcaaatcgcaactcaactcaaatcacaatccaaattgtaactcaagttgtaacctaaacttgcaacccaactccaatttgcaatccacacagcaatccaaactaaacaaaaaaaaaaaaaaacg

SEQ ID NO: 194940 - DNA, 2894 bp, Cannabis indica
ataatattgtctaaaaacccctctagatggtgattattttttgtttatcaatcttgaattaccacatcataagttattgttgttagaaattttttattctaacaattattgtggtatgaactttaattgaaaatcctacttatacaaatgtaaggtctcagtttccgaactcactacttattatgtgaaatcagggccgaccctgagcataggcgggctaggcctatgcctaaggcccacctagattaggggcccaaaattttttttatcctttttaattacatattttttttttatcaattttgaaaaatatcatattttttttttaaaatgagggcccaaaaatattttttttccctatggcccactaaatttcagggctggctggccctgtatgaaatacagtaaatctatctaaagatattagtaaacaatgttgtaagattttattgatgatcaatagtggtatatatatatacacaaccttgtatataacattgactccataatatgaataatagaattagttaaaataactaactatatagctaacttgacatgtgacaaaataacttaacaatacaaagctatatctaagactttccctcaagatcatgtgtaaagattggtagcactcatcttggacaataatgtgtgaaactgagtagggaaaagagcattattggtcatgatatctgcagtgttgtgtcaaggaggaacgtaagagagtttgatgcgatttttgttgacttgttctcagacaatatgacagtcaatgtcaacgtatttggtacgcttgtagaagacaacattttcagatatgtgtattgcagattgattgtcacaatagatgattgttggttgaatttgtgagatgccaaaatcagatagaatgttgtggagccatagtatttttacaagtggtgttagcaagggatcgatattcaacttctgcagaagattttgaaacagtggactgtttctttaatttccaaaagatgagggactggccaaggaagatgcaaaaacctgtgatggagcgtcttgtgtatggacatgtatcccaatctgcatcaacgaatgcttggaggtggaataatcaatctgtagagagttgagatgagttgttggaatgaaagatgagcccttgtccaagagtgcttttgaggtactaggcaattcgataagcagtcttgaggtgaggttttctcgggtcactgatataccgacttactcaaatgacagcaaatgctatgtcaagccaagtgatggtgaggaagagaagctttccaatgaggctttgataagaagtgacatcatttacagggggtccaacatctttactgtgagagatgttgacatccataggtgtgaaaacactttggatccaagaaggcctgtttcagtaagtaattgtattgtgaagggtctttgtgagacaaaaatgcatgcttttgatctggcaatctcaagtccaaggaagaatctcagatgtccaaggtcttttaattaaaatttggaattgagaaagattttaaaagttgttacatcagagtcacttgtgcttgtaattattatgttatcgacatagactaataaggcgagaaaacttgttggagatttttttgatgaataaagagtgatcaaatgcagatttttgaaaaccgtgttcaagcaaagtagtgctaagtttggaaaatcattgacgagatacttgcttaaggccataaaggcttttatgtagtaggcatacagtgttgggaggtagctccccctcatgtatgtattcctggggagtgtcatgtaaacctgctctttgagatcaccatgcaaagtgtagtgaccaattgttgatagcagcaagtgctaagaaaagtttaagtgtgttgtaggagtgttcataaaaatcgataaaccgaaaccgatcatcaaaccgaccagactgtaaccgaattttcggttccacgtcatcaccgaatttggcagtcggtttcggtttcaatttttttgacatggtggttggtttcggtttttgaaattaaaaaatagttaaaccaaaaaactgccaaaaatcgcaataaatcgcccaaaactgccaaaaattgccaaaccgaaaactggcaaaaatcgtacggtcaattttatacggttataatttttaaacggtcggttacggtttttgtaaaataaaaatcgtaaccgaccgatcggttataaaattgtataaaccgaccataaccgaccgattttcacccctagtgtgttgaacttagcaacaagggcaaaggtctcaacataattgagaccatgttgttgtgaatatcctttagcaacaagacgtgtcttatatttgtcaacttcatctttggagttatatttgattttataggcccatttgttaccaattgattgacatctaggtggtaatgagattactgtccagattttatttttcttaagggcaaagaattctgtgtccatggcttttaaccattgagcaaattttgatgcatgtttgaatgtagttggttcaaattcaatgtaagcatgtaatatagcatttcgaaatggaacgctcaacctgtcataactaaggtattcaaatttatagtctttaaggtgactaggtttagatgtttgtcgatatgcttttgtagtttgagggtcttgaatgaccttagggggaatcattattgtagcaggggccattattggtttatgaattggttcagttggtggtttattgtgcaacaattgaaaatgtgttaaatgttgcagcaaaggagtaggggttcgattaatcaaatagacaacaatatttataagatgtggccaatataccaagactatggaagactgaaaagccaaggtacgagccacatttaaaatctgtt

SEQ ID NO: 194941 - DNA, 3034 bp, Cannabis indica
ccttatttttgtaatagtaatttcgtaacctactgtaaaataattttataaacaggggatccccgtattatgacatttagtatgaaagttttattttaacctaatcataagcttttaattaaaccacactttgttttctaaactaatagattacgagaaataagtttgtaaaagcacacacgtggcgtccctgagggtcagggcgttacatattctctccttattcttctaactctccaagtattagacatcatcccctcaaatcaaattcaatataccattatcccactcaaagtcagagtggtcgttacccgcagcttcccatcgagcaataacttctaatgaaaaaatggtaggtgaccacacacgtatttgggtacacctttggaaaaaagtgttgtttcctcctcatcaagtaaaatgccgcatctaaattttaaaacataaaaataaactgtcagagattaaataaaaaagataaaaaaagtcttcaaaaaccaaaagcgttaatgaactgtggtgctgggaatagatgttgacgggggcatggatgttgacgagggaataaattttgatgtgggaacagaatgggtctctggtggtggtgtatcctctctgaagattcagggtgcgtccacccgctcttccaatgtttgttcaagcttctcggtctggttacgcaaactgtcccgagtaggttatccatcactacccaacaccagttcttctaaatccacaaatagaggcgcctcacctccagtgacgttcctaaaaaactcttgttcattggatcatggatataaaatggagtacattgtcaactccaaataagaacaaaactattattacactgagatcaaaatgaaataaagaaataaatgtgactaaacataaaaaattaaaaaacttacgtttttgcaaacaaattaatgacttcctccttgccaagtgccacgtccttactctcccagttgaccattctgggaaagcgatgtgattttctgatcgcaaatttctcaccaagctccaagatggactcgtaagtccaataatgcaacgctacagtatatccataggccgagtacttcagctccttctaagtaatttccttttaaatcatcctatttatatgcttcttcttttctacgaagtctctactccaagttactcttaacaagttaaaagaaatcttcccctacgagtactcgtagaagaactgaaggtcgtcagccattctaataataaatggtggaacgagggtcttctcctctttcccagtgagaacacccataaaaaataagaccatctttaacttgtacgcatcatccttctctgtgcaactctcaaagacgctgcacagttggcctaagccgatggatggatccccattgaagtactcgactatcaatcggtccaaagtcgacttctcttcaattttggactcagtaggtccagataacaagtttagccctgtcaccagagcgaactcaactcggctgaatcgacatctcttttttgcaatgcaaaagtgcattccatctaccttatccgacttgatcttatgcatgaacaactgatggataagtgcacccaaaaactgtaatggctttctctcaaagaattacttgaaagggatttctccttcaccctttccaacaattataactttgtaaatttcgatcttatccggggtaataccaactaccgccccgctaagtgacatgaccggtgtaatggtctgacactaaaagtaaaaggcgtggagctctggaagactgcaaaaaaacacacaaaagtaaaagttagaaattctgtgcaaaggcattggaccaccatcggacagtatattgggtctaaaacaaataaaataaaatgaacacctcaaccctacatcgaaactatcgggccctatgtcgaacctatcggtatctaacaaaaacataaaatttaataagacaatcgagccttatatcggacctatcaggccctcaactaaacataaaaaaatgagaacaatcaggacctatgtcaggccctatatcagacctattaggccctactaaacacataaaattttgcaagacatgttgagccctatatcgggcgctatatcaggcctattagtaacctaaacataaaaaaataagaagctatcgagtctactatcgggccctaacctaaactttaaatttttgagaaactatgggtcccattatcgagccctacatcaaacctattggactattgtcttcaacatttagacctttcaacaaaacaaaactcttgggcctgaatctgacctgcatcaggccaaaatcacaaattctcgcccaaaacacattttctcgtctaaaaatctcaaaagtcacagattctcacctaaaaacctcaaaaatcacatattctctcctaaaaacctcaaaaatgacagacctaaccctaactctaaatgctttaaccgtaaatcaagaaaaaataaaactattaaagttcaaaaaaacatgaaaatgaatattacctttaatgacgacattgtcggtgttagtttcgtgggtcgtgtcttcacggtggtccgtgggtagttggtcgcgaggtcgaggtggtctgcgagtcgactcctctgggtaagtttacggagaacgagagagaaaatgggagaagagagagagaaagacagtcgtttgaaatgagagagatagaattgagttttttgaattgttaacttattctaccaatataggttaaccttggtttaaggaattcatttcttccaataaatgcatagaaagttaaatttctctttctttattcatttatcttttattaatatagtaataaatatttattttcatgatattttattttattttaaggtcttttttatttttacacttctaaatattttttttttgcatttttacgaaattctatataaaaactcctattgcaactagcgctgcaacctaaatcacaacaaaaaatcgtatagaaacccctattttaaactagccccgcaaccactttagaaacccaa

SEQ ID NO: 194942 - DNA, 3375 bp, Cannabis indica
aaatttaatctttgttgattttccaaaaacacactgttcacacagatccatatcagtgatctgatccttcccaaacactcctttcttactcagatattttagaccaccaagactgatatggccaagccttctgtgccaaatcattgttgatatgttgttatctggagtggtggaattaacatgtttcttggctgaagatccattcaatatatagataccattcctactaactctagtcatgattgtcataggtccttttattaccttcaacgtaccattttcaaccttaacaaagcaaccatcttgatccatcatagcaactgagatcaaatctcttttcatatttggtacatgtcgaacatgccttaattccgtaacatttcctccatctagattcagcatgacagtatcgattatccccaagttttatagtactagttttaacagttgaataacttgaaatctggcttctatttggacagatttgaaaagaacaacctgagtcaattatctaagcaccttctgatccattcttggagattgtcaaaacactagcattgtcgtatccatcagtgccttctccatctgaaactacatcagcatcaccatctttcttggaattttagttctttggacaaggcaatctcttcttagatgtgtagttttgttacatacaaagcatctcttcttgaacttggaattatggttgcctttattcgaattgttctgtcccttacttttcttctttggagttttacctctgatgaacaaaccattcccagcaccttcttcttgttgttctaactttctctttaattcttttgacattaatgcattctgaacttcctctaatgtcaatgaatccttactatacaccatggtatccaaaaaaatctcatagctttttgtgggaagagaattcagtacaatgattgcttgatcctcatcctcgattgtgatccctatattctctaaatcgagtatcaccttattgaaattatcaagatgatcttcaatgttcttccctgctgtcaacttaaacgaatacaatttgtgcttcaagaataacatgttagccagtgactttgtcatgtacaaactctctagtttcaaccatactatagctgttgaattttcctttgacacttctctaagagctttgtctccaagactcaaaatgaatgcactgtgagccttttcaagaatgtctgtcttctctttaaagttaatccatttggtagatttctttcaccaagaagtgtagcttgtagaccctgttgaacaagcagcgccctcatcttgacacgccacaatccaaagtcattcttctcagtaaacttctcaatgtcgaacttggtatttcccattaatttcttcttggatcgatcttcaagaatcttaaacatttgaatctgatttttgatctccaagctctgatactacctactgagaaacactaatgacaaactgtattcatacacacacatacacaacaagagaactctaatgaacacacacaaaagtattccacaaaaccaatagcacaaccacaatgaaaaattattgttttattaattttgagtaagctttacaagctgagaattacacttggttctctgtatgagaaaatcgagtctaatagtatttatagcaacctaaacattaaggaggaccaactgtcataactgtcgagatggcagttatgacagttgggcttacaacataaaacgagaagcctacacttgacaggttggatacacatttgagggtatatgatctaacacttcattttctttactctatcattttcattctttatttttttttcatatctttttatcatttaataataatgtagctaatttaattaaaaagttttgtgttctcataattaattactctcattgcaatactattataatatgacaaataaaaaaattaattaatgtaagcataataataaactcctaatattttaattatcatctatttactttctataaatatactgtatatgtatatacatatatactagattattgttacgtgaattgcacgtatatttagttatatttttagtatttatttttatgtgtatttttaaaattttataaattaaaggcaacaaattaattattaatttataaaaatatttaaagttttaaaaattaaaggaaaatacatataaagtttaaaaatattaaaattgaaccaacttctcaatagtacaaatgatatattaatgtttatatatatttaaattaatttaaaattagtataagttcaattaaccttaaataaataatattaatatatatcaatcaaatcaatctaaaataataaatattaatatttatatatatatatatttataaaactaaaattactaataccgttaaatttgacggactattcttgtattcttaaaatatttcgttaaactaataaaatccgttaaataaccacattttatatataaatatatatttatgtaattatgatgttaaaagaggtgtgttatcttactttttagagaaatattaaaggcataaggtgatgtgatgtgacatattgttgttggtgtaatttaatattttgtctcattctcagatattttgattaataaagggtaaatacttattttgtttttttttttttatcaaaatacatacttggtaccctctattttaagtaatgatcacttttgtgtttccgaaaactacacatttagtattattctaattttttaacattttcgaaattattctattttaatatattacttaattatttttaattgatttaatataaattttaaatccctcacaaaaaaataatgtgaaagtcaaataaataattattttttctgtatttttttgatcaagctctttaactaattattatcttaaaaatttgtttaatttaagaatgtagtatactagataaagtgttagccaaaaatatatcaaattttcaataccaataagtaacataagagtagtatatttcatgattggtatttgagtattaatttagaggatctaaaaaaaattagttaactaaagttattttaaaatttttattataatttaaattatttacttcttaagaattaatttttaatttggtttaatgatttatatttgaattaattgaaaatgagttaatattttaaaatggagtaatttgggaaaatataaaaagttaaaatacacttaaagtacaaaatgtgtttctaaaaatgaatagaaggtaaatgggtaccaaataggtatttaccctttaataaataatattaaaagtttttaacgagtcacaaacatgtgatattagtctaatgatagacactgtgctctacttttttagaatttttaa

SEQ ID NO: 194943 - DNA, 4958 bp, Cannabis indica
tctccctctccctctctttctctgtaacttagtgttttttaaaatctgttgtagtcttggtacaatctgtcagtcaccccctttcaattcacttatgggttataatgtcttggtcgctctcttcttgggatttcggccatatggctttgtgtatagggatgtgctcgattatgataagtacctgctttttgtttcagatttaatgtaccctagggaaagtagttgtgcatggattggacgccttttgattgtacatgctagaatttttgaagaaggcaaagtccacaacgtccacaattctcttttgcagtagtgatatttttatcaatatttggcttttatctaagaactatgcctgaatcacagttaaattgtcactgaaatggtacatgagagttgtgttggtttatgactttgacctgagtgttggaatttggtacgtataccttgaggatctacttattctaacaagtaggtttgttagtgattttcaaatctgtgattagaatgctttgagaaaccatagaagagatctcttttactgatctgaatatcttatgaggaccagcctttgcttccttgaattgtctgatataattattatattactgcatacttgaaaaatggcattgcaacttatccatacaaaaaatacaaaaagtctaagtggtaccctttatgtattcatataattatgtttcattgtctggttttgtttttcttcagaaatttcctggcagaattttatatcttaatattgaacatttgatagtttgacatgtttcaatattgatgcctaactactgctatgataatgttcgtacagatatatatggctagccatgagaagagaaagcacatgtagcatccgtttcatcattgctacaaagtacataatgttgcagctgatatttgattaaagaagattactgttggagtcagctgtattgtttattagattctttttgtatgctcatgttcttgttgatcttttggtttgtttcttttttatcaacttataaggcccaatcttgagctgaatttattttagttgttataccctctcccctatcccccacaccaccttcacatatgtacgaactattctgaggaatagatttggccaggaatagaggaaaactagttgtgcttttcctttcctttcttttcgatgaaatatgtttaccaattgcactctgtttctataaaggttttacaaaataaagttgacagtgttagcctaaagtcactattagtttgtaaggtgcggaagagaagaaaaagaatgagaattcttattgattgaattataatgtgtatattccttatatagtagcagctagtaactaattactagaagtagcagcctgtagcagaagctaactaccaactaattaactggctaaacctgacttgactaactacttagacggctaagctggacttaatactcccacttaagatgtgttatatgtcctctgtaacccattttgtctttgaacacttagtactgagctgtaaacaaaggcttggtagagaaatcagcaagttgtatttttgttgaaacatgagctatttttgtgattctctcttcaacttgttctctaatcaagtgtcaagtgtttagttctcacatggaaaattggattggctacaatgtgttgaacatacaccaataagaatataaaattggttccatagtgcttcataaacaaggaatgatcaatgtctgaatgcatgaagccttcctcaactaaggcatgcgaaattttttcaaaccattccctaaaaggttgttttaatccatataggatcttctttactttgtaaactgcattattgcatagtatttccccctcaggtcttttcctttgagctatggacatacacattttcatgcaaaaatgcgttgtttacattgagctggtgtaagtgccattcatttatagttgcaagagcccagacaagcttcacaataactagtttggtgactggtgcaaaagtattaaaatccacccctttttatgattgtaccctttgacaacgttatgccttgtattttttcaatgatgcaatcaatatgatacatcattttagaaactcattttgagccaatcacatgttgatcaggaggcaaactcactatagcccatgtattgttagcttcaagtgtctctaatttagtagccatagcttgattcctctcatgttcagacttgatataactaaaatagtagctatacgaagacaacctgtcataagtagccacttcagataaaaggtgagaagtaacttgatcatgtacttggagaaaaatcataattataattagaagctacaaaataatgataatcattgagatagtattgtattttagatgttctaataggtctagttgatatagaagattgatctggtgaggatgagatgtgttcagtaggcatcagacacaaaaacatcacacctagaaccatgaatgacagagaaatttttttcatgtttaggagttaatcaaccattgtcaacaaatgaaaaaacgtgttcataaaactgtacatttttagaatagaaaactctatttgagttaagagtaacttataagccttaatgcctagagagtactctaagaagatgcaagaagtaaatttgggggaaaattttgatctgcaatgataagcttagagtagaagtataggttaagcaaccaaaggcttttaactgggcatatcctggtcgtttagatatgagaatttcaaagagtgacttgtgtttgagattttgagccggtgtcctattgataaggtatgcaactgtagtgacacagttgccccaaaaacatagaggaatatagaattggaataagagtgcacaggccgcattgagcaagtgttgatattttctttctactactaaatgttgttgtggtctttagacacaagaatggtagtgaactatccctagtgaactaaacaagtcaataaattgtagttcttttgaactgtcaaacctaacccctttgtgcattgaattgagttttgataagcaaaatgaattgaggaatgattatttgggcatctgatatatatttaatgagatgaattcaagtaaatcttgaacaatcatcaactatgataatgaaatatttgtagcctttaatgattaaagtattaaatgggccccaaattttaatatgaatcaaatcaaaataatttttagtaatgttatgatggcaaacaaaaggaagttttatttgcttggcatagtggcatatagaacaacaaaacaaaggaaaatcatcatattgaaattacaaagaatgagcttttatacaagatggatggcctaatctattatgtcatacaatttcatgtgaaatttttcaatctattattgaagaaaaaattgaaggaaccaaacttgggttggtaagatagtataagttgctaatcctttcacccatcccaatctgcatgctcttaatggtgtcctatgtgacacatttatcataagacaaggtaagtacaatatatttcaaatttggttaaggaagttactggtaacaaattatatttgaatataagcacatttaagacattgttcaaaataagatcaagggttaagtgattgaactaatacaagaaattttgcatcaacaccatttggtaataaaactgatgaaaaagaaagatcattatgggtatgatgaaataaggaaacgtcagggcacacatgatgtgtggcccctatttcaatgatttaatgagaattttgaataagaattccttactaaaaaagtgagatatcaaagattatttagatgagacatggggatgtgaattgtctccaactttctaagctagaagagccatcaaaatttgacattgaaagctggataaattggacacaagctcttaatcatgacccaaggtttcaataggtttatcatcttaagcaccatagtaattagcagctagtttcccttgaggccctttagcattttgacatggaaattttccacgatgtttatgcgatccatgaagtttgtaacactttttcatggtgtgtctagagatgccacaatgagtacatgaggttcttagtcgatatgattgaatgctcccaacaaactggctagtggaacttgacccaacttattagtcttagtgtgagtacttgagatgtttctttgtcttttttcttgaataaacaaagcataaaccttgtttatacatggaagtggttcttgcatgaagattgtgatcgatcattaaagagaatcaaactaaccaaaaattcaagaatttggtcccctagtatttttgaattaccttcatattgccacaagtgcaaatagattgtgctctatattggcttataagatcataaagggatttaagcttaagttgttacactatctaaacctcatgtaagaaattgcataacctttttcacctcaaaaactctaggagcattttttttgttgaatttttcataaagatcagaccaaatctcaccaacattctcatggcacatgatactatcaactctttgactagatacaacatgtaaaatctaggaaattaccatgatattccatttgcaccatgctatcataattctcatgatcttcgtctgatgtagaaaattttccattgacaaattttacattgtttccttcgatcaatgccaccatcataaaacacatccatcagttgtagttctcgcttccagtgaggatcttgggaactaagttttctccatgattgtctccattggatagaaaatatggattcaaagcctcattttaaatcattctaccttgttcaccaagaacaaaatatttgtttgaactgttggaattatcttctcaattcgagtcactgcgtgtctgaacacctccactacgtaccgtgagcgccaacaaaacaaacttgactcacaacaatgatggctttgat

SEQ ID NO: 194944 - DNA, 1833 bp, Cannabis indica
actttttaaaaaaaacgttgtgaaggaaagttctagatctatctttcagctttccaaaatattttgaatcgtccaatttcaagctgtatcgagaaagtcatgaccaacatacaatcaatcgtcgtagcaggaatttaaaaaaacattaatcttgtaaaaaaaaaataaataaggtaagtcacaacatggaatagagcattgcagcccgcctcccttcaacaagaaaaaagttaggtttttgagcctagtttcaatttttaagaggagacttgaagggggacgacttgggaggccaaaaacacactgtggagcatcccaattcactctcaagagtttttcttcctatttcttttgaattctaagtttattttgattattgtttatgtttgagatgtcgattatgaacgaaatctctttttaagattgttatgtgaatcacttgaattgttttttatgaaattagataattacattaataagtaaaataaataatggttgataatcataataattgtaatttttctcattattatttctctaaatttgtattgtttgcttaattttatttatttgtctcaaacatttcaattaatcaaataaaaataaaaagttaattaatttgtaattggtaatcaatctttcttagaacgatactctattttatcatcacttgattcaattgcgtatacttacgtattaattttaacaaacaactgtatatgtacacaatttaataacaaagtacaatattgtgtgtaactaaagagaaacaaagtaatacccgcttagagtcttgttattattagaagattaatgatcatgttagagtagtgacaaaacatgattgtaatagtgattacgatcaatggagttattaagcgtagaacatcgttgccatagacaatgatatagaaaaaaaaaaagaaagttataaaaagttggaattttctattgtataaagctaaaaatatttggagcgattttagaatgttaaatcaatatcttttcttaaattgtatatatataaatataaatattaattgtcactgaacaacttatgataaaatcattcttttattaattaatttaataacttacttacaaaaaattatacatcaactaatacataaaataaaacatttaatgtttatttaataattactacaataaaaattcattaacattattggtacttaatactacgataaaaatttataccaataaaaattcatttattagcgtcatcttataatatattaaacaccactactacttaataataaacaaaaattcattaacgtcatcttaggcaccactggtgcttaatcctaaccctctttcaaaatcccaagctagtaacatccttgaattttagcaccgcttatatccaattttagatttgaggccgaatcaatctaactactgaattaactagaacaacagcaagattatataaggtcatttcgtctaaaccatttttaatcacctttacttgagaagtttttactcaaaacattagagttttttcattattataccttccaaaatctttcttttgaccattcaattcaaggccaaagcaaatacaataacggtttacaaaaataaatactacaaattcgtccatgaaatgaaacctgaagaactgaactggtttcatttgactagctctacttctacgaagttcacaagaaagaaagcatataaattttttaacatggcctcataaccctattcaaccacagccagtaagtcactctctttgcagaaacaatgctttgagtttgatcccaaatccacctgattgatacacaaaacaacctcattaatatt

SEQ ID NO: 194945 - DNA, 1311 bp, Cannabis indica
tgcccgagtggggttcagttttttctctgtagcagttacctgtttgccttcgtcttcctcggcagttttccatgtttcccaattcacttcttcagcccatcttcaacggcgtcgtgtgccatgattacacgaactctcttctccactctctgattaatgggtctataaatgaacaacaacgcaacctcttttctttattcctgcgttttttgtatactttctctgttcttgctaattttatggattctattctacacaatatggagtcaagcctggtgctgtctgaaaaggaaagaacagtccactctttctcggatgctgatcttgctggggagattgctgagcctcgtttcttccttgtggcgagatgttaatccacagttttcaacccaaaaaccttcactaagaagatgggggaattttggagcaacaaatgtcgttttccggtagttgtttctgaaatgcattccaatttatttttactaaccattggttgtgcaggagacaaactcaggatcatcaatggggaaccttggcactatttcaattatcttattttgattcactctccgacacaacttcaatccgttgtaccagaagatctgtcaaaggtgcaattctgggtgcagattcatcgtttgccttttctcagtaaatctagaattttggctcggaaggtgggtgaatggattggggaatatatcgatgtttttgaggattctctctatgaaggttgggggtcttttattcgcataagggtgaagcttgatatctctcaacctcttatgagaggcaaatttgtgaaccttcctaaggttagggatgaacattggattgagtttcgttatgaaagtctccctattttttgttttcactgtggtcgaattgggcatctgtttgagaagtgcgctggttttatggaattggtggatgctggtattgatcctgatcttccatacgacccttcaatgattggtgacaaactccctgtttcgggttatgaccgttatcgcaccgatttctcaactgctaaagtttatccttttcttacccgtgtggcaaggagagctattacagcaaccattcctcctaataatacccaccaaattcgagccattactactgaccctcacccttcccctctcactgtggcggaaaacaaccatacatctaaccaatcccaccaaactcctgaggctattcctgagctccctcaaccatttccttcttttttccaaagcttatccttagctttccccacatcccttgcaaatactcctactcccaccaacaatcactcccaaagtcatc

SEQ ID NO: 194946 - DNA, 1594 bp, Cannabis indica
caagtatggggtaccctcctcccacagctaatattttagaagtcttcctaagtggttataatagaattaagtagaaattttctatattatcatcagaagacaaacataagaactgaaaacacaaaaagaaaattttccacctcgacaaataaattcaaactcctttaatggatattatgaatttatgtattttggcatcgaactgctctagggtttttcttaagctctaaattccactctttaaatgaagattacgataaggaatatgctatccaaacaataattatttgatttgcctctccttgttgaaaaatcatataaaagtgtaatcttgaaaatctgtgcatgaaaccttaaattttcaccaacctacaatcagtataatgagatttttgtgatcagcctaatgtcaaatgagtcttggaacctgaccattgactttatttggtgtggaacctgaccattgactttatttggtttggaactttaccatcacaactctctggaaatacttctctttgaggttctagaatggtttagcataaagagttctcatatgttcatcatagttctgggtctttaactgctcctttttgtctcatattttcttacttttttaaaagatatatttgtttcctaccctcttatgtatttttttcattttacaggatgttaccctacatgatcttgatgctgcaaatgcacgaccacaaggtgggcaagatatattatcattgatgggtcagatgatgaagcctaggaaaactgaaatcactgacaaattacgacaagaaataaataaggtatgaatcaagagggtgttaagtgttgacttcaatgccttatttcttataggtaccaaaagtataaagctagtaggtaggatgggaatgctttatttgtggagaagtaccagaaacctcaattttaaaatattgttgaatttgatctaattcatcatccaatattcttgaagggcccttatgatttatttgtgaacttattcaatgacaactttttcccattttaatttattattttcatggcaactttatatatctaatggtcagatacttcctcgcaataacaattttaaccacatctatttgtgagtgaccttgtaccttttttcacacttattcaatgacatggtttatggtaaccttatctatttttttccttgttgagagtgggaatgtgggtagtgctgcagcggggagtgggggaaaggaggttctgatttagatctactgagaaatattgttacaactgctgcagctcaagaagagtttatgaagccaatgctctagttttttagttttccttttgcaatttgagctttgaactttgtctttgtcctaatgaattacattgcgtaatagtatagtgagtatttgcatttatattttaatgatcctcccaatctggcaggttgttaaccgatatattgatgaaggtgtagcagagcttgtccctggagttctgttcattgatgaggtactgttactttaactttttgtttgttgttatagccttatgtatatttgaaatttatacatgcatccataattaaaattaacaggtccacatgttg

SEQ ID NO: 194947 - DNA, 1209 bp, Cannabis indica
ttttttttttttttgcaggatgtatcttcaaaaataatgtcattttctcagcatggtccgagggctgtatgcattctctctgccaatggagccatatctaatgtcactcttcgccagccagccacatctggtggaactgttacgtatgaggttcgtagttctcttttgttacctcctcattggtagtatatgttacattggttaaaagttcaatcaatgtattatgtcacactcatctgcagggacgatttgaaattctgtcactctctggttcgtttcttttaactgaaaatggtggacagagaagtcgaacaggggggctgagcgtctcgttgtctggcccagatggtcgtgttttaggtgggggtgtggctggccttctcatggctgctacacctgttcaggtacatgtgctttgatctttattatctgctgcatttactgtcttagaatcgaaaaacacatctattataacatatttcctattaaattaagaataattggttatgattttgcaaaaaaattaggcattggtttatgtagcattgcagataggcacagatcgagctcaatatgcccacggctaaccccaattgatgaaactactgattttatgactttggaaaatgatacataaaatttaggcattaacagataagataaatacactgcattgcaggtggttgtagggagttttgtctcagatggccgtagagaatcaaaatcagccaaccaggtggagccattgtccatctcacagaaccttggcgtcgggagtggaccaactgggcccggcagcccactgtcgcgtggtactctaagtgaatcttcaggggggccaggtagcccacttaaccatagtacaggagcctgcaataataataataataataataataataacaataatccaccacaaggcatgtctagcatgccatggaagtgaaattatttcccctctaatttggttgtgtagtagtagtagtagcctgtttagattttattttggaggacatatgaaatatctgtttgtagtctcatctcatcaatttcattgcaagtttggtagtggtgttgactaggtaggtagtaagagtagtagtgactattgtgtgttcaatagagaggaaaattaggtaaaagtcagtggtaggattaggtgttaagataatgatgatgttattgtagtttgttgttgttgttgttgtt

SEQ ID NO: 194948 - DNA, 1085 bp, Cannabis indica
aatgaactaactaaacaacaataagattgagagtgttatatgtggtgaactgaaattggtaaccagatacttgtaaccaactcataatatatgtgtatgtatgtatgtatgatgcagatcctaacaaatgagttgtacaagagtgtaaagcatagagcagtggtgaataacaagagtacaagaatatcaatagtgtctgcatatggaccaagattggagtcaaaggttgtaccaataccagaattgttagaagcaaaaggtcaaaactcagcttatggaccaccaattccatacaaggattacttggcacttttacgaagctcccatgcctccctcaaatcccctctccacataataagattgaaataataataacatttcatcattactactaataccttaaatattgcttctctttaattaattccatatatatgttgtttcttatgattttgtgtaaaataattattgtccaaatattattatattataaagtagtcgctactactactgcatttacgaaaaaaagtgttttagggacgataatattaggagcgactaaaaaagttaccgctaaatttaataacttgttattattagtggttcttatcgctaaaaattgactttttttttttataatttaaaatgcttttgggaaaggtattcatgttttaagagtgcatttcgaagtggcatcttattttataaaaattattacattataagatttgatattattgaatgaatatcataagatatatttgaattaataaatacaagagaatctcctcaagtagagaaagtctttgatagagaataacaacaaaataatatctagttattaagtaactacaaataacaaacaactagctaaatacctaaactctaactcctaaaacccctcaagatgaagtgtataaatttggtacatttatcttggagaacacagagaaatagagatttggtgagaaaatttaatgctggttgaacttgttcttggaaccttcttgttcttggcagttggtcaatgaatctttgttcttgacaataatattgatggatcttcttgtttttgtttgtatggc

SEQ ID NO: 194949 - DNA, 2677 bp, Cannabis indica
gtgttgtactaaatgaatacttacaaaattaagtaaattactagtctaagactacaatataaattcctaaattactattctaagctcacagtaatcagtatagcttccaagtgcgaaaatatgtgctcttaactatagataatttataattttaattttaatttttttttatattacagtataaaacatagttatctaaagattttcttacaaatttttactaaatttagtaaaattttacaatacaacttttgaacttgacttgtaaattattctaattttctaaaagattaaaggatgtcttaaataattattaaaaaaatcactaactattacacgagtaaggtggaccctatttttgggaataaatgtaaaacatcttttatttaaattttaaaatagagggtgacaaaaatataacttggtaaatggacaggttgggttatgatagaaggtgagggatcagctctgataagggcaagtttaaaaacagaagatgagacttataattgtgtagggactgttttggctaagcgtggatgttggtctttccttaagggtggatttgtccttgaaacaccctccaatttatcaatattatattttcaggtaactaaactttttaattttggtttttttaaggataaattatctcttaactaattcttagttttgtagagctcggatgatatagatgttggtattaacattgcaagctcttcactgcaaccattttccaatgaacaatggagaataaatcaacaatctatagtcaattatgtcagtatatatatactcacttccttagctaaatgtacttgtcaaactcatagaaactaaatggaattgtaaagtattcatgatgaaattctatattattaatgttgtagaaaaggaaacgtgctgtgacagtccatgtctctaatgaaaatggagaaaggttacaaggagccacaattttcattgagcaagtggccaaggatttcccatttgggtctgccatagcaaaaaccatcttaggaaatttcccatatcaggtgattagcttaccaactatttgataaaataattcaccacttaaatcttacttgattgttgatgttttatttcagaaatggtttgccaaacgattcaatgctgcagtttttgaaaatgaactgaaatggtatgcaacagaacctgaacaaggccaagttaactataccatagcagatcaaatgttggagttcattcgagctaatcaaattatagcaagaggtcataatatattttgggaagaccccaagtacacaccaccttgggttagaaatctcacgggttcagaccttaaatcagctgtggagtttagaattcaaagcctattgagcaaatataaggatgagttcattcattgggatgttagcaatgaaatgcttcactttgatttctatgaaaaaaggcttggccctgacgccacgctaagtttctatgaatctgcacacaaatacgacccattggcaaccttattcatgaatgaattcaacgtagttgagacttgcagtgatgtgaactccaccgttgatacatttatttcaaggttgatagaactcaaaaaaggtggagttttcatggatggaattggtctagagggacattttacagtacccaatcctccacttatgagaggtatactagataagttggccacactaggaattcccatttggctaacagaagtagatatcagtaaaaccctcgataaaacatctcaggtgagcaacaaagcaactattaaaagtctttttgaacttgttaagtagtattactattgtgaatggcttaaaaattatgttcttttgcaggctatttacttagaacaagttttaagagaaggcttttcacatccttctgttaatggtataatgctttggactgctcttcatcctaacgggtgctaccaaatgtgcctgacagacaacaatctccaaaatctcccagctggtgatgtagttgataagcttttgaaagaatggcaaacattggagttagagggtgtgagtgataatcatggatcatatagtttctatgggtttctaggtgagtacaaggtcaatgtcaagtatcaaaatagagctgtaacttccactttctcactctctcaaggtgaagaaactaaacactttagcattcagctctaattatcttatacaatcccacatattttcaatttatcctttcaaaaaaacttaggaattaatttactctaaaaatttgcttaagtgcatagccaataattaatgattcaaagtttgcattatcttatttagaagttaggtttagtatttttatagaataattgttatgaatagttgaaagaaaaagtattgtagatattggtccacatttttgcataactttttgcctatgccatgatatcactcttctccttctatggtcttggtcttaattttatgagcttgcttaacactcatctgttcgtgtaaacttcaattgtttataaattattaaagttattattagtaattattgggaatcaataaaaaatgcaactatgacatcgaattattcagcctattaaggttatgatatgatgaggtcccacatgaaaagcttttgtcatggaggacctataagaaattatctaaataataatggatattacaataatgagcattgc

SEQ ID NO: 194950 - DNA, 973 bp, Cannabis indica
tcatcatcatcatgtgctaatgaagctgagaaagcatcaaagaatggcttcagttggctaaaattcatggaattcaagttttaattaaattatcttattgacttatctagtttaaaaaataattaaatagtcaatgattttgaattatttgtacaaatatatatatatagattcaaaaaaaaaaaagaaaattgaaaaaccaaaattatttcactaagaaaataagtagtattggattttttttttcagtaaaataattattggaattgaattatttgggtttggggacccttattaggagtgtagtggttgtttcaatatcaatttcatatgaatgtttgtacagtttgaaatttggccacttgtgtttgaattgtatttatttgtagtgaatttgatgagaataattagataatggaagcttcatttgtcaaatatcaccataattattggaatgaaatgatttatttttaatagtcccaaacacaaattgtcaattagatgttaataattagttttattgcttataatttatcaaaatatatctagttagttgtgcatggattatggtgaactttttaatttgactaattgaaagtaactctctctataatataattcactcacctaaataagatgtataaagtaagtaaggggatattgcagaatacgcagtcatttttctttttggaatttatggtaatttaaattaattgtaaaaatattgtttttgtaacaaatttatatataagaaatgtctagaaatttacttgggcgcttctgtattttggattactatgaaactgaatgaggcagcccatctccttcgcgtttattggatttctttcggatatggatgtaaaacctttgtttcttctactaaaactgcaaaactgcaaatgtttattaattgagtataattattgggtattaatggtatttagctaggacttgtttggtatgtattaaggtt

SEQ ID NO: 194951 - DNA, 2247 bp, Cannabis indica
atctcaatattaaatatttatattatatttggcacaaaaataattgtgatatatttggctcactatttacaattatgatccaatatataagatataaaataataataaaaaatattaattatattaatggccatctaatattttattaaaaacatacaaaaaaaatattattttttattattttattatttaaataatgataatatggtaaataaagaatgtaaagtttaataaaaaccactgaattataataatttactttaacgtaatgatatatattgtatcgaatttagcacaatttttattatgtgtaaaatgaaatttaacacactttttaaaataccattacaataattatttttctttaagtgttatattaaaatataataatataccatctttttgacattttattagagcgttagaatataatacatctttggataaaagtgtaaatatctattgtgatatgggtgttatatatgacaaaactttatgagcatatatccaaaagttctttcaaagaactgtatgaaattgtttaaaaaaactatatatatgaaatttatcaaaatacattttcagtttatttttatttgattatatattgttttttccttttacaataaaatagatttgaacttttaatataaaaagtattgcagataaattaaagcctaataatttcaaaaagtaaaagggcatgaatggacataatagtgtcctatgactcgttacacgcaatataggaattaaaagaaaaagagaaagaaagaaagaaagaaaatctatctaaataaataacatttccaatttcatttgatgatcaaatattaaaggaaaaataatttggaagttaattaactaaacttaattaatgggcaaatgaaagagaactgcaagactaatgcatacactaattatgacaaaattgtgaattcatcaacaaatttactaacccacccactcgtgaccacaaaaatgatacacaggtccacaaacatgactgagactgaccccatcccacatcagcttccaccattttagcctatatactaaatctccataatatatctttatattatatttcttgtatctctgaagagcccaatcttatgaaatgatattaaattttcaccaaaccatatataatcattattgttaagtagcagtgaaccccctcactttatttttcttggtcactattctcctatataatttaatatcaaaacaaccactatagtctttaacccaatcattcaaaaacattgcaaaagtagatcaattcaggccacaatcaaatggcaaaacagtagagtacctcataatgaaacctatatatcctttttagctttatataatattacatatatatggtaaagttagtgtggggtcttaccaatttgagcctgggaaatgaggaggctgtcatggacgacaatgactgttcttgtggcaattactacggttacctctttcacaccttctagaggcttcaagatattctcgaccaaaggtacctctgaggaacaacataatcccaaaacgtcaaagtagcttttctgaaacttcttcgttccttgcttgctgcttgttttaatgtcctcatcagaacccataactcctgagatattttatatcaccgaaataactgcaacaaaaccgtattttagagtataattttattgtcagatctagtttgttttccaaaaggaaaatcaaatgtaatactattacattattaatcaataccatcatcattttctaggaaaagcttcgacaaaataataaagaaatatttgtttgtatttagagggttaaaatgacaaattttgccttggtttttgggaaaatgggtttggtggaaaacatgggaaagaagagttgtgtaatccgagctcaacacgatcttatctcgatggtgtcttattctatgattataaatatacacatatatgcatatatatatttgtgtgtttgaagttgttttgtttacctagagagagatataagggagctagacacgcatacataacccaacactatatgcatgactcatatgtagtcataaaattaagaccagttgataattacaaggagaaaaacaagaagagatgaagctaattgtacaaaactttaataaaacacagtcaattaatggataaaaattaaacacgaactttcttttttcattaatcagagttgagagagagagagagagagagagagagagagagagagtagttt

SEQ ID NO: 194952 - DNA, 1442 bp, Cannabis indica
acgagctgacaccgaatgagaaatcaataataacagaagagaaaattaaacaaagagatgtatgcaattctacatctattttggatcgaaacaaatgtacttaaccgaactagatgaggctttgaactccgagctgttgtacttctcttagcttccatattgggtatatagcgccctctcctagttcttcgggctccacctgttgcattgcccatgcgtagtacaccgtatggattgtatcctaatttcacacacaaaaatatttcagttttcgaacaccccacaatgtaaagagctacgacgagcagcataagctatatgatgaactcacctggccgccttcagtgattgcaccatttcggtcgcgtacacaatagacttgctgtgtttggaactgtgacaatataattgataaggacacaatgtcaattttggtttcaaatataaccaagtaagattttccggatgacccaagaagggaaaaaggcataccgctacaatgatgataggtgaggctcccatcattttcgtctctctaacctcaacatcagatatatgtagaatctacaataagaattcgaaatattagaaacaccgaaaaataatacttatacatgtccatgattcaatgttgacataaaataatctatcatgtacaatttaattaaggatcccttctagctaaagcaacacatgcacattaatttgatgaaataatgattatgaaagagagatcaatagaaactttcagaaggtgaacacttttaccttgttatcgaaaatatgccatgactttgtaagcaccatgttctgctatacaccgctcaatgacttctttggtacagtacttcttcaaagtttcaatgtcaccctataatataagaaattttatatccatcaaataaggaattcaaataataacctcgtcacacggtccaaaatgataaaataatattcaagtgccaggagaataaaatgaaacaaaggtaagataagtttaaaactccaccttaatataagcatgcaacaccggtttaacagcttcctgaacttcggccacaaactctggcattgagaatgacctaatgtattgaaaatgttgtgtggaattaaacaaaagtaatgtgaaaagactcaaatacataatgaactttaatgcaaacaccgaagggaatatgatcatacggatctcgactgcgaatctccttaattgtagcagccgcatccgtttcctggaagatagtttcattgatgctgtagaagagaatacaataaataaggaactaaacagaatatcgctttggtgtaaagtgcaaatgaaatttataggcaaaagaatgcaagtttgagcagattactcttgaattttatgaacaattgggttatcacttgtttcccatctttctcgcatgtcctctgccatctgtccattccaataaaga

SEQ ID NO: 194953 - DNA, 1084 bp, Cannabis indica
tttttttttgttattttttataattattttgtagaaagagaaagaaaaaaaaagttatgcttttagagcacatgggtaatgctttggttgcttgataatgcttagaaacttttgactatttccaattatgaaagagaactattcaaagcaaaacctaaattatatttggtttggtgtattgaattgatatatacatataaaatcttgaagatgtaatagcataggtgtcatgcatccattgtgtctataataaaatcttatatgtattatttattatgccaaattgctcaataagggaatggtagggcttaatttgagccaataaggttggcaacactcaatacccaaaaagagcaatacttaatatacatatatatagtggccgaaagggaaagacttaatcctaatctaatcaagtctttttgagtcaacctttacaattatatgtacaaaatgagcataatgaaatttggtttggtggggtaaattcagatgggacttgtttctatccatccaaatgatctatctttatccaaaatgtttcaatattaacttagaaaaaaaaaaattgataggcttttttaagacccaagaaagaaaaagcttcttcttttgctttttcagaaagattttagttgagagcaaagaagtaatgaatgaatgtagcaaaaaaatcatactcttctcaaaggggttcatccattatatatataccactttcaaagtataacccaaaaaccaatttgaaaaagaaaatcaaagaaagattggttccaatttgagcactaacaaaaacaattaatttaataaaacttggggtgttgctgcacactgcactgaaagtccatttgactctttaggcaataatgtcacattattggctttatgcctttaaccaaacatttcattagaatggtcacaaatagaccaatgaaaaataatgaaacaagtgctttttaaggcttaattctaatcatataagagaaaggccggtgattttttaagtttcttcaagaccccactaaagaactcatcccaattgggaacaaaacttattcattcagcagaatgcttttgataattt

SEQ ID NO: 194954 - DNA, 1959 bp, Cannabis indica
taatatttttatataaaaaaataatgataaatataattaggtggtaggtagtagtacctttcatgagttgtttacccctaatgcaaatctctccagcttggttacgtggaagagacgcgccagtgttaggatcaacaatcttcatctcagcattcctaacgactgtaccacacgtgccgaacttggtcggaaacggctcctttgcaaatcccaagcacaacgaaagacactccgcctctgtcataccatatccctatcatttttaaacatcacacaccaattacatctcctcatatcatcacccaatctcaccatatatattattttagaataatgctaaaggtgtcagtgatgtcgagtaccctcttgtatgttaatattgctattgatctaactaagtatcgggtcttatataatttaatataataactttcaaagagtatcgctagccaattacaacgcgacatgtcgagaaagtgctaggcaccactggtgtctaatagcaatgcttattattttaaaggatattataagagcatctctaatagagagctataaacctatttgtcactcattatattatcattaataaaaatattttatattataagttaataaaataatataaataaagttaatgttttatattttccatgcgtattaataataatattgacttttataattaatttgtactttgtgtattggagcacaaatataaaaattggttcaaatatagcttcattatatattttgggctaaatttaattcaaaatatataccattcattagagatggtctaagaaaatagcttttaaacaatatcgctaaccaatcgtgacgggcatctataataagtgataggtatcaccggtgtccaataacaatactcaatgaaaaaattgtccctcctatgtgttaatatcactattggtccaattaaatttcgaatcttatatagtttaatgcaataatttataaattgttcaaaaaaaaatttaaaatttataaagataatattataactataataaatatcattataaaaaaattaaaataaaaatttcaacatatattttcagggaaaaaaaaattgtaatagaaaattaatatcaatatactctttttctatttattcatttaattgattatttcttattaccctttttagttgtcaaatattgtacttctaattttataaggactcactactttgttagagttttacaatatcattcaaacagaaatatagtatagttttcatatagtattgattgtttaatattgttttatttttctcattattttgtagaatttgattgtttaactttgacttatgcttttttaaagtgtaattaatctttcttgtgataatgaattaaatttttttattagataatattgttagttaattttttagaattttcaaattcgtctttagtttatatttgacttacaacactacaatcaataagattgcttgtgcatgaactcaaagtagatggtgaactaattttttttattttacacaaaatggtgaactaatttagatttatgagatattaaattatgatttttcacatgaaaagctataatataaatagacatacacatgaaaaaaaatatttcatattgattatatattggtatatggataacttattgatgatatgaaaaattcaaacaattattaaaatcattatttaaacaatttattacatactttaatatttatacacacatgcaaaataatataaaattaattttgacattttaaattatccctaatctttttaagattgttcgagctccctataatcatattatacattaaaacatatccatatatagtggaaatatatatacttatagataatgattgaaaatataaactataccataacacattaatcattttaataatgttggacttggcaattggtgccctattttgactat

SEQ ID NO: 194955 - DNA, 1622 bp, Cannabis indica
ttttttttattatcgtcaaatccaagatccaaacaaagaactactagtggcaaatttgtagtttcttcactatttagaaactgaagaattgtcccgtatcattttagaaatcacctaacaatgcaggcggttacaactttacttttaatcctcacttcactacaaaatacatgcaatgtttgtcttcggaaaacttgatgctttatgttatgtattttagagcatctacattgaacaaaagatatagcatgatgtatatttggagctttatttactattgatacatactaaaggagattatgatgtctaagcactatactgatgtcatattattattattgaattaattaaatattggatcttacatattttaatttaataatttttataaattactattaaatgagaaacaataaaaattactagcaccacctaaatgtgttatattattattggtttaattaagtatcaaatttcatataatttaattgaataattattataaaatattgctaactaattataagaggttacctataaataatgctagacattattaatactttgtaataattctttactgttagcaatgctttttaccactatgtgattttgattattttattattattttaagtatatgccttaaatgaaaaattattacttttacactcaaaaaaaaatattgcttttattatatcttcaataaatattgaattaatattaatggtaaattaattttatatcaatttttacatttttgtattagcgcacatatacaaaaattagatttaaatataactcaatttttacaattttttatgcagataattttatcaatttttacatttttgtattggcgcacatataaagtatatcagcatttattaagcatctctcttaagcactctatcatgatggcgacaaagcaccaactcaaatcgccatcaccatgaacatcgttttcaccattgatgctgtcacttctcatcaccattgaaacactttacaaaaaatgttttaatgattcaaactaaaatccaaaatttaaactcctatgaatatctacttaaaacattaatattaagatcttgaatacatttgttggttcttctcgatcttttttcatatttaaaattctgaaattttataaaactttgatatatttttttttcaaagcttgtaaaacattgaacttaacaatgcttgacatggtaatgacgtttaatgatgattttgtgatggtttgcgatgaaattttattagaactttcatttgtagatgcacatttcctatctcatcagtttattagcatttacaagttttaaattatatatttatgtaaatatggtggtattttaaattttttatctaccacagttcaatcatgcaagagaaataaatattgaaattatttaacaggaaattttaaaataatatatatttcattttatttaatttacaataatggcattactagttattactatttgtgacgtattacgtcagttaaatctgacgttttttagacgtatcggacatttttcatattttttattttcttgcatttttaaaagtagcatttgattattaatagtgtgataagaaaccaattagttacc

SEQ ID NO: 194956 - DNA, 2517 bp, Cannabis indica
ctctctctctctttttcttttgcatttgaggtttcatttcagcaccaaaaggaaaaaaaaattgaacccgtttgaatttacatgtgcccattatgatgcaacctaacttgttactttgaaaattcgagtagaaaattcaatgggtaagaaaagtcattcataattggataattttaacactaacaacttatcaagtcttatttaaggatagttgctattggatgttgccgaacttgagggtaaagtaaattcctagggctgtttggaatgggttaatgtgaggagagaaaagataatctcaatgattgccctgtttgttatgaggttttaaattttttgagtcatgtaatgcttttacccgtattccaactaccctataaagaaagtaatgttgatcctttaaaaaaggtgggattcaaacattatatcagttatttgaatgtataattaaaaattttattaataaaaagtcaaataataattttaaaaaaattaaacactacacaattgctttaagaaaagatgtttataatatatagtactatttaatctgttattaatattatcctcaccattttcttctatttactccttcaaacaatacaaaattatcacaacttaatcttccatttttattattctcacattctgtttactccttcaaataatacaaaattatcacagctttttcgttaaaattcaacatcgtatcgttctcttgtcgctgcaacttggttgctagctcatcagttggacaaatacattgcaattaaatttatttattaataaatatatttgttttcacaaataataattttattttatttataattatgttgaaagagatataataattattattttattttattttatttcactattccaaaatagtatataacattcctgtgctctaccaaacactataatttaattaacaataatctaattattattaccatgaataaccaaatacagtaataagtttacagataatcatattctccttcataatattccccttaatcagattattttgaatcccttataccaaacgcccccttaataaattgcaattgtagagcaacaaacatctctaaggatatagcaaaaatactgtaagaattttacttatgtgaacttaggtggcgtttggttgggtgaaataaaaatataggaatagaaatgggaatgagaataggtacatgaatggaatggaataaaatttaaaatgtataaaaaaaattgataaaataatcattaaatattttctcatgttacattagaatagtttttccttctatttcaaaatagaatagtcattccaccaaaatgctggaaagggcattccattagaatgacattccaatactttaaaatgctaccaaacaaaggaatggaataaaaattattccccttctattctattctatttcattacctccaaccaaacaccacctatgatggtaattggagtttctctccgaaaaattcatgaatggataagtataaagtcatgaaattgtgcaaagtgtgaacatcaggaagacataagtggttaagtagaggtgtgtgagatgttataccgaatcttatcattaggctttactacaaagaaaagattacttttgtcatttttcaagtcataaattttttacattaattgtcaaaatcgatgtatatacacaaatagtattttattagtgtcaactgtcaattaccaaatgacacataaaactttacgcgtcatttgataaccgacacaaaatataagcaaagtctgttaacctttttgcattgattataaagtgacacaacaagtttagtgtcaaactgtaaccggcgtaaatattttttctgtgttagttatcaaatgacgcataggtataggtccgggaaaattattgatatcacacctgtaattttttagatttcaaaatcaatttgtataaccgtatttttatgcactaccgtaacatatgtaatataataataataacatttttcatgtaacaaaaattgatataaactacaaagaaactatatgattaataataatgaaactaagtattactaattacgtaatatagaaagtgataacagtaacgatcaaaaaaagttatatcctatatatcatcacaaaaagtgaagttgtaactgtgtactaataactctaacacttcaaacttcacaaaaccttcctattcgtcccgtaagtcaattgtctccttattgttgtcaggatcagaataggggaactataaaactaaagatagaaaatatcaattaattataaacattgaatgtatttgaaatgattatcaaatgcataagtttaattacttgattctgtttctgtactgagacatgaagttttggataaaattcatgaggtaatattaacattgtatatcatctggttacccttggcatacatactttgtggtctttgccccacccatgtttaatagattttctaaatcttataaatttccatagcactggccaaaaaaaaac

SEQ ID NO: 194957 - DNA, 2153 bp, Cannabis indica
gcagcatgtttgtgtctacagtaaaaaggctgcgagttttaaagagctctgaactttctgcacttagtcgtgagttttcattgtctccattcattttcaatcactactaactatatttatgctatttattgatactaactatgtgatatatttttttcttgtattttagtcgttaataataagcaagaccagatgcgagttgactcttcattgaagtgaagaatgaaagaaatgttatctgaagaaaaaagtaaatttccaccacagtttggaagagaatttgtattaattatttgactttttgttttcatgtttttctatgatcaaggaagtaaaaaaaagtgttagcctaagaaccatgtaatgatgtttcacggattgggttttttttttgctgaaaatgctgttaattccaactcggctcttgtagaaaaatgctatagccaccccaatatatgtttgtgaattttgacactgcttctagtttatacattttttgtttggtctcaaaggatttatatattttgtcgtgaaatgggttttacacgaagttaacttatgacaaaaacttccaaaaaaaatgtatatttagtatttatttatccaaattggtgtatgcctgtatggtggtacatcgtgtttaataatattggaaagtttgaaatttggtcttccataagaaaataaagtaatggtttaaaataaagtggccatttttagctgccttgtaagtttctcttaagtttggattagttttatcttgtaaattattattatttttttcctttctttttttgaaggaacgatagttctattatttttctccttagaatatcttctaaatgatttgattaactattgttggccatttctatatatgtttgtactggattttgtttcagcaatcttttgataaaattatcttttcaaaaaataatttcataataggatcaaatgaaacgacaacatgatgcaatcgatttacctaatttcctacttagacatttttctttgtctttttccttctttctaatctcttaatttcatatatgaaataaataaataaattcgttctctgctaatgacagttcagagttcacagaccccatatatgtgggaactatttcatgtgagataagaattaacgtaccaaacattcatgatatttgatttgaattggattgggtaatataatgttaatgaccataggcaatcgagtttggtgatgtgaatatttcgttgaaggcaagcagttgtgggaaatatagttgtactgtagggtgggggagaaagtagatacgattatcatatatgttcccttttcttgtttaaaacaacacagtgagtagaccctaaatccccactcactcacttctgatagtgatctccataatttaggtacaaaacaaaaaaatgtactcaaacggtaccaattctaaccactaatcaagtagtatagatgctttgctttagtcttctacttaaacctttattcttgccaagtttcatatttatttttctgttctcgtctataagctgctaagctttattcttcactttgattattagatattcagattaaaactagcatggaaatatataatgatatctatttttttttttgggggtggggtgggggcctaactttactgtgcagcattatatataatgcaattttttttttttttgcatgatatatattacaatttgatgtagaaaaaaaatatatagaaaagaagagtttatgagggaagaagagaaaggtcattgtcgttgagagctgcctaacttgggggcgtaaaataagactggtcttttgattctatatgtagatattgtgcgtgtgattctctcttgttgttcagatttcacaacagtggtagtagtagaattagtactttggtaaaactgttttcaacttttccttttattagactcactcttgttctttccctttctgtctctagttattatttttttttttatttttatttttaaaacaatctttcagccagattaaatttattgaaaatattgtttcactgcatcattactacaaatcaatattaactatcgacataatatttttctttttaatgtgtattttagaatcgactagaacatgaatagatagaacactcgttaattatatt

SEQ ID NO: 194958 - DNA, 966 bp, Cannabis indica
tttttttaaaaaaaaagatttaattagtaacttttacaaaacacgatatcaaaaataacttttacgagtgttgagaggttctttatctatgatttatttatttggtattgttattcaaaattataaaaatttactttccgagatcagaaatgtttttgtttttttattagacgatcaactaatttagttgttcatcactttgctcgagctttcattttttttatcttgattgtgtttttaatttagaaatatcccattttcaaaaaaaaaaaaattagaaatatcccaattaatttgttatgtgtttggtagcagaaattaatggtgaatagagttgatttttttccattaaaaaaaaaataccaccgagcatttggcctaatggtgggcattctttgctttgtactatgaggtgggcactagacaagaagggagccaagagcaacaaagaggggccttctaatttttttttaaataaaattcatatagttatacttaatattttaaaaaacaaatatatttttggcccctctttaatttgtttatgacatttttggccacccacttactaatatatatatatttataactaaaaaatgatcaatggtacacattctatcctcaactctttcagtttaatattaatttcaaaaactaccaaggagtcaattaaagcttatacactgtccctaaaatggttgtcagtcgagaccctctcacacatagataccacgacctactcaataaggcacacaaacacccgttactcccaaaggagcgccacttttaaggtccaagataagtgctactatgggactctaattccgaaaggcaaccgaatgagagacttaacgtaaatcaatccaaccaattacaccaaacacatagtggtattcactactaatatttataagtagtggtatttataagattatttgtattgctataaaaaaaaaaagaaaaaaa

SEQ ID NO: 194959 - DNA, 712 bp, Cannabis indica
aaaaaaaaaaagttaataaagtttgtaacagaaactatatatactatatacacttaccaattgcttcagcagctgtaattctttttgtaggatccctctccaacattttagctataagatcctttgctgaagcagatatggtaggccatggcgagctttgcaaatcaagatttccttctaaaattgagtcacaaattgctttctccgtctctaacaaaattaattgtacatatatatattatatatcatcaccttgcaatattttaagaaatctaatgctaaaaaaacaagttatatagggaaagaatgcaacgaaatgtaaagggaaaaaatttggcaagagtaattagttcatgctaaatatttaacctactccaaagaagagtaattaactagttcactagagttgctttatccgtctctaacaaaattaattatacattacatggttgtagtaacgctatgggtttagaagtgcaattctataattcaacaataacttagggtacataactctaggtcataataatttaagagtaacaattttacgtgtcaattctttagtattcatctcttttgcacaaaaaaataagatttagtactagtaatagtttaagaagaattctaaccattcaaaaaaattgagaggataattataaattggcaatttggaaggtaaaaattttaaggtgcttttacaattttttttttt

SEQ ID NO: 194960 - DNA, 2277 bp, Cannabis indica
tcccgctttttattatgtatctattccaatttaccctctgtataaaataagcttagattgaatgccctaaataatgggtcattcaggcaatactttctaatttaaacgacgatattgattgtgcgaatgtatgttatatgtatttgtttgtatttctattgaagggtttcttatgactgtcgttagggttgaagaaaatgaggcctatcttttgcggaaacttggagtttgactcgcgccagactgaggttgagcggctctttagaagatatggcaaggttgagagggttgatctaaagtctggtaagaatttatttatttattcgtgtttaataataaaaataataattttaaaatatatttgctattacattgcttatgattaagtaaagacttgattatttgatgtggattcttgtttgattggccaagccttatttgccgttgccaacatgctatttgttcgtttttctaatgcctggagttatgagctgtgatgctttgttttatttgtggttactgaattaatttgcaaagctccggtgaagtcttaaaaggacctgtgtcactttgtggaaactgatttatgttatgcggatttgcttgtttcttattcctgctgtccacgcaaatagggaggatggatggttaaagtttacctgtaattaagcatcggaacagagatattggttgctcacagatgtttcacctgtgattttttctgatttgttgttgacctggcaattctcattgatgagagctttatcttatacttaatcaagggcttccagatccagtgccaaaaatagtgtacaaccatgtagaatttgaatttgtcattagagatataactcgttgacccaattttcaccgtgacgatgttcttctttcatctatcattctgcagctttcaaatttgtaaagtgattatttttttggggggtgggtgggtggggggttatgaagaagagtgtctttttgcttggaaatgcaatcttttttaatgaatgttgagagatgggaaaatagaaattagaaacgaagcacaccatgtgtaagtgtctttttgcttggaaatgcaatcttttttaatgaatgttgagaggtgggaaaatagaaattagaaatgaagcacaccatgtgtatgtgtgtgggggatagcaccattctgggcagtttaaactgtaacttctgggtgtttacttggagggtatttggcaggcgtattgcacatttcccaattttagcttgaatcatcatagagttcagtgtatgagctgacctggaaagatattagcttctgcaaaaaagggtcaataagatattctctgaacatttcatttttttaatggctgtatacgtttcttcccgtataagagaaacaagtttctatgaaacacataccccaggactcaaaaatttctttgacgcaggatttcctggaatgtccatgctcttcttggatggatgtggttctccgcatttcttttttagatgtgaccaggcttcatcttgttgtatttttccagaagaattaatctgatctgccttagccctgccatccgacattccatcagacaccattgctttttcattcctcatgacttttgctcagtgttcaatttcagacatgtatcaccagttacatagtagcatcatgacattgcagccattgcaggttttctgttaatttctaacattgtcttttgagaagtctggatttctataatgtttaaaatgtctgaacttttttctttttttaatcattttcttttttgattgtttattagtattatagttgttgctattttgttattactatgatttttattgtggtttggaaaattaacttggtcatgaatgtggtttaactttggtgtttcctaattatttgattttacagggtttgcttttgtttatatggaagatgagaaagatgctgagtatgctattagaagacttgacagaacagaatttggtagaaagggacgtcgactgcgtgtggaatggactaaggtaagttaataatctttaatggtttggaattttaaaaatttctgcattacatggctcccctttgccaaacaaacttatttggtttgaaaaattcaataattgtaagttttaccactgtacctcaattgacagatttgtctatttgagtcattccaaattacacactagtgtgatagctcaattgttaggcacgtggtttgcctttatagcttgaggtttgaatccctcccgggcatcaacatagcaattgctatggtattt

SEQ ID NO: 194961 - DNA, 4063 bp, Cannabis indica
agagaattaaaaagatatagtaatgcttcaaagtgtcaattctttgaaaaaacgtatatatggattgaacaaatgagagaattaaggagaaaaaaaataaagctatttagattgattttagagtgttatatcactgtctgatacctctcatttatatgttatagatatatatatgattagtaatgttttaagttttaaaaactttgaatccgtcaagattataatgtttatttttttcaaattaatataaattatataaaaatgagaaaatttaaattaaatagatattttttcaattaattaattcatttatatcttataaagctaataaaaaattaaaaaaaaaatagagagaattaaggataaaagggataaagctatttggagagattttagaatgtcatgttactgctttatattttccctatatatatggattgattgattaatgagtacaactaaattcttcattctaataaaccatagatttatattatagcaaaaatttgaaaagacaagttttttttgcaatttaaaaatttataaagattatttttattttatataaaatatatattttttttcttttcatattcttagaaaatatacttatcaaataaaaataaattatattttaaatattatggcaaaaaataaaataaaaatttgtgttaaatttattaaaaaaaaaattatacatgatttatgttaacacaaattttcgttaacgataataaacctgttttcgtgagcacaaaaattatcaaaaatttaagaaagaataataaagtaaaaataacaccaagttttttacatagttttgcagttaattctgcatagtccacgagtcaatcttattcagatttttctgatatagaactagggttcttttctctcaaggactttttgtccattttttcgtacattctgcccctatttataataacataggttggcagttaatcacattcaaattcatacccgacaatattattttctcgaaattgtgggctgtaatcatgctctacataaataaatacggttattattttcaaatcacatacctgtaattaaaaccgcttttaacgggtcaatgctgacataaactcagacgcgctgcaaaacgtatcttgctgaggcatctcgcttgatgtatgaacaacttgatttattcataagtcttccagctatgacatgagcaccggtgtactgagcaaacttgaggactgctctttgactataaggccttgcagactagacaaccatgttctgagggttcttaatagcaacaataaccctggcagcgagctagagtttatcaggagtatgccttcctatggcgagatggatgtctcgctattcgttatccacgtcattcgagctatacacttagttagtataatgtgtatcatcaacacctttctacatatggcgaggttgatgtctcgctatgtattatcgatatcatccttgtgattatgtcttttgacacaaaatggtttctcgtcaatacatgagttaatagtttgtacatccgtgcctcgctaaggaatgtgtagtctgcgagttacacatataccctatcgaattttgcatttaaggagttattacatttaatatttataaataaaaatgtcattatatttgccggttaatattccttgaaattaacacgtgtcatctcctgaagtaccaattgaattttgggtgtaacaattgccccttaaaaagtctcttttaataaaaaggtattttttaaatgattacagagggtatttttgtcataattcattttgaaaatatgcatgctattgattttggcagttttatggtttcgagggacatcattaacattaatgacccgtcttttccacttctcctctatttccagccattagatcttctatattgtggtcttacggttattgggttcaaagtataaaacagcaagaatatatttttctaccattttcatcttttcaaaaacttaagcctttttgaaaaaaaaaattgtccaagcttcttgaaatcgtgcatgccctcattatcactgacgttcttcctgcgaatctacttagacttgctcttcgactccaggtgttcaaaaaactcgtcgagccagaatttttcatcacctaacttttcgactttttatagtaagtatctcaatcctttcttcgtttttttttttttttatttatttgggttacgattacattgcatcttgtcactcccttcagtttaacaattagggttcatgctttccgggtaattttagtgtttaggcataaaaaaaaaatgaacataaattttttcaaaaatttacccttaatttttttttttttaaattgttttccttacattattaaaaaatggggtgtcttgtgtaaataaaatttcccaatatatccgattgtattaagacaagaaacatttcgaccgcattggaacattttctcggtaccgcgttgcacgcgacagaaatacgactctcatagtttccgaaatgtccaaattaatataaaaaaagaaataaaacccatcaacttcacactgttttcacactttctctctcctatctcaaactcttctcttctcatatatagtcattgtcgtctcctccaatccccgaatatatttctttctcaacatctctccctgcaacaaatctttagtcgaaaacaaattctgtgtgaaaaacaagacaaacgccgcctcgccatttcaaatacaacccaacataaaacatcagacttatacttaggccctactacttcattacatttgccttcttctcaagacccattttttaatttttaatttttccagcaagctttattgggaagccggcattgggtcggatttttaagaatctatcagaaactgggtcctcggttggaactgttaaaaggggtttaatataatagcctctattgattgagttttgctggagtagtttggacttggtctctgtttttttgtttctttgatgggtatttgaaatcgtcagacttagaagctttctgtgtcaacctttgctgaagagggtaggtttttcacgaaaacgaaatcccttcaatttttttgttctcttttgatttttctttcttggttgggtttatttcatctttgaactttattctttatacagagtgtttaaattacatctacatggcttctggctcgaagcatagttttccacacagagttccaactgctcaccatgtacgagaaagcagtgatgacttagatagtgatatgggaggtgttgaattcactacttacaccgttcacatacccccaacacctgataatcagcccatggagatcgccgtagagaggtcggcatctcagcgagttgaagaccagtacgcgtctagctcactgtttaccggcggatacaactgcgtcacgcgtgcccagttgaaagaaaaggtgatcgagtctgaaaacaccagccatccccagatggctggcattaatgggtcaccgtgttcggtcccgggttgtgattctcgtgtcatgactgacgagaggggtttggatatagtcccatgtgagtgtgactataagatttgcagagattgttacagggatgccatcagaaccggtgatgggatttgtcctggatgcaaagagctttacaaggaccctgatttcactgaacatggtggtggtcgtgatggtagactacaacagtctctgcctctgccacctgcagcgttgtctgcggctttggctagtggtggcgcggggatgtccaagatggagaggaggttgtcgatgatgaagtcgaaatcacggtcgaattcgatgaatacgaggagtcagaacaatgactttgatcattctcaatggttgtttgagactaaaggaagttatggttatgggaacgctatgtggcctaaggattctgagaacgggagtgttgatgggaataatgggattgctggtgatcctaaagtgtttcgtgataagcagtggagaccacttactaggaaattgcatatttcggctgctattatcagtccatataggtatatacttttcgcccttttctttg

SEQ ID NO: 194962 - DNA, 2301 bp, Cannabis indica
aaaagatatgtttgtagtagtgtaaacttttgtagtaataagaacaattacaaagttaaagaagagttatgagtatgaatataagaagagcagcaatgagaaagtacttaacagcggcaagaagaatggctaagcaatgagagagagttgccatagcacctgaatgcttacaagttctatgtgagctgctgtgaagcttgggagttaggtgtgtgtattcagttattcttttagtggtgggtgcacttattaaaaaataaaaacattttcattaaaagtatctattaaatgtaacacccctatattaaaagaaaaaagaacgaacaccaataactaaattgacctccaattcttctactcgttcaacaatgttgttgtcaaagtgagtggatgtcttcatatccacagtacatatcatataagtttgtgataataaattctagtaataaagaatatactatttcaagtcatcttcaacctaatcaaccagaactagtcatctatctcatataatcaatccgaactccatcaatcacagtgttggcacatgagctagttttaggcaaaagagtcacccaaatactctcatctctatcagcctctaaatctctcaacaattctgatattcctaatttcagtctagactttttatttccattacttgctccaattctcttcataggtaaacgaacaaacgttccagcaaattctctataagtaggccccacgttcgtctcatttactaaattcacatacacatcgaacttcactattccatcccctttagtcttgattccataaaccacaagaacttcctcttcttctttaatctcctccttagatcgataaggtttgggcctgggtacctttactttgatggggtatttgagactccgaccctctaatttattgctaaacaaatgtaaccttgaagtttctttatgataattctcttgagtcttcaatatatgtttggcaatttttggtgaaatgaagggtttagggcgtttgttcaaccatgcaagatcagtctcttcataagtataaccgagctccttagtattcaaaacatccgaaactttgatctttactagttgaagattctcattgtaaaaatagaaatatgaattgagccatacagtatcgtttatgggtaagtacataccatgaatgtctctccaaacatcccaaatacgatcaagatttgcatgatgagaatagaaacatgggtcccaacccgccgaatagaaagctcccatgttctcattgtggggattcgaagaaagcccaacccatgtatgaacagtgttgtgtggtgccaattctacagtgccaggtccatcacaatacccatcttcaccgggatacaatgggcatcccataaaaagctcaggcttttttgcagcagcgataacttgattatacataaatgccaaattagtatcaacttgttcttgttctccagatgcattgccaaccgtatatgaattataattcaaatccacaactttattgaagtgtgaaggctctcgttgtgaatctacaaagggtccttcaagaaacatcttggggaaaatcatggagtcagggttatcccaattccaaaagggcaaagcaaaagtgtcgtcatcgatgaggctagcgagaattcgctcatgaaagtataggtacattcggtggaaagggtagaaaagccattgacgatggatatcaattgtggcagatgagaatttctggtcataagcaccggtgcaaaaggtgcagtggagtaaggcttggcgggaaaagcttcgagggtcgctatagggaagggatttcatgatagtaagagctttggtgtatttagcaatatatgtggtatctaagtggtgagctgagcgacgaactcgaagctttgatgattttgaataaatgtattggagatcgattgccacgtcatcagttgctgataagggaggacaacaattgactaagaggtctggacgaccataggagtcatggcatgatgttaagttaggactaatttccatcgtcatgttggccatgtaaattttggtgatattatcattgcttgatgattttctatcatggcttcctactatgtttaggattgcaccttttaatttcctgaaaagtgatcaaatcaagtttaaactttattatacataataataaaagcatttagtggatagtggattcttttgccactaatattaatttaccataacttaagattgagtactttttttttagtggattcctgtgccactaatattaattaaaatatagtctcttcgcgtg

SEQ ID NO: 194963 - DNA, 1102 bp, Cannabis indica
cccataactatttatgtctctcatgtagacttattctttactacttaaaaatgattcctggcaggttggaattcacgatgtgaaagcagaagtaatgccagcaggaaaagcagatgttgtccgttcatttcagaaagatggaagcacagttgccatggttggtgatggaatcaatgattctccagctctagctgcagccgacattggcatggcaatcggagcagggacagatattgccatagaagcagctgattatgtgttgatgaggaacaacttggaagatgtcatcacagctattgacctctcgaggaagacatttgctcggatcagattgaattatgtttttgccatggcttacaatgtgatagcaatccctattgctgcaggagttttctttccttcactgggaattcagttgccaccatgggcagctggggcatgcatggctctctcttctgtaagtgttgtttgttcttctctgttacttaggagatataaaaagccaaggcttacatctatactagaaataactgtagaatagtaagtatcaagaaaaagggttaggtttctgctttatgtttaggaaaaacactgaaattggataaagtgaggagtcaatgaagtttggcatcccaattttgtgtattatttttcttttttcaacttttctctttcgtctcacaaagtgtaactttactactcccagtcactgtaaatgctacttgtataataaaattctcaggtttctatccttgttcccttgttactttttaaatatgtacttctgaaactatagtaatcctagtgatggtctcttgaaacaactggatgatttgggaattttatgatatcttcaaattaaaatttgtttattttattttacctttctcaacttggttttctctttgatacatgtaaatataaacagtgttatttagtgttttaattactatttataaatatagttttttcaagtacattaatggaccttgcatattcttttccaaagaaaagatttgaagaaccatttctcataggtgataccaatttggaacactggcatacgtaccttattctagaaacaacgatctcgtatctcttt

SEQ ID NO: 194964 - DNA, 1266 bp, Cannabis indica
atgaagaaagaaaatagaaaaaattcaactacatgacattttaaatataagtagcaagatacttttgcaaagctctatatgtttcgcttttctgatagtttcctgtttcaagcctacttattagcatagatctacgcttttgctgtcctacaacaaaaacttgtaggtgtctgggagctgaggaaaacatgatatagtcaacaaaaacagagagataatttgctacatatactaataaacctcacttctttatgagttatccaacacatagcttcaagtccgcttactccatgattcagtatttcccctctttctacaatgaatttcataatcacaggaaccctaacaaatgtagaagcttctatgttataaagtgtctagtgcctaaattcattactcattacgggtagagcaaaaatactaggagttgccttgcctaagaacagaagcagaaaatgaatacggatgtacatccgtacaatttggaatttgtttcatgcgcgtaatatacaaagttcaatctcttggattcaaattttcattcgtgagaaataatattgcttgggtttccttcacgcagtatctttattaaatccatagtcgttgatttcaaagacccattttcaaaatatgtcaggactcgaaacaaagtgaaatatataagagcatttttcatctatgtacaactaaatttactatattacaatatatgtgaaaaaatatttattacataatctaatacaaaataggtaccattattataagtaaggtgatgttctattaatataattaattataaaactcaccatatatataatatattaaaaaaataaatcattctaaattaattacataatacttatattattattaaaaatttaaattaattgtagctaaccacgtaattatttaattatattaaactgatatttatagctctatgtaatttttaaacataggaaaagaagaaaagggcttctatttcaaaaaccgttttccatctaagaatccaacaaaccgtaaagaacttacatttcttaatctatggacttggctacgaagacccgtgatctcatcatccaaatcaccatgcattggatcaatccgcaattggatttcatccgaactagcacctggtctcgtgctaagaccctccctgatcaacagtcaacacatcgtttcgtgaaaaaatagcaacagaaaggatcaaaattcgaacactaggttttctaatttttctcagaattgtgcaaaaaaaaaaaaaaa

SEQ ID NO: 194965 - DNA, 848 bp, Cannabis indica
atctcaaaaccaattgctaatgaatagggtagccgatattcttatatatggctcaatattttacatttcatccatgtgggacattaatgtccaataacaactaccaattctcaacctataacttatgatggttggtactattatgtcaagacaacttcttgttactacttcaatagatgcatagccaatctttctcactaaacataccacatgttttagaataaccttatcttaatagagttctagaaactgaaatcactttgctatgctctctatgtagaatttgattcttttggttattaatagattaaagaaatatagagttaactaaccgggaaaaccacagataccaacaatgtcgcctcgcttaatttgggaatggagtctaccaaattcatcttcatccatattggaatgcctaaaaaaattcaagcttgttcagaaaaatgcttacttctttttgaaacatattaatttgactcagcaaaaagaagcaataccttgcatcacttattacttgaactttagcactgtcatcataaagatcatagaagaaaagttttgaagatgatgctcgtttactcatgattctccctaagaaaatttataccatcataaaaaatttcttaatacaataaaccattttatagttacatgaatggtgagtacttaccagctaaagagacttcaattgtttcaacatgttctccagaatccaagctcccatatgctgcaatgagttcggggaccgatatcgacactgtgaacttgtgagggtaaggattgatcccagctgccttggctaatgccaggcttgctagcctgttctgcaagtattgctgcaacaa

SEQ ID NO: 194966 - DNA, 1193 bp, Cannabis indica
cgggaatactgactgtcacatgtgccaagcccagaggcattgactattctcaaagtgcctacgtcattggtggcattaggactttgtgcctaaaccattggcattaggactttgtgcctaaatcattggcattaggactttgtgcctaagccattggcattaggacattgtgcctaatctattggcattagggcttggagagaattgcgctaagcctagaggcgttgactattctcaaggtgtctaagccattggtggcattaggaattgttcatggaggaggtaaggcctccttgagcaaggagcaaagccaccttaatgtggcagtaaaggatccttgagggaggagcaaggcccccttgagttaggagcaaaatcaccttgatgtgggagtaaaggctctttgagggaggagcaaagacacattgatgtggaagttaaagatccttgagggaggagcaaagccaccttgatatggaagtaaaggctccttgaggaggagcaagaccaccttgatgtagaagtaaaggctccttgagggaggagcgagacctccttgagtgaggagcaaaaccaccttaatgtgggagtaaaggctccttaagggaggagcaagacctccttgagtgaggagcaaagccccttgatgtggaagtaaagagtagcccaacccaaaccccggtcaaaatccacctagactcgacccaacccaaactcaaaacccaaaaccacgaaaacactgccacaaaaatgggcgggttctggctacaaaatatacacagccgaaacccgaactcaaaaaatccaaacttggcaaaacccacccaatgtgcacttctaacataaatacaaaatctagctcgaaaacacaatatgttaaaaagttaaataatttaatgataataataataatataaatatctttgaaaaaataatacaactataattatttatataaattaaaatggtcatataactcaaatacatcaaagtatatatacaactatataattacaattattaaaatatgtaattataccttaatttattttaaaatttgtgagataaaaatttgatttgattatttgtgggacccattttaaataaagataatttgttgaagctacttgtcatataagtgtatgttaaatttgtgtgtgaatcatgtggatataattacataaaatattttt

SEQ ID NO: 194967 - DNA, 2209 bp, Cannabis indica
aaaaaaaaaaaaactaaatcatttaaacaaaaccaaaaattattaaataaatataaaagaaaaagaaataaaactaaaaatacattaattttgtaaacatataacctagaccatcatttacccccgtttctctctctttaaccattaactattctcgagacgctgacctctgcaaccccagacgacgatcgtttgccgacctgcaagcaccttcctccttctccatctctcgcaatcagcttcagatcctaaatcgacaggccactttgagttcagatcctaaacctagagattcgaaacaaccagccactgtgccttcagatctacgatggaaccaagaggtcccacaaccaccaacgatctctcctccgactgttttgatctatccatcttcttctttttcattttttcttttcttcaattttatgtaaattttttaatttaatttttgattttttgaattatttttaatatgatttatttattttaaaatattatttatttaaaataatgtaactacgtgtgctaataaaattatgccacgtatcactacaataaataacagtttcaggcgtgacaatatcaggaacgataaaattattcctgatattgatggtattaggcacaaattatcaatgtcgttctagatagaatatattttattttaaaaataattaaatgattatctagaatgaatatactctcatctggggcaaaattgtcgttcttgatttttttattttagaaattttaccatttgaagagagtggaatttttccctccctaacatctggcacaattcattcgttccaaatactgtctcacctgatacttatgtagataaaaaaaccaaaacacaaaacccatttcaagccacgattccctctcatctccaactagcacctccaccctccgatcgagcacacaaccagtggtccctccgacgagttccggtaagttctatttctagatctaggtataaatctatctctctctctctctcatatctctaatctatatatatatcataatattttttaagttattttttgatatatgttttaatttgatatgccgagaggattcaattttctgtttctatctaaaatttctaaaaagtttaatataatgcgtgtatttttttttctttggtgcacattttgattttacttttaagttaattcgggattgaaatctaggttctcttgataacgatgtgtttgaagcccttaagctggtgaatgtgcgtctagaagtagttttaatagagaatttgtgtagttttgatatctgttttagtttgtagctgaggtgtttattgttttgtcttagatattgggtcctgaaatccaagaaggaaagtgaaggtagttcaattacattggtatttattatttgtgttttcggaaagggacacgtggattccaaataaaagtttatggcccatcagtgggtccaaataacgtaaacggggccaagcctaagattcattcttccttctaggataacattagtataactcgcccaggtaaggtttcgccaagcatagtcaacatctggaagagtcatgactccgtgtataattaatagtatttaactatttagttttattggataaaactttattaattagttaaatataatattattcttaaatattactaaagaaagaaataaattattttaattcttgtgaaataagatattaatgagaatcgatcaattattatttattggtagaataaatagtaaatcttatttgtgaaaaaattgagaaattaattttggaccttaaaatatggcctacacatgtaagcccactctacacgtgtacgttgacatataaaagcccgtaattaatttttttaattattttattaacttaaaataatttaaattaaattaaattaattatcttttaattattaattagataaattatttaattaaaaagataattattaaaataaaagatatactgatattttaatattcgattattagatattcatattaaatttgaattctgtttcaaatcaaattagatatttattttttattttaaataaaggattaagggctttatttataatactatatatagggatatatagtatgataaataacaacagttgaaaaagccagagaataccagaaatagtagagaaaaaatataattagatttttcaaccctattctctctctctct

SEQ ID NO: 194968 - DNA, 1083 bp, Cannabis indica
attaaaaaaaactaaaaactaaaataaaattaacatacgtgacttgacaggtaacatacatgtggaaattctcaagcgttgcatccaaaaattcctcaggtgctctggaccaatttctaacaatctcatacaacacattgcaaagatttaaaggctaaaaatcagcaagactagatggattatcagttacaggatgagattgtgattgtgattagtaccatgtaattcataccatcctagactcttggacgggatcatttggaacaaatcttcatgaacattggcctcagaaaactgtctagtaacttagcatttatgtttatggcgtgagaaattttaactgaaatcgcttcaagcacatgatttaagtcttcatgaggagaagccaaagtgaaaagcccatcaaaataatcacaaaaaacactacccttagagttaagctcctaactgaaagcaaaacgcaaaaaccgtccatcgtaaagaccctttgtcgtggtaaaaatctgaacaagagacctaactctactccctactccaaagaactccaaagttgctacattttttttaatttctattccttgcttttcgactagaagctcacttataagtaagtctgcttcttaaaatgtgcataggcgaaattagacatgtacttaaagagtttaatgcagacgttgaccgcccaaaaatgttacggatgtttactttgatacgagcgaggtcaccaagtaacgattatgctttttttaacataggatcagattttgtaccctgcgtccaaacattatagtgctgagtcaacagcaatgctttttgaaaaatatattattattatgataccacatctaaggccctgatcgtttctcctcaagaattttcctcaagtattggcattaaggtgtttgttgacggatcactaccggggcaactagtattggagtggtattctatcaagatcattttattagtgtgtcatcagtagaggcctttaaaacatattactttgtttttattgggtttttcgttagttaattatgtttaccattcaatgtattattggataatttgttttttttttttaat

SEQ ID NO: 194969 - DNA, 1348 bp, Cannabis indica
acataacaaataaaacaacacagaaaacctccaaagcatcttgtcagaagccttgtagattcaggaatctgggaaattattagagtttatagtttcttcacagtatgtactagggaagctcagctttgtggtgagtttttcctcttagccttctatacatgttcatcagaaaataaatgaacatgaaaaaagtatggatattccatcagtattattttgtacacagtacatttacttattccattttttctattgttttgtgtacaaagtagcgtaaccaatgaatggtgtttattaatgtactaattaattatagaccgattagtagtgatgtggaacgacagatgccatgtctaagttttcaatattaagaaaaaagaaaaaaaaaaacttgagcaatgtgaatttaacatttagacaacgattttatcaaaatatttgttgcagctcaattttcaatttgttcatttaagtatataacaatatctatatttaatcaaagaaagacaagcaagtcaacagtgaaaatgatggagctgaaaaatctgtagagcaagagaagtagagagccatcatgaatgattgcaatgcaacctaaattctcagtcgacgacttaaacatctgcatttaagcttgggaaattcaacacttgaaagagtaataaaggaccaactataaacaataacaataccaaattttacattaaaagcgcagaactgtgaaactttattccatcttgacttaaactttaatactttttcaaataataatattaatataaaacctacgttaaaatcaaactttagcccgatcactttaccaatttcccataataactagatacccttattttattttctttcagaactcaatcgaaacccaattcaaacaaaaaataaaaaaaaacctctcacaaaacacaaaaataaaaaaaaaaaaaacccaaataaaataaagaaagacaacgaaactgaatagatattttattcaaaagatgaaaacgaaagagcaaagtaccttcaatttggagtcacgcagagcgacaataccagtggatcgccatcgatttagcctactggctttggagtctgcgtgttggctggaacagcaacccatttcgggcgcagagagagaggttgaatagaggtgttaggcttgtttgtggttttgagaggaagaagatgagggggggtaaatggatgggaggggcgaggcaaggcaatggcgagaaagggtcaaagtcaaggaagacaataagagtcagccagagagagattgtgttgtataaaccagaaaaccaaaccgcgtttttctttctctgcttcttcttcttacgctcctatctgc

SEQ ID NO: 194970 - DNA, 2174 bp, Cannabis indica
atatattttaataaaatcaaccaaatttaataagtcacaacttacaccaaaaaattatctatatttgtaaaatgtcaaatgactatttgtgggattttaaaaaagaaaaatgaatctgcaaaatgattttataattgaaatttttatttattatataatcaagaaggttctggcaaggttgtgggaaggagaatatatatcactcagtcacacgtggcagccactttttgtatgaaaattatttgtgaatgtagctgcctcgctctgagtggaagtttcagtcttccagatattctgaatcttgatgttgaaaatattaataataattaataaataaacagatcatatatgagactactcaaatttgaacggtaccttcacaaatattttaacttgaatgacatgtaataataaatatttcaagtgagataaaaaaatattattagtaagtattaatagtatttaaaaattataatattaaattatatagaatttcatatgttatgaaggtgttaagtagtactagtatattttagtatttttaataaaaataaatatgttatgagacaccaaaagaatttaaaaataaataaataagagtgttgctaaagtatcgaagtgtttagtatcataatgaaatggttttttataattagttagaaattttttataatttttattataataaaaaatacgagactcgatattaaattatactaatagtaatattaaaaatcacaaaagcattaacttaggtgtctttaacctttctcaacaaataaagcaccgatggctttttgagccagttagctaaatatccatcgtctatgcctcatacttgtttattttgaatatatatacaattaaattaacccaactttacttgttatttattcgttaattttagttgtgccccgaaaaagatcgaagtgccaactgcacggatagagatattatataatgatcacttaatgaattgtagtgtcattacccctatgtatgtgcgtagatgggctatactattactcgcaataatatctctctatatacttaatttaattttagctgatcaaagaaaatgagaaatgatcatgacaatctatatagatattttattcataaccgcaactaattaatatccacatcatcatgcaactgcaggtataatatatattttttataaatttagttataattccttgccaaagaaaagaacatacaaatcatatatattaatgtcgaagataaggattgtctgtgatataccagtatttgtctatttagtttagtgcactaaattaaaaatgtctccatctaagcgtactgatattcgcttctaatatactattttatatgaccaaaaaaaaaaagtaaaaaaggacagtacatatgccgctccttataataatagattattttgagcttgttggtattgaatggtatggtcagccggagacatattaattttccaggtagatttgtctgttatattgtctttgtttatgttttaagtaaaatatatttcttttcttacgtacaaaaagatcatatacctaattataaacttatattacaatttataatgtggcaactagagataagatggacattgacccctcaatatataattaaagttaaaaagttgggatggttgttagtactgtgtagtggaccagtatgctgtggatctaattaaacccaacatgcatatcaatgtctgtcttctactactgatataattaactacttgtatcaaatttggaatcaaatatattatttgtatcaaatttggcccatatgaaccaatgctattatgttctaatgtacaataatatatgtaaattaggataaaaagtaaaataacattaatgatcattcataaattaaaaattttaaaaataattaatgataatttctattctatataaaatgtggtatgtaacaaaatttttggtttataacgatatttttgaatttctacgttaactttaacaaaatattctattaattaacaaaatattctttaatactttaaatagtgtataccaaatatcaactcaataaggaagagcaccagagggagagcaccgaagtgagagcaccaactattacttaatcaactcaatatttacatgtcattttttttagtatatttaaatgaatttaaataaaaa

SEQ ID NO: 194971 - DNA, 1733 bp, Cannabis indica
cacccttctttaacttttaatatgaaaacactcacacacacatacagatatcaaagatatcattttatgtttagaggactaaaagtaaatgactcaatcactatcctcttttaaatagttatgggtgagctatttcattgctatgcttgtttttgttggctcaattaagtatctacctgtaaaaataagcaaatgagtggaagtttagataatataaggacgataagaatcattaattgtatctcaaacacgcaattagtgatgaatggaataacagttttatatcgccttgtaagtttgtctcttttgtcatcgattttaaaaaggccttaattctttattctgaagttgaagctcatgtaaagttctttctgcacattgtgattcttgtaattctgtgcctagattaggtaacaatggtgcccatttaatttctcatcacatcattcttcttcctattggcagtgccagctgcattgagtttgggcaagtggatggggccaaccattaaaatgtctcttccaagctttaggtacatttctctaaagcgctttgagttcataaacaattatggacattatcattaaattgtgttattatgactatgtagcggccgtacagaatatactccagacttgttcaaatattcttgcaagattcagtgcaggtttctctttcattatttttctttttattttatatcatcaattggagtaataaattaaagactgtctttttaatgggttcctttatgttcataaattagagtacgagcagtccatccaacaaaagtgtcaagaaacagtgagttggaacaatgttcagaacaggacaagtgcagtagtagtagtattagtaccactaccatggatcattcgaccagtgcagctgtgatgctatcaaagcccatatttgcattgaaattcagctgtatgactatggaggttgaagctcctgttgtaatttccaactgttctagttctaataatcccttgagaacttgttaatcaagatattattctttatgttgaatgaaatcccttatccctctatgaataaaagaaagagaaaaaaaatgcactctcttctggccttgcatggtaagattagtaacatgatcagttgttttgaatagttaataatataaatacaattgcaagaatgacagcaaaacacttgttttttttttctttttctcttgagatttttacaaattcagctggtttccacagtgtggaagggactctgtgcaacagagcaagaacaaaaagaaagaaaaataattgaagttaatcaacgaaattcaaacttaactttacaaataatctcaacccaaagattatcagaatgcttcaggtaaaggtcttccttgcaaaaaggatttgaatagcacaagtgatctctcaggctgagagaatggggcttcatgtgatgctcctctaatggtggcaaaagaaagtatgttaccataaacttgagtccacccaccaacctaatagtgaaacaagaaacacatccaatatcagttaacattgctaaaaatcacttataaaattcatgtcttgtaaatatatatttatataaatgaaatatcacctgttgtccttcaaaccagactctgtatggcacagtggtattcagactcaactgttttgcaagcccatgtactaatgttctacttccagtcaaagggataacagaatcttggtcaccactgaaaacataatatgaag

SEQ ID NO: 194972 - DNA, 2687 bp, Cannabis indica
caaaaaataaaaaagaaacaaaacaagattaataggataacttttgtcgaaaacgtgagaaatatatatatatgtataaatatatacattagatttgtgttttcttttgttaaatgtgttccttatttcactttgttttttatgtttactaattgaagagaagaaatgaaaagagtcttaacatagatgggcttctctgaatttttttgtgatatgcaggatttgatacctcatatggctgaagagtatggttttgagtatgaactagtcacttacaagtggcctacatggttacataagcagaaagaaaagcagcgaatcatttgggcctacaaaatattgttcctggatgttattttccctctttctttggaaaaggtattttatctatagtgcttcctcatttcttattcattgtttgatttgagattctcaaacctaaatttgacatcttccacctatatataggtcatctttgtcgatgcagatcaaattgtcagaacagacatgggagaactctatgacatggatataaaaggaaggcctctagcatatactcctttctgtgacaacaacagggatatggatggatatcgcttttggagacaggttattatcaatcaaatcccagtctatttctcattttaacccaaattagatggttattaattttaaccagggattgttatactgttatgaatgctcagaagtcatctactcacccccaccccctaaatgcatttgttttttttcttatggagcagggtttctggaaagaacatctgcgcggaaggccatatcatattaggttagtacctgcttctattaccttaatcaattgaaaccttacctttttttattgtcattcataaaggaactttaattatcactatattttgtcttcagtgctttgtatgtagttgatttaaagaaattccggcaaactgcggcaggagataatctgagagttttctatgaatctcttagcaaggatccaaacagtttagctaatctggatcaggcaagtagttaaagtcattttgcacaatttgctttttattggaatcagcggtgtgctttggttgttcagtttctgtttttgggcttttttatgttgcaagcaaatgtttaagctagaaagtaatatttttgatacaatagtctgagtctgagaactgatggaaaatctccaagtccattattcttacaaataggaggacatttacgaaatcgaatgtctcactttacaaagtagagactattagttgtactgattagactatatacgatatgcccaagtgctcttatgctcctatgtatgctgtgtgttctttctctttgcttggttatgtgtgtttcaaagctacattctgtttattataactcgaaattattgtgtgatcttaaaaccaaaaacacaatcagcttatttttgagatgtttactgccccttaatttacattctatcaaacatctgagttcttgcttgcttattctatgttctggtttatgctgattgctactttttcatatccaggatcttccaaactatgctcaacatgctgtacccatcttttcactcccacaagaatggctgtggtgtgagtcatggtgtggtaattccacaaaatcaaaggccaaaacaattgatctttgcaacaatcctatgacaaaggaaccaaagcttcaggtagcttgcatggtttaatcttatttcaataattttacaaaaacaaatccaaaccaaaccaaaccgatgtttcacattgttacttgtgattaattttctttgtattctctttttcaagaaaaagtatgaatggtgaaaattttattaaacctgattatttgtttcacggtttttgcagggtgctagaagaatagtttcagagtggccagatctcgatttagaagcaagacagttcactgcaaagatcttaggtgatcaattggatgaactcacaggggccacaccgtctccgaatgagtcacagacttcagtagcggatcattcatcagaggacgttgaatctaaggcagaattgtgagaatatatatggtaacgaagaatatttgcttcatttactataacccattgcagctctggtagttctcaccaatacataattatacctcaaggtagtggcctttgaaaaccataaatctctactaaatattagatattttccccaaagcctagttatacagagaagagaagaaaggccttagtgtccaatttttgttaaacattttcctactggcttaagaaaaatggcccaaatgaaaggaattttgaagtcaatttattatggatagatttttactaataacacataggcattttggttaacttgctctatttgagcttgaaggcaatgtaatttagaactttaattttggtgtaccatttagtgattgaaatttacatatactcttttatctactattcagagatcgtacaagtactatacacctcgtctatcattgtgttcacataattgatggttgctctcataacaaatgtgctttagtttgtgaagtttggtttaacaagttcactcaagaataagattagattctgtttggttatacctttcacttaatggttgataaaaatgagtaaattgggtttgtatattaaaaatataatttggttgataaaattgactaaattttgtttgtacatt

SEQ ID NO: 194973 - DNA, 1258 bp, Cannabis indica
aagaaatttctttagaaatagagttaaaaatccaagaaattacaatattgttattcataagccatgcattatacataacaacatcattagccataggtttagggatggtaccttccaagaatcctagtttattcttaacagaaatggctaattgcatagccctactccaagacatgtaattgtcttgtccagtgagcaattgagaaactaggatgttacctggattatctccatggtgaaggtagtagggatcggatggatcttcaaggggattcctttgttgaacaatctcgtgctggttttgaattattgggtttccagaatttccaatcacagcttcagctacatcgcttccgtcttctggtgtactcgacattgaagaaggaaggggagaacagagaaaagaagaacaccgggactgaaccagtcacacaaaaaaaaagccggagaagtaacacggcaatggcaacggaagagaaaggggatcaggggaaagctcgtctttcccgctctgataccatcttacgaaaaggaaaaagactttattgaatgaataatcgaatcttacagaaaagaaggaaattaaaatataaaggctgagggtttatatacaagaggtagagagattagttagtgaaataagaaaagacaaagcagagcagctaaaacaatagctaattcttgttaatatgtcagaatagaggtggacttactgaatttgttgtagtttgtgaaaatttttgagagtggcttggctgcctgaattcatattgattaacagtctttcttcttggtaaaaacaattagatttatagaatgacatattagtagaggtagctcactatatatctaattaattagattgtactaatttttggagatgtaagagacatattttttttcgaaaggaatgtaggagacaggtaaaaataatttattatatctctaactggtttgcactaatttaattacgatgtaagtttgctatgttgttgtgtgttttgctatgttgttgtgtgtctttctgtagtattttctctatattaggaacagaagtcacatgtcatttgctcttgttataaataaatgtatagatttgtataatttcttaaagtaaaaaattattttttatataatatataatagaaataaattatacatttgtggatgctcctttttggagtggcatcttctacctcaaaagcacgagtttaatctttcattaatgttattcgaagtcatacatcaatgttgcatg

SEQ ID NO: 194974 - DNA, 1011 bp, Cannabis indica
attaattactatacaatattcattattttacaatagctaaaattttcaatctactctacaattctcgtaatcataaataaataagaaaaacaggtgatcaccatcccttattgtacttatgtcatcaatttctgcactctctccattgatgatttttgtaggcttgcttccaaacttttcacctgtaattttacaaggactgagaagaaactatatgcatatatatatatacctaagtgcaatcttataatttctttgtaatagctaaaaattaaagctttatttataaatttaatgaaataaatggaaaaacgacgacagataaagtaaaataactcataattattttctgccctacaaataaatgaatggagtacccacgagtaattaaccctaccctaataatttttatgaaaaattattaaataaattaataaaattattatgttcaatggtaaaaaaaatattatcaatatatatatatataattacctaaataacaagtaactaccttaagtaattaccctaccttataaccgcatcaggtatatattttcatgctcttacctagctactctaaattctaattcaactagtaataccctacttatataagtagagtatttacgggtaattaaccgagtttcggagttaaattaccatccctataaacgagtactgaatggtgcatatatttttaacttttttaatgtataatataatataaaagtataaagtaaaataagaaaaaagtcaaatttagcaagttaaattttgaagaataaaatagaaaatgttggagtaatttattaaagcatattgaaggttcatatttttatttaggctaattaggattttcgccccttgaactttgacatgtaccaaattatgttctttgaacttttaaggtcgttaaaaatgtcccatgaactattgagattgttggatttaagctgagtgagattgagagagatggacggtgtgagtgatgagatcgagcgagatggagag

SEQ ID NO: 194975 - DNA, 1627 bp, Cannabis indica
aaaaaaaaaaaagtacaaaaacaataaaaaattctaaaaatacaaattttaatatttttacaattttttagattttatttacaagttattgtcatattgttattttattgttaaatttttgttcttattataattattaaaatataacaattaaatgtgaaagaaaaatattagtgcttggcttgggatcttaacccgaccaaattgacaaatttattgggccggtagaaattttattttttcttgattgaatgaatttcacttagatttttgtaatacaatatttacgttaagttgaataaaatgtaacggccaaatcaaccggcatacaccctattagaaaattaatattaagatatttatcaaatttctacactataactataaaatcacaccaattaaaatttaattagtagtatgtcttgcatattttaaatatctaatccctttttattattatgaaatttgtgaaattcacagttaattgttgatttggcttcaaagtaattgatgaggaacttttattatccctaattaatatggctaataaatggatgatatatatatagtaagaaaagaaagaatgacacataaatatgtagaaaacatcaatattaatacaaacttatacaaaacaaaaaatgattaattgcttaattaatataaatacattaatttactcaaattaagaattactaatctatatgtattaacaaaatgttgtatcttaattaataattaagattgattatttttgttcttcaacgatttcatcatgagtagtagtatgatgatgatgatgatcaattggaaaacgttgaagttgatcagcaaaagtaggtgaacggttatgatgagacaataaatgttgaggactagtattattactattagtattgtggtggtccatagtgttaacggtggtcgtggttgtagaagataattcatgttgtgaagtttgatttctctttcttttttcttttacttctgagtgccattgttttatagctttcactgtgtgctcttctagaactgcactcttgaagtttgatcccatctatataatatataatatataatatatatatttaagaaaaatgatgatgatgagttgaattattaattgtatgaatagaaagtataaaaataataatttgatgaagatgtttatttattacctgtgtaacaagagcatacagaggaagagtgatgtaactacacattacttgaactgtcaccctgccaccaaaattaattattttatttattacaaatcaaattcaccaaaaatatatttccaattattaaccttaattattttatgtatatagaggaaaatcagtagtacttacatgatgttttggtaactagaatttttagttttttttttttttcataattgttatgttgtaattttttaggatatctataaattttatttatttttgaataatttacaatactgaaaataaaattcaaacacttatttattatcatgtgtgtataagaaaaaataattgcacatgaaacaaaatatgtatttgaatcttaactttagtatagtaagctattaaattcattttgaaaatttattaataatcctaaataactataatcaacaggctca

SEQ ID NO: 194976 - DNA, 1143 bp, Cannabis indica
tttgttatttatgccaccgtgagaaagaaatggttccacacacactatttttctgcaatcatcccaaatgtcttcggaaagcttctaattttgatctcagtaatcacataacttggcatatggctcttgagattgagcttgagcaacatgcaacaatacaatggagcatttggagtgagaggaataaagaaaagcatcataaaacaccaagtccacatgatgttcttctctacttcgtgtttgcttatcttgaagagttccaatcaagtaggcaactcataaaccagaacacaactagttcctcttcctcagttcatgttgtcaacaaagatccaccttggatgaatcaaccattgggtaggctaaaattgaacacggatgttgcagttaacagcaggaataactcttttggttttggtgcggttctttgtgacaggagtggtaatattattgctactatgttgatgccattcccaggtacctttaaactggaagtcatggaagcaatggctcttatgtatggcttgcaatggcttaaagatatttgtttaactactcactttattgatattgattctcttttagtggttaaaggattacaatcctctcatgcttccaactctgaatttgattgtctgttagctaatatttctctcttagtgtccaactttcctggagcgcagatttctcatgtgtatagatctactaatactgttgctcacttactagcaaagtatgctctatcggtgtactctatttgtacttggatggaggtggttcctccacctctaaatgcttgttgtattatcaactcttgattcaatataatttgcatttttctaaacagaaaagtatatgaaagagtaatttatagccatattccttaagtttatttcatggacatagattaatacctaaacaaatttaacggtaaaaatacatttttgttacactttagttgcattatgtggccattaagtcccaagttactattcaaatttcactctttaaatgaaggaaatgatttaatttatatttttttattaaaaaagtattttaaacattcactactacaaaaactggttctagtgactcttattgagtgactctaaaacaatttagtgactcttcaccgcgtgtcac

SEQ ID NO: 194977 - DNA, 3704 bp, Cannabis indica
acatatgtgaaattaaaataaatatcattgaaaatagaaacaactcgcgttgaaaattaaaataataaaatgaaacaatttaaccttcaaaaatagaaacaatttcatctcgaaataaaaactatagtttgtgaaataaaaataactagtaatttaatatcaaaaaataaaaacaatttaactttaaaaacagaaactatagtttgtgaaatgtaaacaactgacatttaaatagaaattgaaatcaatttatgtgaaatagaaataaataccataaaaatagaaatcattaaccaacagaatgagaaccactaatattgaaaatggaaaccatttaactataaaataaaattgagtaacatttaaataaaaaaatatatgtgaactgaagacataatggaaaatattaacaaataaaatggaaacccactaacatcacaacagaatccatttaacatcaaattgcaaactattgtgaaatagaaacaaatatcacaaaaatagaaactattaactactaaaatggagactactaacattaaaaatagaaacaacgagcatttaaataaacataaaaacccatatacgtgaaatagaaacaaatatcattgaaataaaaaccgttaaaccattaacaacaaaaattgaaatagaaactattaaccaaacaaacggaaaccactatcattgaaatataaaccatttaactgtgaaatgaaaactattgcttataacaaaagctatagtggtcaaaatcaaattgatgggatttgttccatgtaaaaagtagaacctttctctctctcgagccttctagtgtgcaatttattttgggtttcttgttctatccagttgtttgatcgccttaatggtgtttatggttaattgttttttgttttttcctatcatcattaatttgatttctttgagatctttactcttgtatttaattgtgattaaaatctgagagatgtttgtttgtctttttatctctctctgctctcatttaatagactatcctttcatattcctccatctactgtcattttcttcattttatatctgtttgaatatctaaaattaattgatctgtctatatttctttattcttttcctcttcttttctaatcgtttgaaactcaccataaatggaacccgccattttggctcttccaagaagaagggcgatgattacccctaagatttctgagatctgcatccagatcatgcagaggacggaagagactaccactcatgacttcccccttaagcgttggacatgcaggtatatctctaacctttgttgtttaagattttgggttatgtggagatccttattgttatgcttcttcctgttctggaaaatggatcatacaactaaaaatatgtcccaagctcttaatcttactgagaaggaagccattgttcatgagcttcctcttgatgtaggagataatactcagcctattactggttattgtctggtttttcgggtctttaccactcgaaccattaagatgaaatggtttgaggaggccatgagaaattcttggatcactagggctcccatcattttctctgagtatgggaatggactctttatggtggagtttgggtgtgaaggggacatgcgtagggttcttgaagggtagccctgacactttgaccattgtttagtcactagtgcaaaccgcgcaggtttagatacccttctccctaatcaatttagatactccccattctggattcaggtccactccattcctttcggaatgaaatcctatagtcttgccaaaatgatagggaatgaggttggggattttcttgaagctgatagaataactatcttcaaagcctctagtctttttcttagggtgaggattttagtggatgtctcgaaacctatcactaggggtattctgattgattcccgaaatatccacaaggaaaaatggcgcaatttcaagtatgaaaatcttcccaatatctatttccattgtggaatgtttgatcacacattgactaaatgtgtttcctatttgaaaaagtgtgatgaaatggcttatccccctccacttcattataagattcctttgaaagcccctgctaaatccaatttcaaacataatctgtttgatctgtccaactccatcccttttgatgaaataggcttgcctaccaatactatcgatcataatcttgctgctgcagtaagtcaatatcttactactaaagacttgggagatggttcttcatcttatgcccaattgcccatactgctggtgtggatggtatgatttctcaaaacattcataaccggtcccctaatcttagtaatgataggggtgctatgaatgtttttcctactatgatagattatcattactctaacaatccaactggggtcacgcctgtcagtgttcattgtaacactccggttagtgcttctcctactgctgccatcactgtccatgttcctcatcaagacacttctgaatctgatgaggaggaggaaaggtttacggagaaggctaaaggaaaggctattgctggttccaaaagccagcttttattcctcattcggtcatgataggcgactctctcaagaacatcctcaaaaggcctcgagttggccctcttattgctgaagttacctcagatgctgcttcttctttggttcaggcgggtgttgcattgcaaccccgcccaaaaaaattagacttttgtgttagaattctcatgggttggggaatccccgagcattccgtaatttatcccttattttcaaaaagaatagtcctatgtttatgtttattatggagtctaagcttgttgctagtagttgtgatagtttaagttctaagttgttttttgattatacttttgaagtccctaggcagggtatgaaagggggtttgttgttattttggagaaaggaggtcaaaggaggtcaatgtcaatattttgaattactccttgaatcatatatattgtattacaacttttgatgataatattactactcatatttcttgttattatggttcctcctacttaaatgataaaattcacacttggaaacttttggatagactttatgattcagctcctcttttaccttggcttatattaggtgactttaatgactatctttctctaagtgaccgtagtagtaattcccgtcctcctcattatgctatgactcacttttaaaattttgtcaataagtattctctgtcccccctttattatgtcggtaataaatatacttggaagcatgcttctatttgggagagattagattggggcattgttaataaaacatggctcagtacttatcctaatgccacgttgtaccatttacacttctactattctgaccatagagttttaaagctaattagagtgatgagactatgataaagactcatcacaagagatttatgtttgagaaccattggttaaccgatgacatgttctttcaaactgtttgtgattcctagaatcataaaaataatgaacctaatgcttcctctattcaaagctttcttaataaacaaaataattgtaattttgccattcagaagtggaataaatcttataatagtttaggtaatagaattaatagtatagatactgatctcaaaaatcttttctccttgcttccttaatctaatgatgctatgaatgaggcctctaaactt

SEQ ID NO: 194978 - DNA, 1619 bp, Cannabis indica
ccattgttctctgttttcattcatggtatcagagctatggcttcgaatcgaccacaagctccagaaaatatcaatccagttcaagaagctgctccacctcaagctcctgaagcgattttaccgaacaacaacctgcttccactcaatctccgacttgatcgatcaaatttcaccctgtggagatctctagttcttgctgccgttcgtgcttacaaccttgatggctatcttcttggcacgattcccagacctccacaacttcttgcaggtaatgctcctaaccctgcttttcaacaatggattcggtttgatcaattcatcatgcactggctaatgaactctataactgaaccaatgcttggttatgtaatcaactgtgaaacgtctgctgagatctggacaatcttcactcaactttttgccaccagatcaagagccagattacttcaaatccgtggattattgcaatccacaaagaaaggctctctttcaattgatgaatacttcctcaagatgaaacaatatgcagatgctcttgatgcagctggtcaaccaatctcaaatgatgacttgattctttatattctcggtggccttggttctgagtatgaagccatggttgttaatctcacttctcgatccgacaacccaaccctgcaagaagtgcagttcatgctccacagtcaagaaatgcgaatcaatcaattgacaactgattctctcacaaatgtacaagcgaatctgaccaacacaaccaataccagaggtggctaccaaggaaactcaggccgtggttatcgcggtttcagaggtggccgaggcaacagaggtggtaggggaaatcgccctatatgtcagttgtgtggcagagccggtcacacaggactcaaatgctaccacagattcgacattaccttcacaggccctcccccaaatcaagatgcttcctcatcttcaatccctcccaatatcaacccacaggccaatctctcagaacttcccaataccactgatctgtctggagcttggtatctcgacacaggtgccacgcaccacatcaccaacaccccagacaacctgtctcattctgcagattacaaaggcaaagctcaagtagtggttggtaatggctctacccttcccattaatcatattggtaaatctgtcattcccacatgttcaagtaataaacctcttgtactaaaagacatcttacatgttcccacttttacaaagaatttactcagtatttctcaatttacctcacacaataatataaccattgaatttgattctgtttcttgccttattaaggacaagatcaccaaggaagttcttcttcggggaactgtccgtgatggcctctaccaactccaagtacctccctcacagtccaagcaatcctgcaacaattcagcaaccacagtgtcatccaatcctcatgttttcaattacactactacttgtaatcctgtttttgataagtccaaaactgtcccaatttggcattgtcggttaggacatccatccaagaatgttctaaccaaagtcttgtctagaatatcaccaaataccaaatgtaccactactgatttctgtaatgcctgtcaaataggcaa

SEQ ID NO: 194979 - DNA, 495 bp, Cannabis indica
aaaaaaaaaaaaaccctttttttgaactaattattaatgaaaaaccttctattaattgtaattaattttatatagttttaaagtatgtctttaaaaaaattgacaaagaaaagacaggaaagtatgtgtttttaaattattttgattagaattatatcatagtaattatattttaaatttagcacatatatcatttatttattagcatataatttttttcttttttaacatgatatatcttttagatggagaggagtaagtaaaaatgtaacatagctaatttaacatatatatatacataccaataaatttctagctaaaaaaatttttaaatttcatttgtgtgaagtctctactctaggccggagaaggtttacattactaggtagatctataaaccaaaatttatatgctatatatgagatagattagagagatgaaatgttttaaaccaattcaatattgattcccttttcaaaaaaaaaaaaaaaaaaa

SEQ ID NO: 194980 - DNA, 1507 bp, Cannabis indica
aaaaaattgaacatacatatatttcacttaacatcacttaattaagaaaaactaattatacgttgcacgtacatcaacttaataaaatattatatgtagctatacgttgattattcaacaattttgtgtatgtgtttgatataaggatgatacattgtaattaattacacaatattctaacttataaatattgcaatttacacagtcatataatttatttttaataattaaaacttgacacatcaattgtgatataacggtaaatttaatgttgcgctttaatatttgagtgataaatttcatatgctttatatataaaatgatttgatagataatttgaaaaattcaattttcatttttttgttgttcaatttatttgtaaaattgaatttacacatatatgagaaggaaaataaaatgtgtggttaaagattgtgattgcatttatagaagaagaaatatataaattaaacaacacttccattatatatatgcattatttgtttatttaagatgagttcataactcattaattaaatatacttatcacaacagttatgaattggattgagattgctcatatgaactttaatcacacaaaatagctaggtgagccaggtgtaggcaggattagattagagtcatgtcaatgtaggttgagccattgctttctttcattctctcttatttccacaaaatattttttctgtgatactaatcactaatataaataaaataaattaagtaaatgtaacaaaaatattgttctcatttacttcctccagaaaaaataaaaaccgattattctataaattgctgcatgtgttcaaacattacttttcactaaataatgttttacaaaataatcttacacaatacatcatatcacacttaacaaattacacatgaacaccctattttgctatttttgaagtttatttgtaaaatatttactatttttatggaaaaataacaatataagtatttaaagtattaagtttgaatattaaataaattcaatgattacttttaacagtataagtatctaatttttataaaaaaatcaattttttaaaagtttcgtcttcgtccgtactcaataaatttgagttttatatgtatcctgtttaagataataacatgatctaaactaattaaattaaaaaaatttacagttttataaatattaaatacttattcatttgctaaaaaaattattaaatttatattgtttataaattcaaaattacagtatttaggtcgttatttatttattttttactaaattttcacttttgctaaatgtgattggataaaaaagaaaagtaggcaatttttagtatgtacaaaactaaattattaaataaataaaaatgtgacacatgtttgctcgtagggacttgatcgtgagtaaagggtacaaataggacattgtgtacgtcaacttattttattacaataataatgatttgccattaagaaggttagcttttgcataaaaattttg

SEQ ID NO: 194981 - DNA, 3681 bp, Cannabis indica
aactgcagaatatgagagcaacacaggagggggagttccttctctttccaatggataaattgctatgttggaatgtctgaggagccaatagtcaatccaaacaacaattaataaagcaatttattaatacacaaaaggttgattttgttggtcttctcgagactagggtaaaggctccaaaacttggagccttgtactctaatgtttttgatggatggtgtttctcttccaatatagcttggtatgcaggagggaagattgctataggatggaacccttgtagattcactgttgatatcatcaaatgtactagccaattaatacatttgaagatttcaacagttgagagtttcaatagttttcttactgtggtatatgcttctaataatcgaggagaaagaaggcttttatggaaggacatatgtgaattgtactctgatgaaaattggtgtctgatgggagactttaatgacattttggccaaagaggagagggtggggcttagggttagatcctatcctgactgtgatttctttagatgtgtgaacttctgcaaactagaagatgtcaaagcaagtaagaaatttttcacttggacaaacaagcaaccaggtgcagatagaatctattccaagattgacaagataatggccaatcaagcatggattaccaagtatgaatttgttgaagctgtattcctaaatgagggacttttcgatcattcccttggtattttatctctacatcctggaatggtggggggaagcctttcaagtactttaagatgtggaaatctcatccaaagtatgatgatcacctaagagaagtgtgaaatttgggaattactggcagcaaaatgtttcaggtagtcttcaaattgaagcaattcaaaagtagattgaaaatgataaataaagatggttactctgatttacagaaacaagttgctgaggccaaaatagacttggatgctattcagaatcagttgcaacaccagcctctagacccctccctacaccttcaggaaaaagcaactcgagagggattggtgaaagtgcagagtgattacacttcattcttacagcaaaaggccaaactcgattggatacaaaatggatatgctaatactgctctatttcatgcttgcattaagcaaagattgaggcaaaatcgcattctctctattgagaatcaagatggcagcagggttaatgatccaaacatcatcactgaagcttttctggacttctacaagggccttcttggtactaatcgggagcatagaagacaagtagataggaacatcttaaatagaggtcttatggtgacatcggttcaagcagacagactgttgcaagaattctcaaatgatgatgtgaagcaggctgttttcagcatacttgggaacaaatctcctggccctgatggcttctccagcagcttcttccaagataattgggagattattggggatgatatatgtggagctgtcctttccttcttagaatcaggtaacatacttaaagaaataaactctaccataatgaccttggtgcctaagattaagtgtcctaattcgtttaaagattttagaccaattgcttgttgtaatgtgatttacaagattgcaactaagttattgagttctagaatcaataacatcctccctgaaataatatcacattctcaaggtggttttattaaagggaggtttatatgacataatattctaatttgttaagacttggtgagacattatggtagaaaggccaacaaactcagttgcatgatcaaactggatctccaaaaagcctatgatacaattgagtggagtttcctagaagagatgctaacatgtttaaacttccctaagaagttcatacaattggtaatgaactgtgttacaactcccaagttttctctgatgtttaatggaacattacatgccttttttgaagccaagaggggaattagacagggggatcctatgtctcccttgctgtttgtattgggcatggagtacttatctagagttacgaggaaagttggggaaaaagaggacttccaattccatgatagatgctctgaacttaaactcaaccatcttgcatttgctgatgatgttcttttattttgtcatggagatttcaagagcatactctacatgttgcaggtgctcaaaactttctctcttacatttaaactgcaatatattgcagtaatatgcaacttgggttgtgaatcatatcatacagcttttaggtttcataaggcaagatatgcctttcacttacctgggaatccccatttgtgggaaaaagatatctggaaaagaatgtgaattgctagctgaaagaatgtccgctagaattaaaagttagagttccaggaatctctcctttactgggagaatcactctaataaactctgttttaattgctatacatgcttattggagtcaaatgatgatcttgccaaagaaagtactaagatccattgaagccatctgtagagcttttctttggaaaggtcaagcaatgttccagggagtagggtcagtagcttggaataacatttgtcagcctaaagcctcaggtggtttgggaatcaagaacttggagcaatggaataaagctgccatttgcaaatatggctaagatggtttatagtgtgtacattaagaatcaagagtggtggagctactctgcttcagtacattctagctgatactggaagaagatggtagccctcaaagatcagatcagagttttagtggatcctgaagcttttcagagataaagatacactatttcttcaggttacaaactatttatcccttccccaatccgactgaactggtgtagggaagtttgggcaaggctaaacacccccaaacacagtgtaatcacatggctggccatgttcaatagactgaaaacacaggacagattgcttagatttggagtccaggtgaatggcacttgctaccttcgtgaacttcaacctgaaaattgtcaacatatgttttttaaatgcaaagttgcaggttattgcttgctggaagtgaagaagtggttgaattggcatgcccaaaccaataacctccaacagctgatcagatggatcgggaaagccaaaatttctaagttcagaaagagtgttttggctactgtaacagcaggtctggtttacaacctatggaaatctcaaaatgattcaatttggcaaaaaacagtggtcaatcctgaaagaataattgaagaaacaaaatggactattaaagttcggattgatatgttcatgtctcgaaaagtcaagagtagtgatagagattggtttcttgccttataatgcaaatgtaattgcttgtatagctttctaattgattgtatatagaatttgacccttcaatgggtgcatataggttgtaagaaaaaaaatcttatttgtgcaatacaattcattgatttataaaaaaaaaaatcaatttattttgaaaggaaattttttttaaaatattaattcttattttaaaaaatacaaaaaaaaaataataattttaccaaaacattttaaattttctaattataaaaaacaaacaacggttcaaatatgcattaccaaaaacaacctaagttaattacaaaattgtcatcaatgcctctaaagtacaaaacgact

SEQ ID NO: 194982 - DNA, 2045 bp, Cannabis indica
tgtcttagatctttaaatccaagacccccaacattcttatgattgcataacttattccagctcaaccaagacaccccacggctttgctttgaagattgccaccaatacttgctcataacactctcaatggctttacaagtctttaaaggaaaaagaaaaacagacattgcatgattagggatagcttgagccactgttttaagaagaagttctttacctgccttggataagaaccgtccttcccagttgagaatacgcttacaaaccttgtccttcacaaaaccaaacaccgcatttttatttcttccaatgatacaaggaagccccaagtaaagactgttctccccagcctcctgaatacccatcctttgacaaattaaagcacgcacaccaggttgagtattgcagctaaaaaagaccgaggacttcgaaaaatttaccttctggccagaggcatattcgaaatcatgtagtagtgtcaacatcttattagaatcattgtcattagctcggcaaaagacataactatcatctgcgaataacatttgagaaaagactggagccccattagctacccgaatgcctctaatttgctgtgaaacttcataatgcttaattaatgaagagaaagcctcggcacaaattaagaacaagtatgaagataacggatcgccttgacgaattcccctagttggcacaactggaccaatatgcctaccactatgagtgaccgtatactccacagacgagatacaagacaatacaagaaagatccacttagcatcaaaccccattctctgcagaacaacttcaagaaatttccactcgactctgtcatatgccttgctaaaataaagtttcaaggccatatatccctccttgcccaatcttttctgtttaagataatgcatgacttcatacgagatcatgatattattggtcataaacctcccagggacaaaagcactttgtgtttcggatatcaattgtggtaagacagctttcagacggttagccatgaccttcgaaacaaccttataaaggacattgcataagaagatcggtcttaaatctcccacgttgctaggacttttcttcttaggaactagaacaatgaaggttctgttaagccagtgaggaagagaaccatcaacaaaaaattgacgaaccaaagaaacgatatcttccttaacaatatgcaaacatttttgaaagaacctcggagtcatgccatccggaccgggagacttttcgggctgcatttgaaagagcgcattcttcacttcctcctccgtgacagctggcagtaagtcaatattttgttgaatagataccgaagggccaatattatcaataacagtggcgaagttcacaggtgaagcacaatataattcatcaaaatactctttaataacctcactcaaacctatatcccagtcgcaccaaaccccagtagcattttgaagtttagtaatggagttgtttctccttcgggtggttgctgcagcatgaaagtagcgactgttttgatcaccatcacaaagccagagttgttcgatctttgactccaaaagagctctctttgagcataaacttcaaacaactgtttttcagcatcttgaaaccagctatggaaacatcatctcgacctctcttgaaatgagcagcctttttttccaaaagttaatcctttttttaaagttcccagtgaaatcttttccccactcctcaaggttcttcgcacaaaaggacactttacccataacatccatgtgattactagctgcccaactgtcttcaacaatttggagacataaaggttctcttagccaagagttttcaaacctgaattgctttttgacaaggacgaaattgttaacagtaggttcaagaagaatagggcagtgatcagaactagtaagctcaaggttagtaagtttagccgagtgaaaaacacttaaccaactttgagatacaagggctcgatcaaggcgaacttcaatccaatttaacgatgtcctccctttctcccaagtataaggata

SEQ ID NO: 194983 - DNA, 1000 bp, Cannabis indica
tcaatccaagcaatgctcaaagccagtttcccattagtagaccactcaaaacctacttcagcaccattcaacacacacttctttggggcctcacttgagaaagccaagaaatttcctccacctttcactttgatatgggcactagagtatttgtagtccaactcttggatagtccctccactattgaacatgtttgtgagtccaactggggcaaacttgatactgccacccaatttttgaactggcacaaagctgaaaatctcaaacgtagatggttgaatagtgaactgaatagcatcagattttggagtcattaaactaatttcagcagcctcattgagatagaccacatattcctcagcttctcccatctgggaagcctctaatttttgatcccattcaatctcactcacatggattgaaccagacattggcttgtaacactcagaatatcctctaattctttgttcctttgggtcccaaccagctccttggcaattaaaagctccaaccacaccaccatactaatcaatcaagaaataacattaatttttagtgattttgacaatttaaacaccatttatagtaataataataataataaataaaaagtgatgattaattaccttgttgaagttccatatcttgagaatggtcttattgtcaaataaagggtttttgaaaagacagtctctggttgggagagcaaaatggtggcacttaggaatagtaccatcagggtaaacaagcttgtttaatagctgaaaattgtgacccccaactgagtcactaacataaacaggtccaccacatatggctcttgatccagcatgaaatttggcacataaatggtcagattgaaacatgtcccaatcaggctgaatgatctggcccatccacatgctgttataggcacagtgaatcatgtgtactccttgtaaccaataaactcccattgggtctccatttggatcctgaaaccaaaaatcatctcctacaa

SEQ ID NO: 194984 - DNA, 3149 bp, Cannabis indica
aattattaattaataaaaatgtcagttgcagcttatcaagggacattcacttaatcataaaacacaaacacatatgctccaattcgaccattattaggatacacttttatttgttcatccttttatttttcatctatttaaatagtagagtagatttaccaatctttttattattttttcatatctaatacatactaaattctctgaaaaaatattttaaattagaattttggtagaggaataggatttaaaagaacaaattgagtgggtaattcattggaaagtttgaaataatttaatatcacctactaaaattgacacacgtgaaggttcatattacagctgtattgcaaaaattttcaattttcgtataatagtaatgtgtgaaaaaagggagcacaaaaatcatttcaaacgataacaaggaagaattattaagagaaaatctaataaatatttttatttttatataattattaattaaaataataataaaaagaaaaatgagagagatgagatgagatagaatagaggtgtggaggagaggttagaaatacgcgtgggaaacgcggaaacaaagagaagtggttaactggttatggtagtgcacaagtggacatgcaaacacaaaacatcgaataaagacacgtgtcacaatcccatcggataatcagggagagatagtaatttcctcgtgatactaacgtggtggcgcccaccctttgttttttttttccttttaaaataatgtaatataagtaacgtatgaggttgggtcccacatctatgagtgcaagtgtggattttgatttttgaatcccaagttttattttctttttttaaaaaaatataaaattttattattgtgagttcacgggtgggcccattaaggttattcattgattgctttgttttaggccacgtgatctttaggttgatcttttcttcttgctttttctttaagaaaaacccttcattttccacataatttacaaaacttgcccctatcgaatggtgtaaacgaccaaacgcgaccgtttttgctgaattgtcaattaatttcgctttgggattaaccttcagaggcatctactactgatattcgagtctttgacctattcaataatacccattaaaaaagtattagatgggttttcttaccacgttttcttagggaggtgaggatccctttgatctgtattaatcccaaaagtcagtacactaggtagaactttctggggctctggtacatacttgtggccctggtacttgtatgggcagactagtcaatttctttttgaaaagacatcctcaattggtcaatcacaccctgacccacgtctggataaatctccttaggccaaatttgtacgtgcattattattagatacaaatagtatctctcttgttgccaaaaataaaaaagcaacattaatgggattcaatagcaaattaaataactattttcatgacgtttacaatgtcatgggccggctatttcacatgtcgagtgtaactacaagtatgataaacacaatataagtcattctaacgataaatctcatacaatccataaataaatacataagtaaatgacatttaatagcctaacaaaaacaacaaacatgcatcacataataacataggggcatacacaaagaagtatagataaatatcattttattattatatgaccttgatagagtaagacaatacacaactgagtctctaaaacagagtgtaaagaatgaaaaacagagaaagagtgaaaaagagaaaagcctcaaaaccaagaatgctagcttggttaaaacggaggaggaacactttatttatagtaaaatttgtacaaggcaattgaattctgtaataacagaatctgttataaaaaatcaactgaaataacaaactaagctaaccaataaaactaacacgtgtttattggttatcactccccctcaaacgaaaatgtatacaaatcactttgagtttacctttaagataatgaaatcgttccttaggtagagactttgtgagaatgtcagcaacctgatcaacacttggaacatgtcgaactgagatttctttcctcattatttgttcacggacaaagtgtaagtcaatctctatatgtttgcatctggcatgaaaaataggattggttgcaagagcagccgcaccttgattatcaacccaaataattggaacatcttgatgtgtaatatgcagctcagaaagtagagaaagaagccatttgatctctgctgcatcattggccagagccctgaactcaaattctgtggatgatcaagcgaccacctgctgctttttagcagaccaagagattaaatttggtccgaaaaagactgcataaccaccagtagagtagagcgcctgtcatcaattgaacttgcccaattagcatcggagtaaacttgcaaagagagtctagaggctagtttgagtattaatccctcatttattgtcccttttaagtatctgagtaaacgcttacatgcttcccaatgcacactagttggagcaagaataaattgtgatagtttgttgataatgaaggccagatcaggcttcgtaagagtcaaatattgtaaagcacctaaggtacttctgtacaaggtttgatcttcaaaagatgtcccttcatatagagaaagtttatgtgcactgctagtgcgatttgaacaaagtttggctccttcaaaatgaaccttgacaagcaaatctgatatatatttgctttgagacaaatatattccttctttggtcctgtgaacttcaacaccaaggaaataataaatagcaccaagatcttttagttcaaagcagtagttaagattagatattaatttagtaatgagagtagtattaggtccagtaatgggtatatcatccacatatactgaaaagattatcaagctttgtcttgagccataaacaaacagagacgaatctactcttgatgcagtgaatccccattcaattagagtagtctttagtttttcattccaagcccaaggggcttgtttaaggccatagatggcattgtgtaaatgaaaaacatgatctagtttattgggtcttcaaagcctctagttgtagtcatatagattgtctcttccagtacacca

SEQ ID NO: 194985 - DNA, 1647 bp, Cannabis indica
cagctcagcaacctcgtgcccaatcacacttatcatcccgtccacccctatatcaccgttgggtgactttagaggtttaagtcccgtcatgtagctcggcaccgaaaatgggtaggcgcagacgtcggggcacattttgcccgagtttcccacccacgcgtacggaagagtgtacccaacaatggaagggaaagtgaagtagtgaaagccacagacctgtctgcagaaatcctggacgtacacgtcttcggaggtgaaaaccaggtagatcccgctctgtggattgatcggcaacggcttcgatttcgccgtcaccgcgcttttgatcacagactgtatgtctagtctggtcagggttttaccgtgcgagtaaaaccgatcgttcttctccgagcctaggcgaacggttcgcgagatgttcttcccggtctggtccgtgtacatctgtacggttttccaccacccggctacggatggacgtctggaattaacggctgagattgagttgatgaactcgcggatgatctttttctggcttctttgccaggaaccgtaccagatggtatggactgtaatatcggcggtgagtactggacccatatggtatttcaagtgtacgaactcggatgacccttcgaacttcttggaatcaccatagagtgggttggagctgttttggggccatggacgccacgcacagactggagagataaagaggaccagggtaagtatgatgaggccgagcaacaccacagaacggccggcacaaccctggctcatcttagtattttttgtttttatgaaaatgagagtgaagcacttcctagtgttgtttctgtctaaacccacctaagcctatatatagcggatacttaaatttttgaatttggtttgaaaccaagaaaataataacaaaatgaattttaattttaatttttttttattattatttttgtttagttattgatttaggaaaaataaattttaattttaattttgcaaaccaaaaacataagggcattggattgcgggtaatggaggacagatagattcttaaagtgaagtctggggaggaggtgagagtggggcccaggagtcagagagaagggcagaggcatcatcatgatcatcatggtgattgtcttcatctaatctctcatcagccctttcttgtgtttttttatttcctttctcatgcgcgggaattcttctaccctgggaacacagtagggctagaatcggaatttcatttctaatttacggcctttttggattttttggggaccgcacggttccttctcttttttttttcttccataatatatataatattttttctttttatttcttccgatcaagaaggtagtactagtatgtgacgcggactccggcttacaaaaataaaatagcctaaatgaggccaggtggcaagccttctttgtcaggctttcaggtgctaccacgcgctactactgtatgtttgtcttgtttgccaagctaaaccaataatatttaagttaaattttgtattacaattaatatttaaatttaattttaaatataataatatttagttaaatttttgtaaacttaaagtatctaacgattaaatgttaaattattatttcaatgttattttttatttgg

SEQ ID NO: 194986 - DNA, 1289 bp, Cannabis indica
ttgactgactcatctacaccgggtctagggctagtaacatgaggcacaccagaagcagatgtcttctcagattttgttgttttaacagagctccctgtcttaattgagtgggagtacgaggtcaccaaaacattaattgctttggcaaccatagagacgggtctgtgttctagaatggccgtgcatgctattgacaagcataactgtttaccctgtaaatagatgtgaaatcaccgccaaccagttgaacacacattagttattgctttgttcagaaagaaaaaagaacattagcttttgctctttcaatgattcataattgaacaggccagtaattagtatgattagctaggaactggctttcttattttttttttttttttttttttgatgagataggaactggctttcttagtaaaagttaagtatgtcacaaaagctaagaaacgaattagttaactttatttggtcagcaaaatttctactaaacaaccaaataataatatgcatacagcacattcataatagagaagagagtataccttactagcatctaacttccgcctctgcaagaattctattacggctggtgcatctgagctactcgcagaaattgcctggaaaagaaaggagacatcaagtactggtaatgcaagaggaaattatgtattgtagatcatacaaaagaaacttgcctccaaatcaatatgaatcttccacagtaattgattcacaacatcacaaatgagatccggaacaagaaaggtccagccatctccatagacaactacttcatgactatttatagcactatccacagaacttccattatcttctctatgtgatcgcagggaagcactattagacctgcggagacccctcaataacagaggaagtggggctgatacaggtgctcgagaatctgtaaatacatcatacagtataacaacctttgcatcaatttggtgaacaagcagcacattatcaaccgcactcacagcaatcctgcttgaatatattggcaaggagccctacaaagcataaacaaacattatttgtataataatgtccacactatgactagattaaatttctcacataggatctaagaatcaaatgtaaccaaaaataaatgtgttggactgacagaccagataaaaagggagaaaggtcatcctaacagcactagttcaaacaaaaaaatagcatcaatgacaaataataattcttctactttcacttttttctacataaacatttaggagcaaaataatgacatataaaaaaaa

SEQ ID NO: 194987 - DNA, 905 bp, Cannabis indica
gattcaccacaaattgaactcaatcctgctgttcgtcccaaaaatcatttttaagtttataagaacaaggcctaaacccctgaaaaaccatcaagggtcttaaccttcagcttgaatcaaagatgaaaatgaaaaatcacccaccatcctgatacttctagtgtccctacctagccatcaaagtatctcccgatctccctattgctggataagaatccaagctttgaaacgggactgccaaacactcccaataaagcttttgtccaccaattctctttttatttcttataaaataatcaaatccggattaaccttacaaattgttgccttaatcgctcttcgttctctctatccccactgcctctaatattacggagggcgttggacattgtcacatgcctacatgcgctggtgtgtggcagagctggcagcgggtgatggtggcggcacgtgcgactttactgggcaccggagcttggggtttaccgattggagaaaggtccctgggccagaggtgagaatagaaaaccactctaaaatggttttttaggatttaaacccaaaagtaccaaaccctaatttgaaaaaaaggctgaggaaaaagagaagaaaaaatattgaattttgagcttctattattgctttgataccatgaagaaattgagaatgaatttattcttattatttcagtaggagaacaagggtaaaaatatacaaattaaaccctagaaaattctagaaaacagagatttcatcaaaaatataaatacagtttggaagatgactgaaactaagactagtaactagcttgaattcctacatgctcctgttaatttgatcatttttatttcgcaagatctactgcttaattcattacacaattatcatgcttcctttatttttct

SEQ ID NO: 194988 - DNA, 1111 bp, Cannabis indica
cccataaattgacttacacgctcttatgagtttttttttggaagaaaagcccctccccctattgtaacttaattccaatgcagttctaatacaacatcacattcttgacaaacaaaaaaaattaatatatatatatatatatgtatatagttgggcagtgaataaaatagtaatatatttgtatttatgatttatgaatatgaatattaatgatgaaagaaaaaattatggtatggcataatatgatataatagaatatagttatgaatgaattagtgtgaagtcaacagtcttggataggaactagaggtagtttgcccccataaatctccggaagctgctcctcatcgatgtcatttagtagagtacctttgagctttttgttatcaacaaacactatctgccaaatcaattaacatccatacatgttatcaacttaattaattttttatatatatattacgtgtatatataatagtacgtttgtaattggtattattagaaaaatttaagttttaatgtttaattttttatttaattagtaaaaattaattttctaatcatataagctgtggttaatctattgactgaaaaaaataaaaaaaaatgatataatataaaagatatatattttttttaaaacaatagagtaactaaattatttttaacaaaaaaaaaaaaaaacctaaattaaagataaaatcttaaatttctttctctttatttatcattaaatcaaaaaatattaatttaatatttttaaaattagtaaccatcatctattaaaactgattaagaagtgtattgaacatcttccaatgctgtcataaaaaaaggtatatggcaatatatataagacaaaaaaataagtaccttctttttggtatttttgtcaatgaatgggtagatcatcttccaagcagtcataaaaatgtagggcacatggacaaagaataacttggccagcctctcagggtagcaatcctgtttatatatatataatttatatatacatttgttaataagagtttcaatacatgtaatatatatatgtttacaactataatgattatatgaaatataagatataacctgcagaatggatagagct

SEQ ID NO: 194989 - DNA, 1432 bp, Cannabis indica
caacaaaggatggaaaccccaaatacttctcgtgattctcaaccaccctaaccccatgatctcagccacctcgtcccgaatatttgcttctacccgacttccaaaacatacctctaatttgttgaaattaacatcatgactaaaagcatttgtatatttattaagtaaagcacaaaattctgacaagcttcttgagttgcatcaaagaaaatcatactgtcatccgtaaaaaataagtgggaaatcgatgagccctgtcttccaaactttaagccccgtaattgacccctttcctcctcttttcaaatttattttgagaaagcctctgcacaaaataaaaataggtaaggggaaagtggatccccttgcctaagacctcgttgtggtttcaccttcccttgaacttccccattaatgagaaaggagaaacttcggtgtaacacacttcataatcttttcaatccattccacctgatatccaagtttcaacatcatagctcgaatgaaacaccattctatccaatcacatgcctttgccatatccactttgagagccttcccattctaaaatctattcctcctcatacagtgtaagccttaatatctaataatagcattatcataaatgattcttccttgaataaatgtgctttgtcattctaatataaccatttccaatgattttctcatcctattagccagacattttgagatgattttataaattacattacacaagctaaaaggtcaaaattcctccatcttcttcggcttgtccactttcagaattaaagtgatgataatttttcaggcagcaaaattcataaccgttattgagtatgtttagacacatctcgataatattttgccttagtttatcccagaaattttggtaaaataaagctggcaatctgtccactcttggtgcttttaccaagttcatttcctttactgctttaataatatcttcctccataaaatctatcagcaactcctcatgcattgattctctgacttttagttgaaccacatctagaacttccctaataatggccacaggcgaagcaatgaataaagacccaatataattttcaacaatatgttgaacaattattttatcatcttgccatgcccctatagcataaaaaatcatttaatatcattctttttccttctttgagatgccttgtggtgaaaatattttgtattttggtcaccccatttcagccacattgtacggcttctttgacgccaaaatttttcatcattttccagcagtatattcaattatttctcggttcttttagtctcagtccacattcctgaccgtgtattaagggagagatcatgtagtttctttttcacttgagcaatttgtccattcaaagccttttttttattccatagttgcaaagctttgccaacccaaata

SEQ ID NO: 194990 - DNA, 2285 bp, Cannabis indica
aaaaaaaaaactaatcaagtatagagattttgggtcgattaatttataaattttttaaagaaaaaaaaaatgaagggagagagagaaagaattgatgtgattgttcatatattgttaatcatgattattataaaagtgatacgatttcatttatgttaattatcactttattaaaaaagaaaaagaataagtagattctatggtcatgattatgaacgtactacactactagatgtgggctctcccaattacaaatagaagaagattcgtgaacgtgtgtaaccattttattcattcatttttttagaaaagtgttaagtatcctcatatgtattaatatggttcaactaaatatcgggttctgcctagcatcctcagtatcgttatcggttcaactaactatcgggtcccacataatttaatataataacttttagaaagtatcagcagccaatcgcaacacgatatatcaagaaagtgctagttactactagtgtctaataacaatattcattttcttattattttattttttttagtattattattgaatatcagtagtccttagtattaaaaaatactaaacaccacttacactttgtagtactttccatgttttcttcaaagaacatacttttttttttattaaacatgctatattatattattatatctcacatatagagatatatattgtccatcattgttatctattgataatattattcattacatttaaaaaagaaagaaagaaaatcaacacagctggcaagactactttggaaaaatttggagatatgaaaatgtatttattattataatatttgatataattttttttgacatgtgatataattatacataacacttttttgttttgttttgttttgttttttttttatatatggagagggtgaattcgaacttgtgatatttttttttttttggaagaagtgtacgtaaaattattaagttaggcataatatcactttttcatatgtatatagaagtatatatttttttattgaataaaatactttttccaactagtacaagggatgacatatacctatttatttatattgcccaataaattatactatagtcgtgggagtaaacaagcttcacaaaatacactcaacaaaaaaagttagtaaattaagaaaaatataagaataaacttaaaaataatgtgtgtttaccctttgactcgataacatgaacgacacttttgacacttggcaagaaggaaacaactatatggccaactatcgagactaaaggtagttgacttgggcattaaaaattgtgtctgtgccatagtagtaggcacactgagatccaacaaagacatttttaggtaccatctttcgtaattttttaagtgaacaggtcctagtggtgaaccatgaagctaaggatgtcacgtgcacatcccaggtttcaacttgggtccacgttagtgttgggcacctaagttgacatcatgtactccttctctcatcaattgtgttttttatcaactttttatggacaatcttcttagccattgtcctaagatacatgagagacatgtaaaccaagttttagactttggagataaatatacatgaaatgacactcaagcactaggaagccttaatgggcgcccgcgttgaaatctagttcatctgggtgcaccatggctagggtttaggtttctagggaacatccttggaccccaattccttaaatccattaaggaagaatactaagacataatatttcatccatgacatcccaaaagagcccatccacaactatgcgtgccaggtcattctaacatgggcataaattttacttcacaaggcaaagaatgtacaaatttgatgaaattgaaatttgtggagcacttttcaccaaaaagaagattgagcatcaacgagctcaatttcataaatgttgccccccacttgggcgcccaatgcatgccctgaggccactatgggtgcccaggttgacgtatctcaacctagggcacactgggacttctttctagagaagctttttgggcattgcccttatgtttatccacaaggaatatacaagtgcttttggaaagataatgaagccatctaggccctagatgaaaagttgggcgcccaaggcgacaacaccccagtcactaggtacccaggttgacgtagccttacttctagtggtttcgtggatccgattacgattccatctcagtaatccttcttattttgctccaaaaataatatatgagacttggaatcaggaga

SEQ ID NO: 194991 - DNA, 1225 bp, Cannabis indica
aaaaaaaaaacttaaaatactaataaacccatcacacgctaagaggacaaaaaaactaaaaacacaacaagaaaatcgtaatcgctggttacaatgattatttactttcaaacaatgtccattaatcgacaaagggatatcaattgcttgcttaaaaacccttttaaggcaagattgctgattataaataaaaagggcagtcagaaaaaagatacagggacttacattaaaattatccaggaactcaaaaattggcgttggcccatcagaaaactgttcttctggaacttttgatgcaatttcatcatcatcatcatcgactttcctttctactgatggtttatcttccaaactaatcacatcatcacgcttttcgccaaaactctgattggctccactagatacttcttctgatgtttctcttggaaatgacttcgaaacaaagatcaatcctgaaataaatattcaatattccatcaatttaacatttgataagtgagaaaactgaaccaagataaccattagtccaaattaaaacatgcagtgtttcttcaagtccagattcatgttctaagttctaacttctatgggacactgaagaatgagtaatcgcagagtaatcttttccgtttaatttgatatttgaaataaatagatatcagcggtaaaagaaaacacgcatcagactcatctccagtaaaaagaagaagacaaacaaaaaaaaaaaacaaattaaataaaataagtataaacaatagtatcagtactaactcactgggaatataatataatacagtctctattgaaaaaaaaaataataataataataaagacttaaacaaggtgaaatgaaaccctcaacattaagaaaatggatcaaaatcttcaaatgcaagtaaccctagtgttttttagatgatcagagattaatagtgaaataatggcaaaaaaaagactagaaaaggagttgggattgaataccgaggtgtaagaaatggaaaacgtacgagatgggagtagagcaccggtgaggggagcaagcgagggtggccggagagaaggcttggaatgtaggaggtgattagggttaggaaagagaagtgggcgggggttatgtaagattagtgttaagcatggagtgagccgtacaaagtctccatatttagagtggagagtagagaggaaggtaggtcagccgctgatgaggaggagaagaaaccagaaa

SEQ ID NO: 194992 - DNA, 932 bp, Cannabis indica
atagaaaatcaggtagttctacaattatttagataattaaggttatattctctattatatttctgtaattatttttcagttacagtaaaaattctttgattattatagttgggcttttttagagaagcgtgagaaaattatattgtatacccactttattttacatgttttaatttttacctctatttttatattctttaagatatatccatttttatagatgatgttcctagtagatcccttaggttaatgtaaattatatgctagacttaatagggagtgagggtatattgggtaacactttaaataaaatataataggatttttaattaatggataaaaaaggtatttttaaacttattccagcgatggtcttcagttaggcccaaataacctgatttctttaaggcccaaagcccaatccaagcccaaagacgaccgtagaaaatgattcaataaggcgcggaatagctgcagagctgtacaccaaaggagcagccatggaaggtagcaacgccgaggacttcgccgtgggttgcttcctctccatcaagacaaccttaggcgacgaatttcaggcttacgtcatcaccttcgaccgcccctccaacatcctcgtccttcatatccttaattacttccaattttcattttgatttcttaatttttttttttttgctagccctagaaaaaaaaaagtagactttttggggtttcagagagtatgatccttaactttttttgttctgatcggtctcttacaagagggttccaaagcagggtcacggcgcaacataaggctactaaaggcaaactatattaaagagtttactttattgggtcaagccgaagacccacttgatctaaagaagtgttacatcgatttgaatagccttcaagccagagaggaatcggccattaggtatttcctt

SEQ ID NO: 194993 - DNA, 1567 bp, Cannabis indica
ttcttttcttttctttttgttaatttgtttgttttgggcactggcatgtaaaaacttggatagaatatttaagatgcaattttttgcatgataagtgggttcacaagatttcattccttccccttaaggaaatttatatatataaataaaatgattcttgttttattttaagttattggcatgttaaggaagaatgagtacaatttgcctgctgaatgtattaattatataaccttaagtaactattttacatcagtgtaattaatttaaaatgataattaagtttatattgaagaaaatattagtcataattattccataatagtgaccttaatttatcatgattttaattacgtgtgtgtgaatatatatttctatatgtgcacgcaaaacattagttatttgaattagcaataatttggttatacttatttaaagaacatcatcccaaatattaaagaaaattatatcaaatccctcttataaactatatataaaataatgtccctaaatttaatttcttgttgtccttgtaggagaattttgttgtttgattggcttatatatattgttttctcttcatcgttccttccatacattgttcataatcttcattgatttgggtgtgctttcacattgatatctctagttcatattatgacatataatttcaattatatatacaggatgtgtttgctaaatttgcagctttatgtgtcatgtactatattgaataatattttgagtagttttgagaaactaaaagtaataacttatagcttatatatgcttctacatatagcttaatatgttagaattagaacatttcaaatataattatatgaattttatccctgcacttctttttacaatttgttgatttttttaaaataaaattgatatcaagttgttaattttacatattttaaagatttgacgtgataagatttattgtcagaatataattgctaaatgacattatagtagttaaatttattttgtatttaactatatatttaaaaatttaataaatcaccgtcacattatttggtatccaaaataatggtccacattagttggtatctaaaaagttggtccaccaaacaaaaaaataaatataatttaacttggaagtagtgacaatggatctaccacatatcaatgatcattttgatttttatttattggttaaataaagttttatgttaaaattttaattaattgttcctttaaatttttgaagcatgcatctctataaaatgtgaaatacttattttcaaattgtagactttagttgaatgtgatatacttcttttttcaaattgtagactttagttgaatgttgtagttaacatagtgtggatttgaagtttgtatgttacggttgagttttttatatttattttgtgggatcataaaagaatgtgctcaaactcaaacatgcaaaaatgaagaatatagtatattaaagcagagatatataaaatatttgtaaattttggataatatggaactgctagctatattcttagtcatgccgatagtgtggtatatatatatatatata

SEQ ID NO: 194994 - DNA, 1318 bp, Cannabis indica
gtgaaaaaattaaatacaataaattatccattagacaaagtgaggtgattgaagttacactagtaatatatattctggatacgattttgtcctgtaatgtattttcacggaatgtattcgtgatatacggcagccgttagatgagggagttatttgatctgaaggttgagcttgatctaagggtaattaaggttaaaaaaatggtaaacatactctgagacccatctaatgtaccctgagacccatctaatgtaccacgaaatacattccgtaaaaatacataatattctagggttaaaaaatcgtgtccctatatattcttatagtattcacccttgtaagttttcaatacataatattggttattaccccaaatgatcaatatattatcccactgacatttaataaacatctgttttaatctagtcatttcacaaactgaccacagtattggcaatatacacatatatctctacacatttacttataagatcagtcaatgaaggaaaaaagtacttttcattttttttctacttttgtatatgtagcgaaataaattaccgtacaagtagataattactatgagctgtaaatttgatggaatcacaaaaacgagctacagtacgtttattaaacttctggccaaggaaagaatcataatatatatatatatatatataaataaatatagtggttaaaattaaatatatgagatgttgcgacaattctatatttacactacaaacttgcaacttcaattatatacagctaaaattaattatgatttacatctttgaaaaattaaaagcattccattcaataaaatcgtgctaatgaaaaagacaaattaatataaagtaagagagttagatgatgaaaccttgaattctattttttatttctacttcttcttctttatttttcttttccttctgattaataatattgactactacatttgattctttgaattaacggatctaggatttggtttttatattccatgaaacgtaccaaaaaaaatataatagtcaaaataaagaaaagactacttacatgaaatttaattatgaggtcatgcatgaaattaaaatatatatttatatattgtaagagattagagggaaaaaataagctacattaagatcaggatcatgatgatgcaatgtaacaaattaattactatgcatatttaaggataagagaaacatatacatacattcacacaataatatatatatataaatatatatagctggggtgtggattattgatgtcatctacctggaactagcaaattcattgagttttcctcgtt

SEQ ID NO: 194995 - DNA, 1283 bp, Cannabis indica
tgtttgtgtgagttttttgttcgaaggttgcatctgtgtttttgctcgcaagtgaagttctttctggttccgatatggatgagaaggggaaagagatccaggtggactttattgatactgagaaggaggaggtgatgaagagagatagtgctcttgagatggaaatgttggagctttttgaagatattactctggaagatgttgtagctagcaaggcctgtgtgggtaaggttgtaggctgtaaggatatgccggcttctgttgtaaaaaagattttaggaggagtttggagaaggctgggcttctggagaatgaagaagtgtgaagagggtgttctcggttttttctttgatgatgaggatgatttccatttcgtcatggagaagagaccttggattatcaatggggttctcctaaatcttaaaccctggccggttgaaggagaagtaagggttggtgagtttgaagtggcccagttttgggttcaattccatgggttacctaccaggttcctttcaaatgataatgtgccaatcttggcaaaaaaggtgggaaaccttgtgagaatggaggagaagcgtaaggatgatctggtaaggaggggatatttgaggtgtttgattgatgtttggctagcccatccttttccttctggtttttttctcaaagcggatggcaaacctgagtcttgggtccaattcaagtatgaaaagcttcctcacttgtgctttaactgtgggaaacttgcccattgggataaaatatgttctgttcagacaactctggtgtatcctaccaatggtgtagcggttccaatgtatggaacttggatcaaaagtgagacaggaagattgaattgttttaattcaggagggaaggaactactcgatcactagtcgtaagagaggaaatcccagaatgggacttgtcaaaaacatctcggaggaagacttggaaacgtaataacaacccagtggaggcttcagaccaaagggcgatggcggcgatgtcggagtctcagacggtggtggagaaggggactgttggtacaaaggacaaggagagtgggcaaaaacgtaaaggggttcatggtggcacgtccactacatccatggctgatttgcagtgtacgggaaaaggtattgcaaaggtgacagatggcattccgttactcccaatttgcctgtgcaaagtgtggaaaacgtgggcaatagacagctgggagtggtttctaatgtaattgggcctaactatttgaatattcctactccggacttctcgtt

SEQ ID NO: 194996 - DNA, 1996 bp, Cannabis indica
tatccagtagtgaaataatcatgtagttgttgtagcatcttccttgttttacaccccacttttcaaattcatgagctattattctcctatgccctccttattctcattcttattattaactttcatactttcttgtaaattcccaaaccaaaaagaatggctggtgatttgttctgaatgtgcttttggaagagttaacattagttcctgattacattttaacataatacattattcaagaggttaacaaatcataatcaaaggtaataagagagatgacttacctgatcggagcagaggagcactggccggaagagatgaaagttggctagagcaaaagcagccatggaagaagattgaaaatttgtttcataataatttgattcattttattagttatattataatactaataaacaaatttataattgtatctttttatagtgttttttttttgtttagaattttatcttaatacaaaggctctcacaaaacgttgcctcagtagaaatgataggtacaattttgtacacacaaaaaaaatatatattgactttaccttttaataaaaatggctcacactattgactaatacacaattccaagaatgagaaaactgggtgaacataaaaaaaaaatgacaaacacactctaatattccaaagttaagtcactctgtgcaggagtttttcaggagaggaggatgtgtagttctgagcggtaaagggaactcgtgcttctcgttttaagcgcgaacatgggcgtgttgttgggaagatcccttctgctgcaaatccttttgacatacaaccttcaattgcacatggtgacttagtagaagcattcaactgagtattattattacatttactgatatccataaaatcatcattctccactaatggattatcatcctctcggttttccggtggtctgtaagtaatagaccggtttctctttatgctcattacaggatttaagttggtactatctggaaagattgttattaaggatcccaaatcatctttttcaagctccttgaatgacttcctcttcaagccggggagacttttcagccctgtaaaataacatcaacacgtttcaggaaaagcttttttattcgaacaaagttttgaatgcgaaaataagtttaccgggtagggagtcgttgtcacatacaccagactcagtttctgagtcaccacaattacatgaaaagttatgttttttattagatccagaaatcctgaaagagaaaaagaatgtcattactgtaattatacatgcaaaacaagttttgattagtcaagagtaccccaccaataacatagatgtattttctgtatttaagatgaatatgaacttctgaaagggtctatgaaaatatagaaatccatatttaaattaagagatgatcatgtatgaattcattttaataatgagcaaacaataaactcttgtttgtagtttgtggattttgaactatgatggtaaggacctgcaaagtgtcaaggtcgaattctagatattttagggccgtgaggttatacatagtggcgaacatatgaacatgtatttgttgtttcatttcgggctaattcagtacatggacatagagcacacaatttcatgtatggatatggacatcgacgatatcaaaacctgccttcaattatgactgaatagcagatgacaagtattttaggctacacttaaatggcacagagcctagccacagtagtaactacatggaaccgtaaccctaaagcggaaagagaatttgtactcctaaaaaattgtgagtatttttgctttcatgaatcaaaactaaaacaaaaaacaatgtcaacctacttctgcctaaaccttgatttgatccataagtatgagatgtcagtctaattatgattcatagagataatttatatgatgataaataataaaaatcaaacataagctacctataacagatcatctttcactgctagttaattgt

SEQ ID NO: 194997 - DNA, 2816 bp, Cannabis indica
gtagtaaaatggacaatactaaagcaatgtatttttgtacagtataaaaaaaaaagcaaaccacaaaatccaacaggtattatgcgagtttaattaataaagttattaatttatcactaaatcacagcagtcagacttgagaactatctcaacccccaaaaaaaaacaactaaagtatgatcgcaacatcacccatttgatttcacaaggaactatatataaagtagccaaaacccagaaaaccccaacatgtagagttagtcaagaacatcagttacatattctgtttttacttaatgctatttcctcagaagcaaaaggtaaagaaaattaatttcttacctccattcaccatcaacttgtctgacatttggagcctcacgaagagcaggaagaggtacagagatcacaacattccgcagatcaaacattgaggacgcttcatattcaatgctaacatatgtttcattaccagaaacagagggccagcagttaactgcaacaaacaatggcatgtaaacaacatcaacatacaagacactgtaaaccaaaatattaagaagaatgatggatactcgctaattttattttatttttaaaaaaaaaaaccctaacttgttaaaggcaccattgattcatctgtgctctgcatccgccacttcaaaagaccaacacccgcagcatcactgttaccagcagggaaaggccgattaggatccttcaagcctagaatattttcattggcgaacaactccttgttcatattagggtgtgtcttgaaaagaatgccaggatttccaccagtttcgatctaaaataaggcagaacatagcacaattataacaagacaaactaaaggaggacagttgaacaaaaatcttggaagtcctttaaataagaaaacactgacaggaaaccacctgttgactcacaaaagaaacattatttctagtttcctagcctcatgaacaattaggacaaggtctatgtcatcacatacattacacctcatcttaattaaactatcaccagaattatcagtagaaactagcttagattacagtacctgaacttggatttgcccatcttctgcatttagaatctgcagcgacaatgttccctgaacatcaaagttactaacaccaccatctcgtttcagtgttacatttagtttctcctcaacagtcaaagtgacaggatcagttagaggaggggcagatgatctagattggcctgctgcttttggctgcacatcttcaaggataacctccccttctgctttcaaagactccaagaattggttagtcctttgtgatttccctaattgcataccaagacctttcggaggagcattggcagccgaaggttgacgacctgagcctgttagtgaaaatcatcaataaaaagtcatagcattaaatcaatggtattaaaagagatggaatggattcatcacaagacaaccaaaaatagagcttaagaaccatgccttcaaaatttaatcttgattgaactatgaccagtctaaagaacacaattaagtattgctagagttattttaaaaaaaaattgaaagtacattatacagtaagttgaaataagtaccagcattacacattaaattcaataagaaatggtatgtgcgataagccttgtgtaaaattcataatgaagaacatgaacaaacctttaggcttcattgcatatagatcgatctcagtgttcaatccaaaaccagaaccactaccaaaaccacttccagtattggaaatgctcatctcactaaagctgctctctattcttcctgagcccattgacataaaccctcccttatcacctctcttttcaatctgcaagcgaaacgatgatgctcagttttgatacatacgaacaaagaatattatagaatgcataaaactactacatgggcgacatcagaagcctgatataccttgctcttgtcaatctcactagctttacgtttcatgacatctttcgtttcgttaatcttgctttgcattacgagtttgtgcagcttctcttcgtgactctccatttcacagtactgtttaacctgagcaacagtgacattttccttgtgtccaagagagatgacctcatcaaaagcaaaaatcagctcaaaagcagtcctgcaaatgccctcttcatctagagacatagaatactccggcacctaaagttagttaaggaataaacttatacatatatcccacctaatttgatggaaataaaacctattcaaattgttcaagtgatattattgtacaagagactgagagttaaacatttatagggggaaaaaaagaaaaaaaataaataagaccaaaagaaacttcagaaaggtatccacgaaatagaaggttcagctggacaatatcagggttcacctggaccctagtgtcctacttttcttcaataagagatttttaaggcaaattaagttgtttacattttcacaaaacaacctcaacatgtcaacacagaaaaatgatttcttgttttcttaaagtgagctagtgatgcaaattaatttaaattcacaacttagcaaaagtgttgtaagcaaaagaagtggaaactatctttgtatgcttgcctaatgatgcatctctcaagccctttatagaaattagaacccacatgctaagaataattgaccaaaggtggagcacaaattatccaggtaaagttgaaaagctgccaagttgttcatgtgatgtaacatttttttcctcagtggtataatattttatttttaagagagtaagaaaagagcagagatgcatacacatgct

SEQ ID NO: 194998 - DNA, 1489 bp, Cannabis indica
ctctctctctctctcttttatatctccaggcaacatcagttacatgccctttgtcgggttgatctgagatgaatttgcaaataattttatgtttggtcttttaggtttatgaaatattggataatgctgttgatgaggctcaggcaggatatgctacaaatattgaggttgtgctacacgaagacaattctgtgagcatcactgataacggtcgtggggtatgcttctttctttcattttcttcgaaatttatttatttgtttttatctttttatcataaagaaatatagcagcttagtgtagtggaaaatctttttatcataaagatgattaaaataaatttatatgagtgcagttgggattatcagcttttattaattacctttgttatgctaattctgatttttgtatgtagttgggattttaaattttattacttcttgcatgacttatatgtttttggtagatttgtatgggaaaacaagttcaggatctttggaatgctcgtataaaattgtttatatttatttctcgtaatagtagagtacagtacactattgtcagccagaaggaattgcattttaaacttttatgaattttatagcatttttcttcttctttttattacacacaaaaacacattcttcttgaaattgtggatgttgattccatgcattgctttttgttattattattcttcttttactttatagagtacccaagttctgcttctgctcatttttgttttttttttaaccaggcacttcagcacttatatattaatttagagaatcttctttgataacttaactttgcaatttgagttgatgatagctttttttatcctcattggagactgtattaacagtattgtttgcaattataccagtctcacttatggtattacttcatttttggcagatccctattgagatgcacccagtgaccaagaaatcctcactggagactgtattaacggtattgttgcaaaaaatattaacatctctccattttttttttcgctagcaattgtatatctctacttttgcatctaagtatcacgttttttttttttttccttttgtcaagaaaaagatgtatttctgaaaaatataaatatatcctttcatttggttcttgtgattcaattttacaggttttgcatgctggtggcaagtttggtggttctagtagtggatacagtgtatctggtggactacatggtgtaggtttatcagttgttaatgccttatccgaggtgtgtttttttgcctgtagattcagcttgcttgaattttttccttttttggtatttaagtttctaattcagatttttgtaagcctttgtttgtgacatttattatttgaaatcctttatgattgataccttggtaggcattggacgttacaatttggcgtgacggaatggaatatcgtcaaagttactctcgtggtaaacctgtgaccactcttatatctcaagtccttc

SEQ ID NO: 194999 - DNA, 744 bp, Cannabis indica
aaagaaaatggtcttatttttattcttaaattatcacacctccattcaaaaaaaaaaaaaaaggaaagaagaaaaataattacacctcactctactagtatgatattttatatttcagtttatatgcacacttattagaggaaaatctgttatacgaggcctaatgttgtctttgatacttcatttgtcataaattacttaagtaactaagtggttttttgatatgcaactttaaagatcattaatattatataactgctgctttttgcaggcccagtctgatataattgctaaagagatacactctattaacatcaattcatcttgcccgcaccaactagcatttcacctagatgatggttggtaagtccgtaaaacaaaggaatttaccttttatatttctatagttaaagctgtgtcctgtgtctgtgtgtttgttttatttgctcttacattgaaatggtatctgcttatcaaaagagtttccaggagtgataccatatggcagtgacatcttggttaaatgtaggtctggtgttttggacacctttaattttgatgtgacacatattcattgccctcctccagcttggctgtaagttgaactcgatttagtgtattatatcgatcttgataaccattagcttctaatgtcttgcatgaactaataattgtttcaatttggagatgcagaaatgagtcaaatttggctgattcatcttgtttgcgaaaaccatcatggct

SEQ ID NO: 195000 - DNA, 2479 bp, Cannabis indica
agtgtgataattttgagactgtgaaggtatgggactacaaacttgaagagagcttaaatatattgatgggtactgcctatatcaacaaggtgcatcttgtttttaagagcccatcgcttaagaactccaaagataagcgtacttgaactacagtaatcttaggatgggtactctcttgggaagctttcctagaaagcgtatgagtgaggacaaaatacagtggaaacacccgtgttggtttacagagccaatagtcaatccaggaagcagccaaagttatgtacctacgtataagttgacgaggaggaatctcataaccttactatattttctagtttgggtattgactgcttgatttttcttcctcttttttcaatttctaccatggtagaagaagaccgatttgcgaaatagatgatcttagacaacaaagaggcctcgatctgggaagtcgaaggcttagaaatgaaagtggttgccaatccaatataatgggagatggatcaatatacaaacaaaattttgtaaatatttgattttgtaggcgctatgaggaaagatgtgacctacaaaacattccgagtctatttgattttgtaatggaccatgttgcatatggccttgtaaatattttcttgagtatcaaccaaattggtgtacttaatatacttgtctaaatattgctttcttcttttcttgggagccttgctctagttttggctcctccaacccctcttattctgggaatgactcacattcgattcttgaacccccatttgttgccttgattgtcagggagtgacgcatctggtttgtgccactcggttttgaatcttcacctttcgagtcaaaaatggctccactctgcttccatagcagttttttcaaaccatctatttgttcttttaatatcttggtatcactgttcagaagctcacacccacaaattctatcgttaatgtgattttagatatcattccctcgatgtctcacctttttccttttagcttttctcttttggcactgaggcacctctagaggtcaataatagaccaactgtcttccagagaaatctcttctatcctatcatcctagttaatggaatcactaggcagtttttccttcccttagcagtaggcctttgcgcccaagtgtcaagcctatcattatgcacaactttgcctcgtagagcagaagggcgtctaagatcagaggcaccggtggcctccttttttctgaaagggctggttggttgtgtttacgttgtttttaggaggtaatgggacaattgtatattggggctcgcctacttttgccttccccttgtcctttacaggagttgaggttccattgtcagtagggcttgtccttttctccctgttaacaggctcttctagagcattttcctcagagtcttcctctatatcgccaagtttggcctgcatccatgccatcattttctctattcgacaagaaaattcttcttgctgtgccaactttctttgggcctaagctagctcactggatactcaggccacctccaggtcttgcttataataatatccatatttgtaatatccatctctgatttcaccatcgtctttctccacctctcctcatttgggttttcctccacagactgttcctgatgttgggttgtttcaattgttttatcgccagcttcggacgcttctccgtcctttatagtactcaactaggcatgcactggagggagcggatcagtgccatccatgacgatgtcctgacctagactagacttctcgatgatggttattctggtagccaccatttttgcagatgcaaggtagcttcaaatctttcttcaactctcaatgatagcatcaaaatatttatcgagttaaaatcgattaaataagagcttaagaaattaaataagtaaatatagtatgaatggagatttttacgtaattcaagtgttaattaatcctagtccacgagtcaatgtatttggccgaaaggctttgatgtattacaatgaggtcttacaaattgaagaaccatagcttcttactatagtctcctccctcttaggtttttctaatctagctagaaaaaaaattctagagataagatgaatcgttgtctcccatgcatgaaggtataaagaggtatttataggttaggatccatatttgagaatacccgtgactagttagtgtttggttcaaactgggccactattagagtaaatacataacttttagacccactgacagtattctagctcatggggcaaaagtaattttttacatttgatctcatttttaaattaaaagaaaaaaaacaccaagtgtacttggtcatgaatgctcatttttattatcttaagaatcattaatgatactcattttaaacaatgaatcattcaaaaatgtgatatgatacttctaaatctaaactgaataaatttaaaacaaaatcaaaagaaatataatag

SEQ ID NO: 195001 - DNA, 1563 bp, Cannabis indica
tcattatcgtgccttccaaacttgtatcgatttcataccctatcaagaaattcatctcgtatttagagcatagaaccatcaaaaaatatataatgcatgttatcttaaaaaactagtaattttaatgtgaacaatctacccaattcaattactataataatgcattagttaatgatatgacatgatatatagtctaattttgtaattttgttaaaattggaaattttgacaaaataaggtgggctgaatgaaaatcattttctatgtgtagctgactcagttcccaagtggtctatcataagtatcattaattagctatttgatgtaatgtaaggcaatttggcacatgttgtctagtaaataaatctctttctttttatgagaaatctctagaacattgaggaattaacttttcaatttttggtgagactactttactttcttggtcaataagtaagaattgggtgttttggagaaaatttgctaccatcactctcatcgattggattggtatacagcacataataaaaatgtagtgcttttggattattggttagtcaaattcttttttgcttccttttgcctataatacaattgatgaaggaaaagtgtattgatttttagctttcaatttttcatacttattaactcattaatgtaagaacaaaaaaaggcactttattaattaagttggggttgtcagttatagttttaatttaaattatataaaattcccaatagcaacatgataagaacagagtttttttttttaatgatttttaaataacttatttatttagttttaattttttttattaaattaaaattatagtttaaactaataatattttgacacatgaacttctcagcattgtttcgattcaggagctgctcaagtggatcttcgacactaatattttttagtatttctcattcaatttagatggaatgaataaaagtaaaaaaattaaaaacctctcatttgaaggtaaatatgtcttagttcaatttcatatcatctctagtgactaataagaattaataaaagagttatgagccactttatgtgtaaaactatttcaaaggaagaaaagtaagtgatgaaaaggtttcaattcaaccaaatattcaaatggaataaaatcaataatgccctcttttttctctttttcaacaccaacttaggtcttatgttaatttgctttccactgctttattttctcttcctattgactagagatatataaagttatcaagaagagtctctaccatgttattttgttttgaataaagttcacaataattgattagtcatgttattattgttaatgaaattataattaagaggtggtcaaactctaaaatctaaaccatatagaacaactaaaggtgaaaagtaaaagtcccattctgccctcctattttaaattaggctttgaagctttattggtccaagcccaagtccacttaatgggctggatccaacaaaagcacaatgttgtattagtgcttctcactaccacaatgttgtagcgaaatttacaatgctattctaattttttt

SEQ ID NO: 195002 - DNA, 1857 bp, Cannabis indica
agtattaccatttaccaccataacaaaaaagattaggggttatgtataaaacttacaaacttttgcctccaattatccacactgttttacatataaaatgaaatttatgtaaaagctgctctctctaaattcatatggagttgtttcgagttttgagtgttctccggaaaacatccaaaaatcacattacttcatttcgacattactataactcttcaatatcaaaccctttatctccacaaattcgtattcttgcttcaactgccacatctgaaaggaaagactatcttccatctggctttatttgcaatcgctgtgtttcctacggaccaaactctagtagtgatttagatcaaacccaagtttctgttaagagtttttcgaataacccagttgccacaatcgataatatagctgaagacgcagagaaaatctgtaaaatattgtcaaacaactccgccaaccctcgggttgaaagcttccttactgataatgttgctagtattgagatgtcaaaggagcttgttttaggggttttgaagaagctaagtaattcgggtgttcttgcccttttgttcttcagatgggccgagaagcgagacgggtttcactatacgactgagacttataatgctctgatcgaagctctgggtaagatcaaacagtttaaaaaggtgtgggaattggtgaacgatatgaagcttaaaggtttgttgagcaaagatacttttgctttgatttcgagaagatacgcgagagccaggaaggtgaaagaggcggtagaaacgtttgagaagatggagaagtttggattaaaggccgaattgtcggatttcaataggttgattgatactataagcaagtcgagaaatgtggagagagcacagcatgtgtttgatcaaatgactgagagaaggttcaaaccggatattaagtcttatacgattttgttggaaggatggggtcaggaacagaatttgctgaggttgaatgaggtttatagagagatgaaggacgaggggtttgagcctgatgttgttacttatggcattatgatcaatgctttttgtaaagctaggaaatatgatgaagcccttgagttttttaatcaaatggaagcaagtaatatcaagcctaaccctcatattttctgtacattgattattggattgggttctgctaagaggttgaatgaagcattaaacttctatagacaatccaaggctagtggttttagccctgaaataccaacctacaatgccttaattggggcttattgctggtcaatgcggatggatgatgcgtatagggtgcttgatgagatgagacaaagtggggttggtcccaattcaagaacttatgacataatcttgcaccatttgataaaatgtagaaaaacaaaagaagctttctctcttttccagagaatgagtgaggatcccaattgtgaaccgactgtgagtacgtatgagatcataattaggatgttctgtaatgaggatcgagtagatatggcgattcgggtttggaatatgatgaagggcaagggagttcttccgggaatgcacatgttctctacattgattaacagtttatgtcttgagaataagttggatgatgcttgtaacttcttcctagagatgatgaatttggggattcgacctccagctcagttgtttagcaatcttaaacaagctcttcttgatgaagggagggaagataaaattcaaactttggttgagaagattgagaatctgaggaaaagctcattaggtggttaatgcattaatagaaccaaaaggttgagagaatagtaaaatttcctatatagaggcctttctgttttttttttttttt

SEQ ID NO: 195003 - DNA, 2626 bp, Cannabis indica
agaacaaaataaaagaggaaatccagtgcccagaagagaacttctcagggaaatatggctgtgaacaaaaaagacttctcgtttaagagagtcaaaaaaaacagatttcctgcagctgcagaagacctgtaaaaaaacgttcacagccaccctccctggaaaaggaaacctggacactggatgacaagagacccatagctaatggacccgaaaatacgacactactgctactcacaaaagctgactaaaatttctacgtctttctgattagtttttccctcactgtttgttttgtttgccattcatgttggcatgagttccttcatttctgttcccatctaggaaaggatgtcacacctccatagctcctcgataaggtgatcaactgtgctactgctgattgccttgcagtgctgaagatttagccctacaagagtctgacccatttttcccaaggcaggcaagctcctgtctgataccgaagagcaacctgacacagagagaatctgcagattgagatggtttgcaccagccaaggttgcaatcccaaaatcagtgattgcacatcttgagatgtcaagtttgctaagcaatgggcagttatcagcaacagcaaccaagctcgcatcagtaatctgcttgcaaccttcaagatttagcatttccagtgtccagccatgtgactcagtcattgcagaaacaatcttgtctgtaagattgacacagccactgaggttaaccttggtgaggccagcctcgcagctctccagcagtgaataaagaccagcatcggtaattctctcaagaccactaaattccacatgctgcagttcagggcacagctttcccaatacagccaggctagcatcgccaaatccaggacaattgcggacgcacaaagatagcaaagattcactttgagacagtttagataatcccacattcaggtccttaattcccaagcagtatacaagagaaacagcctttaacttcgcaccacagttcaaaagagcaccaaaaaacccatattgggtgatcctgtggcactcctccaattgaaggctctcaagtgatccagcagctttggaaaaagacaccaatccattgtcggatacagaaacacacttgcgtagggaaaactgtttcaaatttgggcaaccctttcctgctgcttcaagccccatatctgtgactccttgacacgatgtaattgtcaaggatttcaacttctgaagcccttgaccatttcccatggcccagaagcctctctcacctacattagggaggctggtaaaagtgagatctgtgattgtgctgccataatgtccaataacagcaagagatacatcactgatgttcaatgcctgaagcttcacctttgacaagacacaagaggtagaagataccaagctcactatcccttgatccccaacaagggggcagctttttatggaaatgcttttaaggttaggacagctccttccaacagcttgcaagcctgcattgccaatgtttgaacatgactcaattgttaactcagtcaatttagggcagttctttgcaagagcaaacaaagcctggtcggagattgcgggacaccggcaaaggtcaagcttctctaatagatgacatccatttgcaatctcaataacaccttcatctccaacagaagccacgttccacagagaaagaacccttagagaaggacaaccatgggcaatcgacttgagaccaaggtctgtaactccacagccagaattgcttcctcgaataaaaagttctcccaatcctcctcggctagctgttccaactgtaatggcagcaagtctaacatctgtagctttcttcccttccaaacttctagagaggtacccatcactctcaaattcttgatctccgcccttcttttcagaagtatcttctttgcataattcctccttacggatgttacttaaaagtgtaagccagcgctttgaaacacaggcagaaacacttctttcctcagcagacatccgcctgaggatctcaaaaaggcactcatctggtagaacatcaatagaggccttcttcttcttctgggacctctcttcagcgaaaacaaagggagcactgtcgcgagatctcttccgagagggaaaatagacatccacatgattaccaagggacaaaaagaggctggcctccttagggtttgaatataacgaacccataaggcaaaagtcatcgttacctgataaatcaaaaccagaattagcttactctaacaaactttcacacgatccataacaagaatttaatattatttcacaaaaaattattaggagcaacaacaaacagacggaatcaatccacccctacgaggggttttctttttgtaaatcacatctttactagataatatccacagatcacaacaacctactcagaatatctgacaaaacaatatggagatcgacggtgctcatatagtcatttatttctataacaaaaataatgaaagtacatgatcaaataatacccctaaaactaaatacagacaaaaagttacatttaaaatttaaaagtacactcagactgaagctcaaacctacgaattacataacaacatccaaagaacatatcaaat

SEQ ID NO: 195004 - DNA, 1282 bp, Cannabis indica
aaaaaaagtgaaaatgatctaggttttgtattccagttatttccagctgatattaattaaatttccccggaattactaaagtctagcacttgcaccaatagcaaatacgcctatgcaaatcgcaaaacataaacatgatagtttttaagcagaagaatcaagggaacatacaaattaatgagacgactgttcaaagctttgcattcttggataatttcctcttcatccaaaagctcctccaaagtgaaattctccttgtctagtatcgactccacctgcagattgcaattacgaaaataggaatcaagaaacaataacaggttaggccaatatcataagcttaatcacttaaagttcaatttaaacaaatgcccattgcataaacatgtacatacatagctaatcaaaaggggaaaacacagtaatatgaaaataaaggcagatgtattataaagtctactgcccacccaccattgaagcccctaaaaaggcttaaatccttcttctttttcactcaatatgctcataaatccagccatacaacttaaccacacacaaaatatatataaacatcaaacaagaataacaacataaaatcaagtcccagaaaccaaagcaatattttcacaatttctgaaacacgtaattactagcaacatataaaataatttcaatttttcccataacaaaagaactttaaatatataaacaaagaagcaatttccaactacaattcccatatcactgaagagtattagtattattattattattattactatttcagaactggttgaaattaaacttacaggagaggaggcagagagagaagtaagcttccaaaacatgtcgagaaagaatagagagaaagcgagaggaaatcagtaagagaagagctggtggtttagatctgcaagcaaaccctagaaagagcagtgaatctagggtgttgatttttcagagtgacgaatgaggcggagtggtcgagatttgaaaggctagcaagaacagttcttgtaataaccccaaacaaaaaaaaattaattaatggacctgaaaaccctaattttacaaaaattaaaaaaaataaaaaaaaaattaacgaagatcgaaaggaggcagaaccgtgaagatcgagagaaagagaaagagagccccaaaaaatcaataaaaagaaaggtaagagagagaaagtagagagagaaaactataaacgatgatgatgatgatgatgatgatgatgatgatgtgtattctattctattctactctcaaatttatg

SEQ ID NO: 195005 - DNA, 1646 bp, Cannabis indica
ttctctctctctctctctctctctctctctctctctctctctctctcaccatgaatcgaaatgtagagccttatatactgttagtagctaacatgtccaacactcaacaaatcgatttttaactaacataaccgattttctaaataaggaatgtttgtaacagaaaaaacagttggaacaactgttggagaaaaacagttaaaggttttaaatgaattatttttccacaaaacgtttggaggttttgcctcaatttgaaagtcaatcacatatacaaagaagatgtaatattataatttgacatcaagagtacacaatttcatcatttcatacaatgcaacccccttttccaaaaaatttcctcttttaacaagattagcttgctagactcaaatttttctttcatgcctgcagaatattgcctaacaacatatattatatggagaacattatagtgatcatgagaagaatcttcttctaagaagtgaagaagaatttagttgtgcccttgccttatattgtaagagaaatgctaaagggcacccgtggtgcctagcaccctcctacgtgtgtcaatattgctattagttcaactaagtatcgggtcccatataatttaatataatagtttttagggagtatcgctaatcaatcgcaacgcgacatgttgagaagctgctaggcaccaagtgatgcctaatagcaatactcatattgtaataacttggatctcttctcattaattatgaccattcacattgacgtatatgcctacaactgaattaataagtagggcttgggttgtgacatgagtacgtaacagttctacacaattcaatgatatataacaaattaatttatatatgcttaggattattttattttcttctttatataacaaattaagaagagaaaagacaaggacgtagcaacgagctatttatatatattaactataaatagatatagaggtatgtagagttttataattttgtggcacaaaatctctgtaaggatatggtatttgacagtaaatatagtagtgtgtgcgtagacatgtggtatggcatgaaagagtcaagagtgtcactattaatcaatacataacagtcaattttttcttaatagcagaagataaagcaacaggaaaatgaaacaaaaaatccatatatatatatatatggatgcagaataattaatatatgagaaatataaaaatgtgtcaatggtgtctagtattttttttatcatattactattgatgtaattaaatttcgaattttaaactacaaaaagagacatattgttaccgataaaattcaatattaaatctcatatattttaattgaataaataatattaaaaagtgataatttgcataccttaatattaaatatatttatagtgtaatgattatttgtagtgatgggagtgagcaggactaaacctcaaaaccccacttctcacccaccttacctatatataatttccacagagtccgaatcttggtcgcaataactactcatccttttatatatagacctattaattaattcatatttatgtctacaaattttatgtcgggtatgtatatatatatatatgtttgacatatacatatatgggtatgtttttaatgggtatta

SEQ ID NO: 195006 - DNA, 1190 bp, Cannabis indica
agattatgataaggtgatttttatcctaaatataaagtctataaaattagatttggttctcataagtcaaaccgaccttctatgaatctattctactccgtgaagcattttcttacacctcaaatcgaaactcttctctctttttcttcttcttcttttttttttcgaaaggacaactcaaacaataattaactcattcattcactcacaaaaaactatttggtggaatcaaaatatttttgagcaaaatattttcataattaatttatcatgtgaataaattaattagagatgatcttaaagcgaatgttgattttgtttgtaatatgtaaataagtcgataggtggttattttgttgatgttgatctttgtagcatttgttctttttgacaataaaattttctcttttaataaaagaaaatgtcattttactttgccaaaagaaaataccattttaattatctgattagtgatgtgttatttttagcattagaaaacggtgttacacagtaagtttttatagtaattctctcattaaactataataaatatttgtaaaaaataaataataagaaatataagaaaaatactataacataggttcaatttattttaatttaataataattataaaaaattattaattatttgtaagattttactgtgataactataataccttataacaatgctaacacacgagacataatagaaaaaatctttaaagttcaaataatttagtatttttttagcaaaataatgcactaataaataatacaataaaaaatacattgagaatacaaatttaaacgaattaagccaaccaaaaaatttgttgaggccaatacatatatatatatataaataaattaaattatgggaggccacgacaccctccccggccctagctccatcattgatgatgggtagaaatagattagatgaatgttaagagcgtatataaaacaaagtcattctaaagtaagggtactccttttaaaactaacttttgtgctatattggaggaataattacgtttaaagtatggtagtgatgtatgataaaaagaaaaagttgattaccacttttgcataattcacacctaattaatagtaataccaccattcattcttgtagtggattatcattttgatcattataaaataaaataatttaatgttggttagta

SEQ ID NO: 195007 - DNA, 1114 bp, Cannabis indica
agagctgcactgctttcccttcctaggaaagatgatgattctgattcaaacctcaccgatccagctgccttgagaccagtaaaactctgaagcgagttatgcgcgttgaccttcaaagcacaagactttgaattcgaaagtgagctcattcttgagccatgggaagcagttgccccaaatgacaaggtagctgctgctgatgttgctgccatcttagacactgtgatacatacaggaattcttctattacaacaaataaaatgtggtttatcttacacatataatcttgaacatccctaaattatagagtacaaatatgtatgcatctaaaatactcataaaaagcaatctttttattacaatcactaagcgtttgcatatataaatcaaaaaacaaaaactcaaacgctcaattgtacatatgtcaatttattttaaaatcaccattttcatattacaaaaacacacaaactcactacatttcattcaaaaaaatcagttttacttataccaccattcaaatctaacagtatactgcattgaaaaattacaaattcaaagctatactttttaataaatcatgctgcaatctaatcgggacatttagagcgtggacacaaccaggattagaattacaattaaaagcttttaggcataaagaatttgaagattaattacaataataataataataataattaaaaaaatgggtgtcattatgaaaccaccaaaatatcgaaacatcagctaaaaatggcttcttgggacgaagagaagagactaaattaccgaaattcaatcggtccctgtaaataaatatatcataatccatttaagaaaagctagcaattttgaatcctttactcgattcccatcactctgtataaattatttctcttttttccgaaatataggaacatcaaccagatccaaaagcataaacaatgaatgaacatttactcaaacaaaaatagaaaatcataagaaatggaagaagaaacgaaccttgaatgaagatgtactgagatgagacaacaacgtgaatctggaattggagagagagagagagggatgagggtttgatatgttaaggtgtgtttggtgggtaagtagt

SEQ ID NO: 195008 - DNA, 5183 bp, Cannabis indica
actcctgcacttcaagatactctccattgaaacttctcttatgtacaagatattttaggtaaaatacataaaaaaataagtatatttcaattacatataaaattagaggtaaatttgattaattgattaataaaagttatattttttaacttacccaaaataatatagatgctcaatcgtttatattaatactattccacaccaaaatttacaggccaatcatataaaaaattattaattttatatgtaatttttttaaagaaaaaagaattaccatatgtacgagttttggggaagttttttttaaattttacgtctttcttttttgcttttcatttttatagtttgcttattttatttttacgttaaattattatcattaatttttatttttacattttactccttattagactaatttgttcttttaccgtctcttttttttttttttttgtaaatattttaattttacgaacactaagatatattaacttgaaagtatatatagctaaacattttgaccctatttttctgtaacattttgacttcttttttcttatttactgctcaaaatgtaatattttcaacacatactcatttaagttttatatttacatttaaaattattgtgggaaagtgggaggcttgctttcggggtaaatatatataaatttactattttttagtgtgtatgttcaaattgaatatgtaagcttattaccctagtaaatgtgaattatttaaattagatcaagtgaaagagtctagtattgaattacaacaatttaatttcacacaacaaccatatgagaatgcttacaacaacccacatctcatataaaaaccatgttatcaagagcaacccaatcgcatatagcaattatattaacaacttacaacaacccaacctcctacaacaactatgttaattattggcaactcaatctcatactacaagcatattagcaacccttacaacaattcaatattatacaacaattatttttgcaacccttacagtaactcaatctcatacaacaacacttacagatctcaatctcctagagcaaccatatattagcaaaccttatagaaactcaatctcatagaacaaccattttagcaaccttgtaacaaacttgcatgttagaaacccttacaacaatcatatctcatacaataaccatgttagcaacttattcaataatccaatctcatatacaacaaccatgttagcaacccttacaacatcacaatcttatataacaaccatgttagaaactcttaattatagcaacctaatctcatacaacgaccatgttagcaatatttagagcaacctaatttcatacaacaactatgttagcaatctagaaagagacacttacaacaaatcaatcttacatagcaactatgttagcaatctagagagagatgttgaaacaaaaggaataacagaaagaatgtgtggaatgaatggtcaattcattactgtgagcaattgctctattaatatacaatacaaagctgttagagagaaacagctgaaacaaacagaaacaacagaaaatgacacctcagcataacagactaacggtattaactatcactaacagattaagtcctaacaccctcctcaaactgagcgggggtagagaaaccaaactcagtttgcccctaaggagagaaaatcgagcattggaaaggggcttggttagaacatcagcaatttgatcttggacaggaacgtgcttcacttgaagttgcttgttgaggatgcgttctcgcacaaaataaaggtccagttcaatgtgtttggtgcgtgaatgcaacactgaatttgctgacattagaacagtactttggttgtcacaccaaatggtatggggtgagagctgaggttgatgaagttcactaagcaaagactgaatccacactatttttgcagttgcattagctaaacttcgatactctgcttctgtacttgaacgagacacagtacgctgctttttagagctctaggagatgatatttggcccaagatagatgcagaaacccgtagtggatctgcggtcatcaggatcggaggcccaatcagcatcacaaaaaccagtaagaggcaaagtaggagaggcctgaagcagtaaaccatgatccaaagtgcctttgagatgtcgaagaattttcttgaaaactttccaatgagtatctaaaggactttgcatgaactgagaaactttatttactgcatatgcaatttcaggccgagtgactacagcgtactgaagggcaccaacgatgcttcggtgctggtgaggatcagagaaaggatcaccagtataagcagagagtttttcactactgaccattggtgttggcatgctatttgagcagtccattttggtcttgcatagaagatcaatgatgtactttttctgagacagatgcagaccagagtttgtgtgatgcacttcaatcccaaggaagtagtcaatctgaccaaggtcttttagagaaaaggagttgtgcagcttgtgaacaaggtcagaaatcacagaaggacagcttcctgtaaccaaaatatcatctacatacactaagagaaacagtgtgtgagatgaagtcttatgaatgaagagggattgatctgcctttgaacatgtaaaaccaaaagagagcagggcatgtcttaattgtcaaaccaggcacggggagcctgcctcaacccatagatggccttattaagttcacaaacatgctttggataattcgagtgaacaaaatcggggggttgcaccatgtatacttcctcagataactccccatttagaaacacattattgacatccaattgtctaatgctccagctcttggaaagagctatggtgagaacaacctttatggtagttggtttcacaactggaccgaaagtctcagtgaaatcaaagccatattgttgaagataccccttcgcaactaaccgagacttgtgtttatcaatggagccatttggtttatatttgattttgtgaagccacttacagccaatggctttcctgccctcaggtaaaggaacaagtttccaagtgttattgttctttaaggctgtgatttctatgttcatggaaggattccacatgggtgattgtaaggcttctttaatagtcagtggggtttcggattatatgaaagtttttagtttatatgtgccaactttaccacgggtaatcatgggatgattgtttataacaggaggaggaggtgcagatgatgggactgtggttgcaggaaggggaatggttgcaggtggggaaggtgatggttggtgaaaggggttgactggtgagacccgattcgtgggtggagaagtgtttgtgacatgaatgggagttggaatgggaggtaatgacaaggcagtagggtgatgaggtggtggtgtatcaggggtaattgtactgggattaggacgggggataggtacagagggcagagtactgagtggtgaagtagtggaagtggatggggttgacatatgagcaaatgggaaagagtactcatcaaagatcacatccttggagatgtaaattctacacgtgctagctaaacacttgtaccctttgtgcttaaggctgtagccaagaaaagtacacttgacaaacctaaactcaagcttgtttctattgtatggtcgtgtgttggggtaacaagcacacccaaaaactctaaggaaagagtagtctggttttctagaaaataagacttcaataggagtctgattttgaagaataggagtggggagcctattaatgacataggtcgatgccctcacaacttcatcccaataaaacaagggcattgatgcttgggcaagaagggtgagggcagactcaactaaatgtctatgctttctctcggccacaccattttgctggtgtgtagtggggcaagagagtttgtgactaaatccatgttgatttagataggattcaaagctttgaaattcacccccatagtcagattgaagagcaagaatggggcaatttaattcttttccaatctgagtcttgaaattaataaaggtgggaagagcttctgacttagcttttagaagaaagacccaggtgtatctagagaaggcatccacaaagtaaatgtaacatttgtaaccactcgatgacaaatatggagaaggtccccataaatctgtatggagcagttgtaggggtctagtatagatagtctcaaattgggggaaagagaatttatgaatttttcctttgcaacatgcttcacaaaaatcagtaggcattttataactatgaggaattttacaagcattcatgatatgagttacaattctggcagagggatgaacaagcctcttatgccataaagagaaagctgtaaaatttgatacaagagaagtgggtgtagtgacacccacattattaacagacaaagctacaggaaacacaacagacttagggtgaggtttggtgagttaaatctgagatggttggatgacatacaacccatggctaagttgtccttccatcaacactgccttggaagcctggtctttcacaagataatggttaagataaaactcgaaaaaagcattgttgtcagcaaaaaattgagacacactaatgaggttattagtaatgtgaggaacatgaagcatacgatttaaggtaagaggtttagaggtataaggagtaaagaaagtagccttaccaacattctgtatggtgatgctagtaccatcccccatatggacttgatctgtaccttgatagggagtttgctgagtgaaattattaacatcggcagtgcagtgagttgtagcacctgaatccggataccaggcatcatccggtaaagactcagcagtggctatgttgatagattgagaccccacattagctgcaccaactccaggaaactcgatgttaaaacgctgatagcatcttgaagctatatgacctgtgcgagagcatagttgacaaacaggttttgtccagaggcgaatgcaagagtttgcatagttcgattgatcctaaggaactgaccagaggagcgagaacacctgtggatcgaggagcgaacaacataaggattcccagaagcctctcctcctttcgacagggtaaggacttgtgcttgagatccgtagatgaatt

SEQ ID NO: 195009 - DNA, 1111 bp, Cannabis indica
ttttttttttaaattatgaaaataattactctaatttaaaattagagaaaatatgagaagaggagtactatataatcatataaaagatagagagagatatatatgtggggaagtgaagatgatggggtgcaaagagtagtggatgattcactatgaagacctccattagtactctttttgagttggtgatgagctataaaattgacccaacatcacctctttaatggatcaaaaatgaacaccactttagacttttatataaaatgtcaaagttggctttcacttttttaagtgcacaaaaagattttagaagagtacatgataggaaaagagaacatttattaataaatcccacttgtttgtttttatatattaaaaccatcaaattgtgtttctaattattattacttacaaaaaggttaattaagtttcctcagtaaattaatagcatatattatccactttatgtggacatttttggctctcctattttgtggggtcgaattcctcaagaagtagagtagcataattatatcaaattttggtttttcttttcactatattataaaaacaagaccaatataaactattagtacaaaagactatatcatataaattaagactaagagaattttcaaagttgtgagagccaacaaggggtatgacaatttgtataattttgtcgtagtttgtgtcaacaaaattttgatacgatattattatactaattaacacgaatacttacaacactatttaaataatatgtgaaaacttaaacataaatataaatatattaggaattttttttccaaattttaaaatgtaataaattatgctctttaaaattttaaaatcgttaaaactttttcttgaattattaagattgttagttttaaagacttttgtccaatttatagtaaggaaagtctaacatgaataaaagtttaggggacatgatttggtgcatgtcaaagtttgaagtagacgatttggtagatatcaaaatttgaggagaataatttaattagtacataaacaataattgccgaattagtaaaattaaatgaaactagataaaagtcctaaagttcaacaatctcaatagtttagt

SEQ ID NO: 195010 - DNA, 1717 bp, Cannabis indica
cagttttcacaccatataaaaatagatgatatagcttttcatgtagtcattcccaacttatacctctagcaatttttggatagatgatataggcttttcagcttacaatgctactttgcattgtcattaggcactaatgctaactgaaaatggtattaaattatactattgctaactttagagtaatgttggaatactaatgtcttttaacaattctcttacatgttttcatatttttttttaattaggatcctcacattacctttcaatatttaggaaccaggaaactataacaattgctatgtaggtattcaggagaggactcgaacctcggaccttgttggagcaaaccacatacctgaccatttgagctactcttttggattctcttacatgttttatggagacgaccggataatcttgcctccataaaatccgtagccatatgtataatgtaaaagatttgtaggaatgtggatcttttcagattttggatttttttttttttttccagaaagaaacacattgtttgccgctgcccttagtttgtacgaaaattaatgtttattttgttcattgctttgttttcgaaactaatgcattaaaaatatgatcaatttgttaagtttaacatcatttttcttttaattgtgcagcctagttttgatattcactcattcatctgatcttaagtgtaaggtacttgtttttgttaaattaaagcatttattcttctaaactatctatatgccactgtcatagaattggaaaattagagaatatttgaagagtagagagttagtgtgtatgtattgtttaaatttttcaattgcagttgatttgaaaagataaatggtattatttattgagttttcctttctttgcttatggttattcttattttaattgaatgagtacatttttttagaagctagttgtggatctcctccttaattacatactcatatcaagaatcaagaacgattaatggaccaaatacccccttctgatgatcaggtaattcacttataatagctctttatttaattttatcatttttttggaaaaaagaagtgtagctcaaattaaaaccattgttcatcagctgtgtaggaaaagtcataaaacaaatgaacaaggatgttcagtgtcactaatgtctactctcggtgatgatatattattggaaatattgctaagacttcctgattttagatgtatagtggagtgctcttatgtttgcaagcgttggttctcaattatttctcgttccaaagcctatttcagtcatagattcaatcattatcaccgtcagaaaaggctttgtaactcatcatcatcgtcatcatcatctccatctcttcctttcactctactatttacaaacttagctatgattgatcattatttctttgcggagcagtatatttctgagagatcaaagattcttcactatggtcaagaagcggcattaaattttttaccttggaagatgtacaagaatagtttatacttagagtcgtcgtttgaggatttgttgctagttggaatatatcgtaaaggatgtttgtttgtttgcaatccttttacaaggcagtttgttgagcttcctcgttctccaaacgcttttcatcgtcgttctagatatgcattagtagtatctgagtatagtaagatcaagtataaggtagtccaaataagcacagaggtggatgat

SEQ ID NO: 195011 - DNA, 950 bp, Cannabis indica
aaaaggttatccctgacgtaacgcgcagcttcagggccgccatggccatcgtagatacccacaaaagtagcgtcccggccaatctcgacttggctataatcttcaagcacgctgtttgcttgaaccacagcaaaagagaattcaccaaaggagtgctgatcgaggtctctgtaccataggagcgagtcctcagcatctcctccatcatccttcttcatacgggcatacctcagtggtttccaacacgcggacgctaggtttcccaacctcgacaacatccctcatttccctttaacactacaccgtctcgtgttattcttctcttcaatcttcttcgactctcgaaaacccaccaccaagaaagaaaacaacacagtaataacagattaaagaaaaggccaaaagggttcaagatttaatgaaaatgaaagtaacccagaagcctaaaatgggttataaaggagtagagacgctgagaacaagtgatcgaatgagcggcagagaaagaaagagtgaagaaaacgaaatgggttcaagaaagagatatttgaggaaatagagaaatttgagaagtgagagaaagtgggggagagagaaaggaaatgttcgtggagatctgttagaaaaagggacagtgttggtttgtacgtgcgatagagagagagggagagagagagtgaggattgttactttgttgcagagggagggaaggagggactagttgatggaagaaaggaagggaaaggttgacgaaagcgtgtgatcatcacttgcttcgaaaggtgaaattaccaaaataaaccataattagttatttaattacagttaagccattaattttcagatgaaaggatctgtgggaggacccccttctctatttgttccttttacatgggtcccgtatctctcttccttcccgacaaccaaaattaataaataaatcaaaaaat

SEQ ID NO: 195012 - DNA, 2074 bp, Cannabis indica
aatcaatattagttttcaaactttcttttccctaaaccatctcataaccaacaagccctaactatggctctgcaacttcatccataaccccctaaacactaatccaatccctacccattaagggcaggatggccaatgggagctcccaaccagctcctcctctctcactccaccaccacctccacctcggcctcctgtctcttctactcttccccagtctagccctagtttcagccgccattcgacacggcgtcgttcgtaaacctttcgccgacatttcctattttcgtgaagcaccggcttaccggaacggagattcatgcacaggacacggcgataaccggagaatccacgtcagcatgacgctggactcgaattacctccgtggcacaatcgccgccgtgctctccgtcttgaaacactccacgtgtcccgaagacgtggagttccacttcatttgggcgaggtacgatcccggtgtttactccaccatccgatcgaccttcccgaacctaaactttcgagtctaccgattcaattcgaacagagtccgaggcaagatctctaaatcgatccgccaagccctagatcaacccctaaactacgcgagaatttacctggctgagatcatcccgccggacgtgaaacgcgtgatatacctggactccgatctggtcttagtcgacgatatcgccaagctgtggaacgtcgacatggaaaataaggtcctagcggcaccggagtactgccacgccaacttcacgaactacttctccggcgagttctggtcggacccgaacatggctcggacattcgagggaagaaaaccttgctacttcaacacaggggttatggtggtggatctaaagagatggagaggaggtgagtatacgcagaaaatggaggactggatggccgtacagaagaggaagaggatatacgatttggggtctttgccgccatttttgttggtttgggccggagatattaaggccgtggaccataggtggaaccaacatgggcttggaggtgataatttagagggccaatgtaggagacttcatccaggcccaataagccttcttcattggagtgggaaagggaagccttggttacggttggactcaaggagaccttgttccgttgaccatctttgggccccatatgacctttttcgtctttcctcaactcacacatttgatgggtaaaaattaaaattaaaataaaaatatattataatgtatattgggaaaaaaaaaatactaattgggtcatgtgtttaatgccaatatacatacaatccgcttttatattttgctaaacgacattttcaactatgtgttttgcaatattaatcaaattcatattttgagctcaattttaatcaaataaattttttaatatgatttattttgagtcaactttgaaaaacaaaactcgggtatcaatttatttatttgatcgaaattgagcttataatatcaatttgattatttatttagtaaaacacaaagtttgaggtgtttaacaaaatataaaaaccactaaatacctgggtcgaactggtaaaataatttaggggttatgtgcaaaatcttcttatgtttctttctaaaatttggttcacttgaattatgtgggtatgagcaatttgcagcttctttttagatctataaatagagaagagagataatttggtattaaaaaaaaaaagcttattatcagatgaagaggtggggaaatgtataagcttctgagttgttttgttgaggaaattatggacatcaagccgtagagggtatatatatgatagtatcttttgcttagattagtttcagatgaccataaaatcctcttaccggagttatttccatgttcctctaacacaactctattttttttatatataaaaatatttccacattcaaatgtaataatatgtgtatataattgacttgtgaattattattctatcttttttacacattttgagttggtttgtaatttttttttttaataaattaatctatctacttgtggcgtatttgtaaataaaaagtaataagtacaatag

SEQ ID NO: 195013 - DNA, 1936 bp, Cannabis indica
attatttgtcgttggcaaattactacatactcttttctgttatattatttagtgcagtccaatttcgctacgtactttccaaatatgaccaagagaaaaagttgttctccttttaaatgtatatatgtgtatgtatatttttgagaaaaatatgaatatatattataattttgtatataatggttggttcttgtctaccaatatatataaagtgttatatactaagaaggtattgatctatttgattaactagaggcattttactgatcatcttatttagaatttcatatatatatatgatgtatataaatagctcttgataattataagttggtttttatttatctttgatttgcagtataactaaaacacttgagcgataccagcgttgttccttcactcctcatgataatagtagtgttgaacgcgagacacaggtatattaattctccaactatcatcaaatacatatatatatatatatacacatacacataaatatatattgtgtttaaagacgctatttgtaaaagcaccgtggtgtaattatatttgtgtgtaattggagataattataaaatttgataagttagtaattacagtaattttataatttgaggtaatattgagagattctctaattaaactctctaattattatctacgaaagttgagtacgtaattttactggaattactgaaattttccattttaaacattaattattaaaaaaatattttttccttataattactaattatttttttaaaataaaatattaagaatttgtatataattaacatctcatttttaaacttaccttatattttaaaatacagtataattgctaaattgtataattactatatactatttaataattatacagttactttcaaaacagaaaatacaaaatacgaaccatgatatatatatgcgtgcattatgtatcattattctttctatagcctattatattgatcaaacaaaacattctcagtgatatattatttttatacaaatatataaatgcatatacattttcaatatatagttaagttctgaacttattagagccagaaatttattatatgtatatacatagaaaattcctagctggttacgccagcccccagttatttatatatatatagtgagtaaggaatggatttgagtcatattttatttctgtgagttgtttgaaatttagatataatatgataatggagtgtatagtacacactacacacttttaattaatttattggggaaatagagctagcttgtaggagcgtaatttctttaaatagatatcgatctcttgttcaataaataaatagctagcattttgaagttcgataataatctttaagaggtagtggctagtgtttatgttatagtaacaaacatcgtttattattctaataaacatttttgaattgtgatcaatctaccaatgcagagctggtaccacgaaattacaaaattaaagaccaaatatgagtctctcgagcgtactcaaaggtgttatatacatacacacatatataaatattagttagtctctaaacatcagcattatgttgttctatatatacagatctatgcatatgttcttgaacatctattacatgtagctatttgtttaaaattaatgtattagtaagtggattttgtatcttttttttaaaaaaaaaataaaaagaaataaatgtacacgagattctctagctaatataaatttaattactaatttttagttgagtaaattatctattttaaggcatttgcttggtgaagatctcggacctcttaatgtgaaagagttgcaaaatcttgaaaaacaacttgaaggatctcttgcacaagttagacaaaagaaggtatatatatgcatcttatatacatgtaatgatatatatgttggaatttaact

SEQ ID NO: 195014 - DNA, 2612 bp, Cannabis indica
ctcctgtaatacttgacaattgaaggtcacttctagcattctgattactaatcaaagcaaacattgatctttgagttggcattgccactgtttatctatgctgtgtttaacatctgatatttgaatgttggttgatgcttatgataatttgtgttgctctgttttttggttacctacaaactcttgtatggctgcccatatcgtatactattgtacttagatttgctggggccttgtgtctctgaccttttgagcttatcatggattaagtggtcatcaaagttaatagaatctgttatttataagtagagatttgttaccatctatgactgattttcatatgtagaatagaaaaaacattgaaaatccattccttcaaacttagtttgcgttgctcacgtgttaccatctatttctcatctttaggagtttcaagacaaaaaaaaaaaaaaaaaaaaaaaaagaaaaaacattgactttgtagaatcttaaggtgtttaatattgaatatatgaagtgtgacacattgttacactcgtttgtaagatataatgttaatcaggcagcttgggaaaatacatgatagtcaaatccctaacaggcaaaaactcccaagaaaaatatatgatagtcaaattcctaacaagcaaaaactggtcagactcattcttaatttagtaatggatttgaggttctgcattctaaattaagctatgacgagaagactttggggtaagtttcctcttagatctcctaaaggaacattttgcactctcctgacccaaagcagcagcatcatcatcatttgtttcactggctttctctgattcaacttccttcttcacactctttgaaacacacccattcctcttatttgggcttacaccctgttcctcttcatcatctatcatgcactttgttgggagctcttctaattttttcaacttctttgtctgtttcgattttgagctatccttcttcatcttccccgttgatttctctttggccccataactactattctctttaatttgcttacttgaaaccagggacactctaactatgtagatctgcaagtagcatttcagttcattaactcaagacatgactcttgtcttgttctaaccccacctaatcaataataataccttgcaaattagtgacagatttgatcttaccttaaatctagtaggttcaaccagctcaaacacacaggcatcaccatcattcaacttatgctccaaagcaaatgctctccaacccccacttaagccagatcttttgccaatgtagatggcatcaaattcttttccatcttcatcctctaattccatatccacaattgattttggaagataattctcacagaacttagaagggaggcccttaaaaaagaaaaaaagttgtatcacattttccatccacctaaagatgagaaatagaaatctaatataaaaatccattcactcaaacttaccaaccaaaagcaactatagacatgagatcgaaccattgatttgacaaaagttggattctcagacttcaaactgctttctagttcctctgcagctttaaaagcagcattcctttcttcataagaagctattatgacttcgtctaatggcctcgcaagatagctaaaacaaatctacaatttcagtaccagaatcatgtaaggaaaaattactaaacaaacccaaccccaccttgcccaggatgatggatttgatcttgatctcttccgtgaagacggaagctctacataaacctgtaatgacagtaacacagctcttaactcttttcaagaacacatatgttcatttaggaccgggtactaaagacagaaaacataaatctaaatcaaatttgtagtcttaagatgtgtgtaggaggttatctctccaataacacgtaacatgaagaacgcacacacaaaaatcgaaagacaagaacacaaaatttactttgttctgattataataggaatcctccagtccaatccactacgttagcacaagattacaccctagtgaattcctatgttggatctcaagggaaatggtttgaaagctttggtttggttggattactatatcactctagtctcacatcaaagctttcaaaccatttcccttgagatcaagcactcatcaaagctttcaaaccaacccactatgttggacaagaggattggacttgagatcaacgctttcaaatcatttcccttgagatcaagcactcaccaatataaaaagaataaccctcaaaaactcacattggctaacatagtgtgctttgaccaaaggccaaaatagtgtcatatattgcactatccagcgaggtggttgcttctctaccagagggttttgttgacccgttttagcaactttcatcacagcatgcataaataatgaatgcaatcatacaagattgaaccaatacataactaaaatatttcatatagtacatttactgacctcatcacaatatgattgaactggttgcgtgaccgggaggaccgtctaggctccacagagttacaaatcttcgatctgggttttgaaagatgtcgttgctgcaccataaaagaccaacaacaaaagattacaaac

SEQ ID NO: 195015 - DNA, 1305 bp, Cannabis indica
tccataaaaataaaatgtaaaaataattaaagaacccataatactgaaataaatcatcacgtgatgacaatattattacactgataaattaaatctcattacatatgtataagctatatacacattttaattaattggttcggttgattgaagaaagcacagaaacaatgatgatgaaaacacaagcggcgaggagtattccagaggcaatgtagcccttattaagaaaaccagttatcttatttctttcttcttgtaataaaccaataaaatcagcaccaatgccagctgattccccaaacaatataagagtgtccatagcatcaggaacgaaatccttaagctcaaaagtggtagcgaagccggctcccacccccgacgccgccaacaaactcaccaacttgtctccgtagaaatccaactccgccaacactttccccggtatcaacctcttccccttccacccataatatattgcaaatggaagctgcactatcaggtacgctgctccaatggctgctgtcccaatcacaaatctgtatataaatatataaaaatatatattccataaatggtcgtatatgtattcacaggggaaaggctgttggggaggatctacttattgaactttgttacataagtcataattaagttatatatatttatatgtatatcaaatttttttgaatgatttaacatcttatttgaattgtgctttcgaataaaatatgcatgtgatttccctgcgtacagcacaaaatgaccccattttccctataatattcatgtttaatagtattacacacacacatatatatttatatatatatatatgtgagtgtgtatttatagttaattttcaggtacgtacctgtacgagttaacatccttgaaagtggttttatctccatcactgagtttgtaggtgtcgagaagaagcacaacaatcgaaccaacaaataataagagtgcaacaatcctcaaggcaagaatcaagggagccaaatgaatagttgtggatttattgttacgccccatttagttaattatgatcttgatctctataataatattaataaagagtaataataaccaatatttgtggcctaataattctaagttctcaccaatttacggctgcattatatatcaggttagtaacaacaatttttgtgtatatataggcaaaatttttagacgaaggacaacacaaaatagatttatatataatatatatttttttggctaaaaaatatcttgtataactgtaatttggactttttttatttgtcttggtcactattg

SEQ ID NO: 195016 - DNA, 1172 bp, Cannabis indica
ttttttgtcggtgtcaatatctgcaaactgtagtgccattcaaccttgtaagccctttcatcgtggccatcctctgcgtacaccaataattcgattttcgggactcgaaactgagtttgccactttgttcgccgctctacaaagcccatgtttcttctattaaaaccacctcgaccaatcaccatagacccttctccttgaagacaatgaccgaaaccaaaatatctgaccctttctccttgaggttggcgagtttatcatcaattctgtttcgggcagttcccaatctgtccagtaccgcctccatcgacttcagcgcaactccatgatgttttagttcaactccatggttgttgagctgactttgaacaacctttaatgctgaatccgatccatctactcttgattccattctcaatcaccggcaatccccaagaatgcatctttgataccaaatgatatgacctgataattttgaactcaagaacacaataaaacagtagcaaaacagtaggaaattatattgaaaataggagaataaccaattacaagctattggagtccttaggcccctttgatgaaaagagtgaacactcaatacattgcatacccccatatctcctcttacttacctatatatagaccctattctcactcacaataaacccatcctcaaaacaatgactcaaagtcctttttatttactatactctagctcatcatactaatcgcctaacaactcattgctcactgcattgtccatttcacttggtgaattttttaggattatgtatctgatattattgcttttggttttgctttacgactaattttggctattgttattgcaggatgtacaccatggaaatggtacacaagagatatttgaccagaacaaatcggtgagcactactattattgaattttgatccttctgtgcatcaacattttaactaagcctcgtttccattgaaatgatttactggaggtggtggtatggtgttggtttgtcacttatgtatttgggatggagaataagctaatttataatggaccttatgactgtcgcaagtactttgatagggcaataggcacccaatatttttttttgagaaaaggggccacttttctttgactgacctctccccgttataaatatgaaaaccctcact

SEQ ID NO: 195017 - DNA, 904 bp, Cannabis indica
tatataaatatatattatattgtaatttattatgttgctaaataagtgttataaaagtttaatttagtgttttgcaccataatctcttataacaaaagtaattttttttttccaaagttagaaaatgctctaatctaaaagctctaattaaacagtgttaacttttcaccctgcatgcataacttaattgatttgaataacttaagtaagactgaattttgaagtgtttgagttacatttgtcaaatataatataattataaaatatgaagttttcttttgcaatttgcaggaaattaagcaacttggaaatgtgtatagttgtgagtgacactaaaaaattgcaaggcatccgatgaaaaccattaaatctctaagctttgcattggtatctgtatcttgatgcacatttaatgttatttattacatttgctgcttccttttttttttttttttttttgaataaatatagtgttgggggatatgagaaataagatcgtggaagattgacacctatcaaaaaattccatgtgaaatccctattaattaatctgtttaatataagctaataattaatgagcccacaagttgacatcttagtacatattgctaggtagaacatggatgtccttttcccttcaataattaatcaatacatacgatcatcattatcgttttcttatttaatgatttgactaaccctcaaaatgaaatgaaaacatcatgtattacttaattattataaatatatattcctatgtgtatatatatatttctaaaaaaaaaaaatcaaaaatgacgaatatgtaaactcaacaaactttagtctgacaatattatagcccatgatattgcaaaagttgttttatcttcgattatgttatggtttggtggtcgggtctctt

SEQ ID NO: 195018 - DNA, 1409 bp, Cannabis indica
aaaatctttttttttaaggctatacacattttcattttatttcattctgttccaattttcattatcaatcttatatatttttctatttttaatgctttcaaccaaaccctctatgagtaattgtgtaccttctttaagcctgggacaagtgcagaaagagcaatgaagcgttgggtgagcttttctcttcttttcctctcagccatgatatggtcttgagcatgtgaaggagttttgatcattgagtaaggcctcttgttattattattataatcattagtccccttgatgaagattgatggttgagatgatgatgagtaattttccttcttattactaataataaaggaatttcgatctttattatttgataccacatgatcaagatcatcaagagatgagaaattgatatctgtttgggacagtcctttcttgggtcttaatgtagtactactaatatcactcatgttaattttaggtggtgatgaggaatttgggtaatgctggttttgataattatcaaaagaaagaagctgagaggaattagaagatggtgcaggttttttgttcgaagcttgatgatgatcatgatgagagtactttttgatggaatcagaaccacctgatgtggtgattgtagagtaagatgaattactctcagaagagaaatcttgtttgtaattgtctcctcctactaatatttgatgatcatctgaaccaaactcaagttgattatctagagagaatatattattgtagtcttccactccttgctgaaatattaattaaatttgtatagctaattattacatatatacaaataattcacatcatatataatcatactgatcagtgatctatatcaattaccagtacttctgataaccatttcgacgatgccacgtccatgatcagccaagtacttgatcaccagattatatagtctacaagaaaaaaaacagtacgatcgttaatttgttaattagagctgtaaataatacattaattatttatattatgactaaaagcctggaaatcatgaaaaccccaatctaattctaaaatatgttttcaacaagaaattgaaaattaattttacgataacatagatatgttctttcagcaaaaatgatatatacgcagaaaaaacaagtcatcattattataccattaggaaaagagagtagtaatatttcagatcaagaggaacaatacaagagatataggcaaatatatatcaagtataaatttatatgttgaaaaagtaaagatagttatagcttacttgtttgtatgtccagtactactagtggtgaaccaaaagtggcatatttgtttcggaaaatggaggctgtgttgtaaatgatttattttgtactacactcttaacttatgataactacatattt

SEQ ID NO: 195019 - DNA, 1215 bp, Cannabis indica
ctttttctatgagttggctcgtatctgttgttcatctttaattttctcgagaaagttcacaattgaaataatttctagcgacataagcagagcgttggttgaccagaggataagataaaacggaaaatcgctgtctaattactggcgcgttctgttgttttttacttgcttattagactcattcgttttctttgtaaaattttatacattaaaacttgatctgggatcgcataatttgtgtcggtaacagcctaattgtctgtcttgtttttaatatattcttcgtttcgttttctttaagaatctggggaaagattctcttcgtcttttccggtcattgcggtcttcgactaagaaaaagaaatgttgttgaaaaagagaaaaagaaaaagggctggatggtcactttctgctttattaactttaattaacttctgtatttattattttgcttgtttgctatgtagtttatctttgtatttgtttatttcatttcccatgttccaaatactagagttaacaatgtttatatatatttattttgagaaataataatctttattcttatatgcattaacaagattttaaaaagttatatggtagagaagagaatataataaaagtaaggggaacgctgctaataataatcaaggttttggatgtatgtctgatattaaacaaattctatgaaacacaactgttttactttgtcgtacatcatgacattgttcaaataatttaatgctacttatgttacaatgcgttaacttaactagtttaattatcttactcgtacaggggtcaggcagagaaggagttcagggttgaagtcgaagccattgggaaagttaggcataagaacttggtgggtttagtaggttgttgtgcagacggccctcaaaagtaaatccagtctccctccctgtgtatttgtctttataaatttatattaagattgttttttctctttataatgttgtctaaacatttcttttggctattcaggatgcttgtgtatgaatatattgacaatgggaatttggagcagtggttacatggtgatgttgggcctgttagccctttgacttgggatattcgaataaagatagctattgggacagctaaagggtataaaagaattttcatcttcgtgttcttttgacgggaaatttattcatctcactgcattcctgattggtcaatgtgaattctact

SEQ ID NO: 195020 - DNA, 1369 bp, Cannabis indica
ttgataaatacattttcttatatcttctcaacatttcataacacacacatatatatatatatatatatcgtcaagcaaaattgtctacatctcaaacctgaaattaacataaaaacaaaaacaatcgtaaacccgggcaataaaacataaaaacaataaaaataaactaaaaaacaacctaaaaataaacataacaaattttcccaaacttaacctttaccagccctcgagtaaagactaagtttaacaaacaaaaacaaacacacaacgaacaagctaagtcatcattaccatctacactgctttgccactactcacgaaatcttccttgcaatattaactagaatttcagctcaattgccttgaagttcaatttttaaagttcacttaggcaaataaataatatatctcgaaaatggaaactatcacaaaccactccaccattttcatgtcactcatactcatagatagcctcaatatcattttcaactagagcttcaacattcccatcattaatgtaccattcataagctcaatcgattaaatctttttccatatccaagtttctttgacaacaaacaatttccaagcagtaccacaccagaactatgtacccttttattccttttatgtcacagtggatgatctaagtgttgtatgcaatccatatatgcaagtaaaatagtcctctaccaatccaacagcaatttgagtcctttggttcaagaccctcaaagaaaaagcttactaaagtgccattactcatgactcatacacaagaaacctatgattattctcatcacaatatccaattaacccaacaagattcgcctattagatttgttggtaaatcaacaagattcctctaatcatagtcttagtattaaattggctttgatctgagtgttgtctgcaatgccaacagcaattagagtcctttgatttcaacttggtttaagaccctcaaacaaaaaagattgctaaagtgacattactcatgaactcatacacaagcaacctatgattattctcatcacaatatccattcaacccaacaagattctcgtggtgagtttggcctataacattcacttcaacttggaattctttatctgttgtcttgaaacattttgtctacgtgtgtcttattcatattttaattaataggaaaaagagggtgattgaaagaagcccagagtcaaattaatatttattatattttcttcggaagactttgggtcaagtcaactgagtttgtctatgtgtgtcttattcgtattaatgattttagtgatatgtaggttcactaccaaccaatcaacaaccttattcaattgaatatttgattatataaatatttttcattttt

SEQ ID NO: 195021 - DNA, 1132 bp, Cannabis indica
tttttttttttttgctaaacatatagtatgatgtttttttaattgtaaatttgatcttaataatcttttttttagaattttctatgtaaagtgttaaattaagtaacagttagttttactgttattatttgataaatcttataacaaattgaaagacgagaatttttgttgacgctctcattcttaccgttattttttatcgttattttcggtagtatcttataaactaaaagacaagaatattctcattcccgcccctaatcgtaccgttattgacggttaactttcttaaaatagaattatttcccctcctttcttagcaagaaaattttatcacttgtctcaaattttgtatttttttttccatcatacttactattgtcatcactaatagataaaaaaaaaaagttgaattcatctagtaataaaaactcaatattttcacaaacaaattttgtcaatgaatgaaaattgacattcttttttttactaagtaaaaacacttcattccttgattatatggagtgttagtacattacaagttctcacaatggaaacctctgaatgtgatggtcagcaattttctcttccttaatgcatcatcctcaatgaaaattgacattcaatgatctatttattacacctaagataaaaataaataatttatcctctattacttactatcacctcaaactattatccccacttctaatcgaatagattattattattttttataaaaaaaacaaaaaataaaaaagaatcctattcgaaaatcgaaatgtcctataataaaaggtcattttggtaattatgaagaaatatttttggtatgtagtttatattatattatattatatctgacacaacttaaaaaggcaaagctttatcgacctcggtcttcttccggttcttagaaatcagtgtttgtctttcactttaagctcgaaagaccggcggcgttaaactagtttgtttgtgtttctctctgactctgttaccgctcatctaaacgacaccgttatcgatgtcgtttcattcacttaccgaaacttaactctaaaacgaaaataatcaagactctggtcttcgatataagtatacattaaagaaacgaagagaagagagagag

SEQ ID NO: 195022 - DNA, 1259 bp, Cannabis indica
agactttgatactctaccaaatcattgccctcaaactttgatatgtaactaatcatgcctctgaactttcatccatgttatattttttactaaaattagacaaaagtccttaaatctaacaatcttaatagttcagagagaatttttaacggccaaaaaaatttagaggcatgattttgtacatgtcaaagttcggagagaaaaattgctaattgaccattaaaataagttaaaatcaataaaaattaaagtaatttgtagctaaaccctccaatgtctcaattcacttgcaattatctaaactcaaattttagtagtaaaactctccaaactactaaactattaacaaatttaaggtgacatccatttactacagtcaagtgtcaacatggactgcttatgtgtacaatcttgtacacatgacacattgatagtggtacacatcatattattattattttaaaattaaaaaaataatttaaagttagaaaattaataaaataaataaattatttttattttctcttattttattctttcattgttaatgactctctctcctcccatgctctcttccttcaccatcaccattgtcaccaccccaccaccatcaccattacaacactaccatccacaaccaacacaatcacaacctttgcaataacaatcacttctaatcaacactaaaacaccatgacaaagtcaaacctagatttgaaaaaaaagtagtcgaaccagagttaattgcaccaccattccagatttagcctcatcttccaaaacctagaatatcacccttcctcatggacgactaaggcaaatagaggtgtcaatggtggtgtttttcacttcgtagttaacagacagtggtcaacaagtctgatgaagtttgcaagctgtcgagatttgcatgtgctcttgtcgtggttgttcgaagagcccaatgacgacaataaacaattaacatcccgatctcgatctcgaccatgccaccgttatgaacacttttagactcgacaatctccgtctaaaatctagatctgatcggcgaaagtatgaatgtgatggaaatatatttagatttgagatcctcaactattcgacgtcaacctccttaatcttcttctcgacgatcttggaaatgagcttagccttgactacgaatggttgattctcgagcaaagagatcgagctacacagatctgggttttgtccccaccgtcgtcgcctgcattccacctcccatgcttcaaacaaaa

SEQ ID NO: 195023 - DNA, 1757 bp, Cannabis indica
aattagaggaaggaaaattctctacatttccagtcccaaagaaaaatgatcacacaaaaaactatctaaattctcgggcgtatatctcaccacagaatccgacccgcaaactgttaccaacccgattcgattcctctcataaaaaaccttgtacggacccacaattttatccgcaacagaggctttaatcaagtatcggagtttcgggtcgggtgcgacccaactaatctgtttacaataagcctcttcgaaacttgatatgaatttcttgaatatcttcttagcttgttcaggagaaatatcagccgttggatcaactggtattgatgagaacaccgtgctccatccaacggcctcgaaactcgacacgtattgtttcaacttggcttcgtgcttggaaatccaaacgtcaccaagtatgaattttaggtttgagtttcggacctttacgacgacgtattgaagattgttagctaaaaatatataagggagagaaacgtctttgaacaatgttgctttaccgtctaatttacagagaagaactaaaataagccaggcgatccgtacggacaatcccggcgacgatgacgacgaggtttcgtgatcgttcttgttgttgttcgagcttccgaagtaagattccggcaacggcgcgtggactggtaacggccaatcggcgacgatgattgaaagaacctcgctgtaatcggctaagaatgagatgtagttcattacgtaacgagtcaggggatggattccgccgccgggaacgggtttcttcttcgatgagtctttaagtattgccgattcgaaatctgtcatcattgttcttacggattcgtttaatttgatgagtgagttagaagcttgagatctaacggcggaggttgatttataggagaagattgagttgatctctggccataaatctgtaatcgcttcgtacaaatcgagtgttcgaaacattttctctggagatttcttcgatttcgctactaattcagggaaactgaagagcaacgtggcaccttcaccgcagatctcgttgaaccacaattctctgatcgattcagaagaagcaaaaacttgatcgcagagaattctctcaccgtaaaacaatgttttcacggcgacttttacagctttaagccagctcttgattttaatctccataatattccattcaagtttctggatctgagaaaaactcatcttctccactcccaaacggtacaaaccctgatcgataatatatttccgtacattcgtataaatcttcacacactctttggcgtaaccagccgaaatcatacaatccgcaatcgacttcaaatccgccatggccgcaatcgatacccgctcaacttccgaaatcgattcggttgtgactctcaactcgtcttccaactcatcttcgaaatcagagaaactcgaaatcgtggaagttcttgacgaagagtgactcgaaaccgattcaggatccaaacactctcgattagaggacaagatatggtaaaactctctctgaagtcttctcatggcggtttccataagaaattgtgctctgattagtttctccgttgcagatttctgagaaatgaaattctgcatggctgactgtaaccccttaacggcgttaaggtactgtttcgcattttcacggtcgccgttaaatattgaaacggtgtcgtttgcttcccatttgttgatttgtgactgagccaattctacgttcttgttgtcgtccattaataatt

SEQ ID NO: 195024 - DNA, 751 bp, Cannabis indica
aagtctgttgtacggtaaggcatccaactggcatggctgttgaatgttaaccattgatcataattatttggtccgtacgtaaatactagtactgtagagataaaagataatattggacatgcaggaggaagcattttgaagtttggaacaagaaatcgtatcttaaaatccgcactaacaataaattcccattatgtatatatagatattaggaaaaaagtacaaccacacatttattataccaactaccatttattaattaaaaaaaaagaagaagtactgtatatactatatagtgtgtcatatcctccacatatataattttcaatttttcatgcatttattaattacaatgtaaatatttgaaactgatttgcatcattctaaattattggtaatattaattatttctttatttaaaggactataggagtgaataagttgttgtccctcgtgtatttcaattaattattattgatgagtttaacaatagtttaattaaataaaagtgtgagctttttaattaatatttttgatgaagagacgcaatcttactagaaatttgtagctaaaaaaagattaatatatataagttaatataatattgcattatcaagtgcattataactgcagtagtatattttatttagaaaaatagaaatattattttgtgggagcaaaaatttccagcaatttatatatgtaattgtacaaaatattattcattcgatttattttaaattacaatata

SEQ ID NO: 195025 - DNA, 1426 bp, Cannabis indica
cattctgagtagctcgagccctcttgagcatgctcctaacagagcttccaacttgggcagtttgtttgatgaaaggcattttaacgccgatagtggttgtggtggtggtcatgcttggttcctagataataatgcctctgttaagaggccaggggcagttgaaactggtgggggtggcacttcaggatgggctatgcccttccccttatcagtgtgggtgatcacagaagtgaccatgactggggagggtaagaaggttgagaaagccatattcaatcttggaggggggtacaaacttcaacaggggtagtagtgttgtcttggtcaagtgttgggaccatgaaatcaaagccaatgttcataaatcgatcaactgcttgctgcaagccttgatcagaattgcttccacgacttatgtactcttcaatggggatagagttagagagatcaaagggggtttttcttgacattagttttggctggagcacgaagggtatccttataaccaagcttagggggactgtaaaactgtcacatctcatgaggtgttttccacatttattgtaagtgtgatcgagcatatcgcaaaaatagtaaaaattttacagacccttgtacttaaagtcaagccatttagtcttggcaatgttacggaatcgaatgttcattcctcacctgagaggcttagtgacatcaataaggacacgaatcctgagaaaagggtcgaaactttcaaacaaagagagagggtaaatttcaatgaggtcctcgagttcatcagtaacgaactgcgagttgggaagatttttggccaaaaggggctttgtgagcttggatccaaaaaggaacaaatcagaattgatcaggtgtgaaggtgtctaggctttgaggattggcaaagatcatgaggtttttattgaaatgccagggttggtcctcaaggatcctgagatggtttccttcacattggaaggtggctaaaaataggctagagtgatactcaaaactgacaattgtgaaacaaagggtccaagcttcactcatcgctttttcgatccaattaggttttggggatttggaagttaggattttgaagataaggtagtgggtatcagtggcatgttcagagttaagggaaacatgatcgaagacatggacaaggttctcttcatcagtaagattaagggtgttagagggattgacagaagaagatgatgacacgccatgggaagagtttgggggctaagtctaataaaagcagggaaaggctgacgattggaaacaccgatccaaggctttaaatagcaaaagaaaacaaaagtgaaatgtaatgcctggagttgaagggtcatcttgaagagtgggagaatccatcctcctgcctgctcagatctcccctgaactagagtagccatcatttgggttg

SEQ ID NO: 195026 - DNA, 2579 bp, Cannabis indica
ataacctgatattgttaacttgatcaatgataaaaggtaaatgtttttcacttaccttgtaaccacgtgtatgtactttgagactcattgattctgcaacagcttcaatagttgaaattataacttttgctggtttccgagaaacgaaacgagtttgccgtttaacataatcctggaagacaagagaagagagcatctgagaagagagcagagagagatgcacaaaagaaaaacttaccaataatataatattttcgtccattccctgctcattaatttattacattgtttataaaaacaatgaactgaggctacttttacaagtgcatgctacactccaattataaatagaagagtctttaaggtttacggccccaataaatcacacaaatgctaatttgcaaatatctgcaaccaattactgcaatgaccagtgtaacatcttaagtagtaaaattatcattctttttagtattgctgaaccacagtgaggagaaaaaaacactttcccacataaagtaaacaaagttaatctctccctcaaaccccaacccttagcgtttttcctttttcacccttgttttctctcagctaggggaagcatcagagatccatacccacatcactgcaaagcaaccattgatgtacggctctgttcgagaagggaaggaattcaagcttctttggagcatgggaaagcagcgaccgaggtgtggttatacatgcaaaattatgtcattcttataaaatgcactttgaaacagctaaatttccccaaaaatttgcaaaaagccaacaatatgaaatcaaaatgaaacaataatgttcagaagaaaaaaaaatggacattcaaatttctacaaaacaaatgcattatagcagatgattcattgtacttatgaaacattatagatacataaggaaataaattgtcaaaggaactgaaactgtagactatacctgccgtctgtcaaacaatgcagacagatttaacccttgggataaggtaatcatttcaaaggcattcattatcaaaggaccaccctcatctgactgctccgctacgtatttgtcctgtaaaatatcaacagtttgaagtaccaattaaataacatcaggtttcaattaaactggtatttggaggttatcaggttattttacactgcacattagtaataaaccagcttcctcccataattatacaatgacaacaaggaattttctcaatctgcaaataaacagtctctctttttggtttaagataaaaaagatggcacaaaaagaccaagggtcaacctcaatgtcgtcaaaaactgcacaaacatcatccaaatttacgtcttcatcttccatatgctcgacagctacataattcctctggaaccagggatttttccttattccttcaatctgaattctctgcttaacatataaccattaaaacaagcaaagcatagatagatctgacaatcgttaaaactgaagtgaaatactaaaatgtaaaagcttaaatgaaatactcacagttctcggattggggtcaagtatcttatgtatcaatgactttgccccatgagaaaaccaatatggacaagaaaatttagctgcatttatctaaacataatgcagaaggaaagttaatggcatacaagtttcaaaacttgttcacatatgcataaaaatatcttgctcttaaaaatgttacgattattttgtgaaatgaaaaaaaagaagttaaagatcgagacagagtaaacaataactagaatagatgacaatttgaagcatgtagaggaataaaaagaagaacatcacatcactagttaaccatataagagaaaggacaaataacagactgaacacacttgagcatgataccctattactgaaggtactaaccatgtaaggcatcactatttaaagaactgtaaacagcagagcattttgtaaatctaacacataagtaatacaaggattgcaagtataacagggtagctaccttgttgtacagagtaggaaggtctgtctcatcaaatggaagatacccagccattaaaacaaaaagaatgactccacatgaccatacatcagaagctgcaccatcatagcctttattgccaagtacctgtgttgcagtacaaattcaaatgcataaaggtttaccatgcactgttttcgttctccggtcatatataggaaaccaaaaactaaaaacaaggaaatactcaaaacgcctctaccttgtcacgttttaataagattttatggtagaaatatttgaataagaaaacaaattagcatatgtacacgaaacacaaagattgatactgtatgagtaaaatgatcaatgatttctctttattcactgcctttccctcagctaaaatttagcgacctttcatgacacctctctgcatcgattactttccttccacagtccccaccctataatgttgtgttggcttggcttctcactgttacacctcacgtctgcttagtgcttagattatacataaactacatgatgtctttccaaaaattggctgttacataatttgaagaaaaatggaagaaacagc

SEQ ID NO: 195027 - DNA, 1162 bp, Cannabis indica
aaatgcacaaataagaccatttgaaataaagatgaattataaagtaagctaagcttaaagggtgaattcaataaatgcaagagacccacttcccttgtagcatagaactccatacatccaaacttcctttaattaagctttaaattggaattggtacagatatatttatttatttatttttatacacatcatctatagtacttttggggtaattaagcaatgtttattttctcaaaactcatgattcaatctctcccttcccttgtcccacacttaaccaactaacacgagtaccaaacacctctttttcttggtctttagctctggccttccccttaaaggaacagaaagccattggcaatcatagtaaagttaaaaagaataataaaggaaacatattagctaaagtgggttgatacataacttaatcttattaaatgcacacctcaatgcccctccatttctattcaaatttcaaactcaccaccatcaccatcacctcaataccctcattcatactcatcccttcattcataccctctttcccaacttttctttccttttttttttttctcttgctaaacttgctacattttcaatggaggtgaagattcacaaaacagagaagaagatcaagccttattactaaaagggtcatcactgaaactaacctctcccaagtcccaagtccccaaccaaacagagctcgaaaatgagtactgctagattcatcaaatgtgtcactgtaggagatggagctgttggaaagacctgcatgcttatctcctacactagcaataccttccccactgtaattttatgtttatatattttattatcacattataagtttatcccactaattataatgttattttctcaacttttggtatgctaggactatgtgccaacagtgttcgacaactttagtgctaatgttgtagttgatggaagcactgttaacctgggtttgtgggatactgcaggtgagcatttgttttcttagtatttgagttgaataagttaagtgctgctgctaatgctgataaaatttggcgattgcaggacaagaggactataataggctaagacctttgagttataggggtgcagatgtgttcttactagctttctctcttattagcaaagctagctatgaaaa

SEQ ID NO: 195028 - DNA, 674 bp, Cannabis indica
atatatattaaatttctatatctatacaatatggtttaattcatagttttacaattaattatgttttgaggccaataattttgaaaatatattataattttttctattaaatttgagaaaaatataattcctatgtttttgcaatctatagatgtagaagtcaaataattgaaaatttctctacaattaaggaaaaaagaattaaaaccttcaaacataggatcaaaataatggtataggttatgaatatctaatttggtgtaccactttaccatatttatcttttaaattttttctgttttaccatatatctacatctaatctaagaaagatcactttgggttcgaacttaattacatttataacaatttaattaaaaaatatttaaataaatcctaaaaagcaaaatcttctcttttcccaactttggaaaaagaaattgttaattgttaaggcggcttccaagtcattacaacattctaggtttgtgcaatttcgttgcaaaaacattattggactatgatgttttgttgtaccaatcatgtactgcattattatataagatactttaaggcatgcccctaaagtttaggcttttttagatccaaagctctcggtattgctttttataattccctctcctcttgcaccatctaattaaatattttaatgac

SEQ ID NO: 195029 - DNA, 1012 bp, Cannabis indica
aaatcctgatagttgacaagtatccaaagctattagatagatttttatgttcaaatatttgctttatcagcatggctggttttaaattgttctccaggctaaaaatattaggcagtgttagaagttcaatgtgtggttatgggatcttaaacagaaaatctggctatgggatcttttccttctcccctctttattttaaatataagattgttttttggaggggtttagttttgaaaggatttttaggctttgcaacctgaaagtggggaggacaaagacacgaatttcggatcatcaaatgctattactttatcaacattatcgagtgtgtttgtttgtattttcactttatacttaaccttgggtttgtgtagtttactatgtcagtgattattgccatcatgctttcacttttttgtaggttatgatgattatatgtcatttctatgtggcatcaatggatcagctcccgtggttaggaacttcacaggtcaagactgttggatttacaattcgaccatcaatggccccgatttaaacctgccctcaatcacattagcaaaactaaacgagtcaaggacagtcatgagatcggtgcttaacatcgctgacaatgaaacttacagtgtgggctggagccctcctttcggagtttcagcgaaagtttctccttctcacttttacattggcagtggacagaaacaagtgttgacaatagtactaaatgccacagccaacaactcagtagctagctttggaaggattggactttttggaaataaaggtcatgttattaacattcctttgtcagttattgtgaaaaccacatataatagtaacacaacaactaacagctaaatttggctgatacatttactattgttattaatattattagtatcttcttttgccatttaccatgtagtttgttcttctcttatccttttgttgggtgtttcttctctccttttttagtttgcctttgtctaatttttttattcgtttttttttt

SEQ ID NO: 195030 - DNA, 2533 bp, Cannabis indica
atattataatggtgcacgtaattatcaattctccaattagaaaaaatctcattaagggaattaataacaatctcacaattgctctcaaacatcacaaaatcatatatatttcaaaaggtttgcgtcttcaagtaagcaagttgtaacttttttgataagaaaattagtgaaatccagaatatcagtagtaattcacaaaactattcttaaaaaaattcttaccaaaaccaccacacacatagtcccactcctaactttaacatcgcagtgagtaattgtgtgacaatatcagttatagctatttttaatggaaatatcaattatggtttacagttcttccacaaattaaccacttatttttagatagattaatattaatattataattaattggtttgaaagtgacaaatgttgattttttcacgaaagagagagctagaaactatgggtaatattaatttttaataatgtataatatatagttatagatattatgtagtatgtatatattgtaatttgttattattttaaatttttgttggatattggtaactggtaaagtggtaataacggcactttagcagcagaccacactgttttctcctgagatatattttaaaaaataaaatatattttatgtacgaatttttaaaacaccatcttattgattccatcattcgcatcgaatcactaataaatattaattaattaaaacaaagtacaatttaattaattgtattacaaaattaattaattaattaattaattaattaattaattaattaattaattaattacaaggcagcaagaattgagtttggccatccaagatatatctcatatcctttacttttttttaggaaattatatttttatgtggttttctaacaaaatatggtttttttaatatttttatttaggataactagttaccttacactttttttctatatttttatttttacttttcttttaaaaaaattcccatacgagaaaaaaaaagctacagctttgtaaacttgtgccttaaaaattataaaaatgaaatttaattcttttttagacttatgcaattcttcttcagatttctaaaacttaaaaagtgttttcaaatttattctagaaaatttcaaagtgaaaaaatttcatttggattcgataatatgagtggaatatgaattaaattgaaattaaatgactaaatttttaattaagaaaggttgaattggaatatgggttagcaggaaacatgttattaaaaactgtagccaagtgtggaaataaatgagaaatgtggaaattagagaaagagataaaatttgacaaaaatatatataatatggtccatatatacagccgtataatgtcaaaacacactcacgttttccctttttatcgatctttgaattcaatttcagtactgctttaattattattattattatgtatttcttgtctgtacccctaatcttattttaactaattcacctttttcattgtgttttttctttatatacatgcttcaatttcagtaataaattcatttctaccatttatgagacaatttaaaaaagtaataagtatacaataaaatagtcagatgaaaaaataatggtaagaagtagtcctctctatttttctacatgaaaaatagttccgcgactagttgccaattcttcttctttttttcttgatttttcttcattctagagtttagattaataggagcgagtatgattttcctgaacaaaattctctaaagctttagttagaaagagttctagtgagtgttaatatttattaaatactcaagaaatacaaataatcatatatttaattatatttttaaaaatgttataatatataaaatatcttaaattatattttataaaacctttgttaaattaaataaaaagaaaatgataacgagatgagcgaaaacactaacataaagttattgttggagattgcagaaaaagttatgatcttctaagaatacattatttttcgaaagtattttttctgatatggaagtagagaatacaaaaaacgtttcttaggaccactacctatttataagctcattatatatgatgagttttggttatttataatttgactcctcaataagttataaattagcttatgatttctacacattatttcatgacaatttactgcctttttgatatatctataacataattaatcacttaattttgtatcacactgtagtatatacattatacatatatatatgcccacaataacattttttttaatccaatagtgagaaaatgaaaacaagatattgaatcagagagggaatcaacctcctttcttactcgattttacctatttttataaggaaagcaagaaatgatttgagttggtaagaatgtaaccaactcaacgattattagcatttgggaccctaaattagtaaatttttctactttgtcccgtaatggattgatcacatggcctctgatatcagcatactgtaattctattttgataatcaatgatgtag

SEQ ID NO: 195031 - DNA, 1338 bp, Cannabis indica
aataatttatttttacaaattaacgaaataatggaaaagacaaaatttcaggataaaagacacatcctttgtcttaaccaatagagagggaggcaccacatgcactgtgtccagacacagttattagttttatctttttgggttaattatttaattcaatagataaatatttaaatttaaaaagtagttgagatattctctcaagtggttgagagattcacacaatcagttataagatataaatatctataactgaattcggttatattgtttattaaaataattatatataatttaattaatagatttgaatttaaataattaattgaatgaaatctttattatgtttatttaatataccgtataaatcaaatttgtaagagaattttcatgtaacttttctaaaagtctaaaaagtatttattagtaaacttttttctctatcactaaagaaatagttcttgctcatgtgttgagatttaatcaagaactttatatacattattatcctactagcctacagtagtccttatgtgtggtggaaggtctagaagatcaagatgtgagttttgtcattactgttacaaggatacaacttatgaaaaaaattaaggataccttgataggcatcaagaggtaaatatttttttcatctatttacttttagtttaatatatatacatatggtgatcttgggcatatgatacaatgataatcagaaacaaccttttcgttgcgtacctaatttagtaccataaagtcaatacatatgacaatgtctgctctagtaacttttttcggtgatatttattattagaaatttttttaactttatctatagtattttatttggtttcccatacgttaaactttgtttattttctaattttatatctttttgcaatattcttttgttatataaaagtaaaagttagctttttttcctatatttatgaaaaattctctttacaattcaccaagttttatttgtggtttttttattgtatgtttattttgagagaattgttattggacaccagtagtgtctagcaccttttagaagtggtaccctaaaattggctagcaatatttcttaaaagctattacattaaattagatgggatctgatacttaattgcaccaacaacgatatgacacctagagagtgctatacaccaatggtgtcttttaacacttctctatttttgtacgtatcatctcaaatcaattatttctatatgtagcattgaggatgttagcagcaacactattcaaattacacatttagttacaaaataaaaaccacttcttttctattctatacataattacttgaga

SEQ ID NO: 195032 - DNA, 1357 bp, Cannabis indica
cctttcttataccaagtaatatattagaggtgaaataccagcctacaaataaaccaacatacaaggctcttaacttctgagctgttactctcgtctcaaagagttcaactaaaccaatattatgaattatgattaaaataatttacttaaaaataaaactcaaacaatcaattgcaaatgtgtttatttttttttttgcatgagtgtagctaaatatttgtaccttattttttacattataaattattttaaatttttttaaaaataagtaaaattttcattataactacaatatacacctttataaagacttccctttatagtttataggaataaaagtcaaatccctacttaaaaattatatgtatatatttaaaatatatatatatatatatatttaggatatagtttataagagagaagaggtctcgagtgaagtgttgtgttgtgtttgcttaaaatatattattggggtatctgttattgggtgccagctcttcactatgcatgtcacgcactaaaaacggtagagtacttcttctttgttattattatttaataagaattgagtacttgattagttagtacggtttcttttagttttactataataataatcacgaaagctttgcccattagtggttttaaaaggtcaacaaagaaaccctaaaaggaaaatagtcaacaaacaattatttattttattaaacaaaatttactactcaagattaaaagtagtttgtcttcaaattatgtatttcatctgtgatctcatattcaaaacttattaaattattaattataattaatttaaatacatattttcacacatcaataatgatttgtcaaatgtttttaaaacttctttacttgaccaactaactaattagtatattgttcatgttggacataatatatgatacttctcagtcagttataaattaagaccactcttataattattttttggtacatgtatgtacagttagtttcagttttaaactaacactaaaaatgttctaaaaggaatatcgactctaaaaaaaaaattaattgcgtcaatagaataaatgtcagttacaaaaccgatgctaatagcattagcttcagtactaaggaagttctacccacctttaatggttagtattgacgtaatgtttctaagaatagttggtgttggtgctcctagtgcagttttggctatgattctaacacccatgttttttgatacataaagaatagtacacattatacaccgttaaaaagtattacttagattaaatacaatcacactatggtcttgtgaagggacatgtcaatgtcaaaatcaatccttcaccctttttttttttttttt

SEQ ID NO: 195033 - DNA, 809 bp, Cannabis indica
ttagaagttaatagagtttatatgaggtagatattcctctttctcaagaagttttagcaatatttagtattagcattgccataagaagcttgttttcaggacagtttataaggttgagaaaatctgacctacatgctagacatggtattagcataagtagtatgtacgctttacaatcattaatattaatattgccattaagaagcttattttctagagagattttataacttcatattttgtgtagagtagatagatactgcatattagggtatctatatggttttcaacaggctaatcctagtaatttcatcattttttattttattttattattatttttttttgtcataagtcatctggcttacctttttgtatattttagttgaagatatgtcactccactagttgctagctattcggttatatccttcacttggatctaagccaaaaagatgatgtttgtgcaaagttctatgctttacctggtgaataatgaggcaaagttctatgctttaggtggtgaagaatggtgcaaaattttatgatgttgatttctcacaaatccttgatgatttagaaaaaggaaaaaagaatacatggtttctccaatttgatgtcagttcttagcttgccttttttaaagtccattgtcattagttagactgtcctatagctaatgtaattgattcaacaacttcgtattgtactaccttctgtgtctacgagatagaggatggcaaaattagttgctatcctccatatagcaactgtattttcaacaattcgggtggaaactcatgattcat

SEQ ID NO: 195034 - DNA, 1873 bp, Cannabis indica
aaaaaaaacttaggacttacttttctttttacaaaagattttcctcttaatttggaaggaacacaagactttagttaatccattaataaacagcgaagaagccataaaccaaaactattgtcgtctattttacagttgaacatagatgttttgctttcttcatctacaacatgatcttaatctttaataagctaaaaaaacacagaaaggaaatcccaccttcattctggttctcttaaacaccctccaggtaaaagaaacttgaacttatctgcattttgaatcaagtaggaaggaagatgaacagccgaagccgaccgaggtatcggtcccatcttctttatcagttctttaaagctatactcttctggcaacatgtcaaaaagatcatttcccccacatatgaacttctgaattctcgaaaagtttaagaagtctttatgtgtcacgcgatctgcgtggctgtaagcagtcattttaaacacaatttcttgaatgagccgaaagcaaaagctacaatgccatcctgcatctgagaaaatgtaatctgtttggcgtgaatggcgatagcgggtttgcgggccgtatatgtgtgcagaagctcgccaactgttgtggtctactgggaactcgaaagagtacatgtagttctttagctcgagatgcagaactgggggtacaccatcacaccattgcagtagcttcagagtgtgagggcttgggatctcatcagcatcagacattataaggacatcaccataggaaatccctgaaatacgaactaggaaatccatggccgtgcgttgcctcctctcgagtagaaagggatccttgtgtgatgatccttggttttccatttcaccaggaagcacatcgtgaacaatcttgtcctcagcaaaggcgaaacgatcacgatttaaagcgaaaaaaggaggctttcgcttgccagtgaaagtgacattagactcgaggattacaaacttcgagacatatggataaagctcgcgccacctgatctcaagaagatctagctcattgctgaagatgatgccatcaaaaatacgacgaggttgggataggagggaccagccatgtagcgacaaaggtggtccatagacacattttctgcatagtaatgtggcacatgtatgaatggttgtggggggcggtcccaaatagggcggaagaagtaagaaattttctggccataggtccatacactaatcacgcaaataggcacaagtatcagtagtatgatgaaaaggaactttcgcggcagcagccttgaattttggcggggtgatcgtactgccataacttgatggaaaaatgatcaagagggaaagctcctacatgttagtcccaattcaacaactatcgtgcccctagtcatgtctctacatctcttgatcacctacatgaaattaaagcatacattggttattaaatgtagcctcgtttactacaaacataaaatgataaaaagtgtagatagacagtgtaggaataaacaaagccttgcataacataattcttgcatccttttaaaatagaattttcatttctgggagtgtacagcaatactctagaattgtattcctctggaatcacccaaaaattacaagaacattgctaagagaatttcactagtgatcatggccgatgacgtagaaggcttttttcttggggtccaattattattaaaacaataatcgcaaatcagactctcattgctgccaattcatattgacatgcttacagttgtttcatttgttttttaacttccaacacttaataagcattgaacatgatcacaaatttcaccataattcggcttgtaaggtttttccctgattcaagctacatttgaact

SEQ ID NO: 195035 - DNA, 1471 bp, Cannabis indica
ctatatttttctcactcaaactaccataagcaaggtatcaatatcagcactactacctcccaacacaacactttttctatctcccctttctcattacacaaccaaattttccttcccaaccaaacaccaaatttctcatctctctcttacacacacatccatgatcaattttcttattttgatcatactctcaccaatattactatgtgttccactaatttcaggtgataacaaccaatcaaattcatgtagatcatattgtggtaacataacaatagattacccgttttcactcaaaaatggatgcgggcacccgggttaccgagatctcttattttgcatgaatgacgtacttatgtaccacataagttccggatcctaccgggtcttggatattgactatgcttaccaagcccttaccctccacgatccacacatgtccacatgtgatgacatcgtgctcgggggtaggggcaatggctttgcagtcgagtcgtggcgggcaccgtacatgacaccggccgcagacaacgtgttcatgcttatcggttgctccgcccgatcgccgctctttcaagggtttccgggtaaacatttgccatgtaggaatgtttcgggtatgagttgtgaggagtattacgggtgcccggcatgggatatggtgggccataagcgtatgggctcaatgtttgggtcgggcccacctgaatgctgtgcattgtcgtttgaggctattaaggccattaatctgagtaagttagagtgtgaagggtatagtagtgcttatagtctggccccattgagagttgaggggcccaatgaatggttttatgggatacgtgtgaagtactctgttcacggcaatgatgagttttgtagagcgtgtgaggcgactggtggcacgtgcggatacggttcagacggcattaggcagatttgcatgtgtgggagcacaaattcaacctcaaattgcgactctggtaagctgagttattgtcgttttcttaaggcccagtttgtctcagcccacaaagctttccagcccatgcttaatctaatattgacgtattttccttttttatcaaaaaacaaaaaattaaaggacaagtaggatcctttaaacctcgatatgtattaaaaaatgatctccgaaattttaaaggtcgtaaaaatgccccagaaactattaaaattgttgaatttaagaattttgtccaattttaataaaaaaattctaacatagatgaaagttcaggagacatgttttagtatatatcaaagttcgaggagcacgatttagtagatatcaaagtctgagcagcatattttagtacacaaacaatcaccgaaatagtaaaattgaataaaattaagacaaaaaatcctcaaatctaacaatctcaatagttcaagcagaaatttttaaacaccaaaaaaagttctaggagcatcatttggtacatgttaaaag

SEQ ID NO: 195036 - DNA, 1062 bp, Cannabis indica
aaaaaaaaaaacaaaaaagttagctatgacaatttataaataataacgaatagtatttatttagtaaaaaaataacgaatattactcacattttttagaagaattgaaaatgatgggaaacaaatttttaccataaatttaaaatatgattaaagtcttagataaaaatttaaaatctatatatatctgagattgatatgcttatatactacctaaatattaaatttagaaaaaaaaaaataaaaaaataatgctagctttacctatctttgatattgttattgtactccatcaaattttggaattcttttggattggggtaagtcaagtttgctcttactccattattatagaatggttccatgaaaattgaatgtggtagccacttataatataaataaacctcataaattttttgaatggaattgtgagatttaacctcataaaagttttgactgaaattgaaagatttaaatagtatctaatagagatatgcgttaggtttaggtgtttaggttattatttattttatattaaaagaataataaaaaaaagtataaattcactatgttgttttagattttcccttcaatgccacggaagtctttttaattagttaatattcataacttagatatattgattatattttagaaaattaatatttataaacttattaaaaaattaaaaaatgtgagaattaaagaaaaaatagatagatgtatgtatgtatttagagtaattttatagcgccatgtcaccgtcttatacttctcctttatatatatatatattgataatacaaagatgaaacaaaattttaaataatattgcaactcaaaacaaaagttactaataaagataaacaaaaagataaacaaggaagagaaaaaagatgtgggagtggcctcaatgctacatacacctaagtatatagtaattaccaatcttgaataaaattttacactcatccgaaaacttatttccctatcacaagctcggaggaaaaaaaaaaatagaaatagcttcataaaattactaacttagggctcgtttggaacg

SEQ ID NO: 195037 - DNA, 3391 bp, Cannabis indica
gtgcaacaccatttttaccccaaccaaagcagtggacaagggtacgacatgtttatttgagagttgaacagaggttggagaaaatactttcctgtatcttggacatacaaggtacgagtagacgttctagataccctacccgaaggttgtccagagcctttgaggaatatctttgtgctagtggacattgcagtgaacgttgcataacacactacccagccaaagcacccattaagacataagtaggtggtgcgaaccaagtagacctagaggaggttatcgattgaggattgtcaatttgctcagttgatggcaatggctaatgtcgagcatgccgaacatcctaaagaaggcaccgaagcgcttattaatgacgaggaagtataagaggtagaagaccaaggcaaagtctgtctagttggcgatgaggaggaagaagaggcgactcatgtgactctaccatactgggatacaacgaggctggggagcctatctcttaacttgggattatcctaatcgagggtcgcgactacatcactaaggattataaagaagctctccccaccaagtactaggataaacccaagactcggtgggtttctcctccatccactctctcatggaagagacttaataatctgcaagccaaaggccttcttggtggtgtggaaactttcctctcttacgatggacaacttgccaccgatccattggaaggtaactctgcatgctttggtccacatgcttaaaaggggcgatcttgcctcttcatccgtacttcatgaggatagtagattattataagatttgaccacgtaattcacaccaaagttgatcaaatacctggctgtgttgtttgtcttgcatgcgaagaggcggtggagaatgctgtccactcatgaaaccaatcggatgttcgagctaaaatctagcccggggcataatcgctcgagttatttttatttttcttatctagagaattcttggttgattggcatgacatccaatggggtcactaaaatagctgggttcattagagattattatattgtacatgagatggattccaaccacctatccttctagttggcaaagatatagtaccatcccactttcactttggggctacggtcaagggcacatgtcattctcctactaccgagtagggctcacaacatatctttgttggccacaatagagaacttcattcgttttgtactttatccgtttgaggggattgttgaagatgttcctttgactatggctcttgtatatgcgtgggaggtgtctaagctgaagaagaacaagaaaaagaagagagccctaactgggtgcctattttgattagagaggctaccgagatgactgcacgtcctgtaatgctagttgtcattgggaagggaaaagtgattagaagagtcaaacatggaatctttggatgacgatgcctcttttatagttgtccaagaagatgcttccctggatgtccaaagtatattccttgcaatttttatattgccttttgctatacatttttgtgaagactaaccttcattttttcctgtgcaactatgtcattcaggttcaatgcactgctaaaaaagaatgctggtggatcatccgggaaggaaagtctgacaaaagtccaaaagaaagatgacaagggttcgtccaagaaggatcttccctcggctctacccccaactcctttggtcaccagagatgaagttatttccaccaacatctctgctcctatggttgccattgagctcccaacaaagaaaagcttaagcctactcctgctcccctgagccaaaaaaacaaaagagaaagcacccgtgtcaattgctttagagacttaaaaggaaaaggacatgattaacttctatcaagagcacaaccagggtgagctaaacgagaagttgaggggatcaaatttaatgcctatagatcttctagcttccacccttttgaaaaagtatactaaggtaactatttcctttttatttacctttagttcgggctgtaccatgtaggtcttacttgtttattcttttcggtaaacctccatctcgactatttgtattctcggaccaaagttatagccgtctaatcctctttggataagacaaaagtggaaaaacttcaaggccaaattaatgacaaggaaactaccttgggagaggtcaacaataagctattcatgtcttctaagaagattaaagacttagaacaacaactatttaatgcccctaaggtagcaaattagaggctgacttggagggcgagactaggcgggctaatgagctggtcactctgcagatactcattcaaaatctagagcaaaaagttgaaggcctgtcttcagaggcggccaaagaaaaagagcttgtaactgccaaggagaaagccttggacaaggaaatcaagggccatgctaatgaccatgggatgtacttagagatagacgcaaagctcttttatgagttctagtaggccaatcttgaagcaaattttaattatatggaggagaaagactgtgagtccttgttgcagaagtgcgaggaaatgaaggccgaggaagaagctaaggtagctggggcaaagaaggccgaccaacttgctgatgaaactgttggtaaaaataatgagcagcttgaagcagttgaccgtgatttcttggtcaccgatcaagatgacattgtggcccttgaggattttggcaactccattggattgaaacccatcctcttatcaagatcctctttcttttttgttcggcctacatctcttttttatttttttacacaaacatatggttgactggacagtctttaatcctaaactaaaaacctttatatatttgataaaatctttgtttttttgcatatatacttagcttttttcaaattttaaaatatttaaaacttttctttgaaattttgtattattttacctgccatcttaacaatgtttacagttgtaggtgtccccaagtgaccgaacatgctttagactcttggtcacttgtaacttaaccagagtatgaaatattaatttgttcagaccctttacttgggcgaacctatttgtacacatgcaggtagctcgatgactagaaataaatcactaaaattttgcaagcaatcttttatagaattaacacaatttaaacgataattaatggctttatttatttattggtcgatatgtgttattacaaaagtaacgtacatttattttaaaaagccattacatgatctattcggatcttagctaataaaagataaaaactcctgaaggataaactctgtctagaagacatcactgaagagtaatgcttgttaaaataagttatactttagaagtggtcattcggaccttagcacta

SEQ ID NO: 195038 - DNA, 1206 bp, Cannabis indica
accaaaacttcaagatgaatttaatcactgagtcagcaagtctacggtcatcaattcaattcgctttagtatattatagtttgagtcagtctttcaagcattatattcattcttctataatatatagtttcttctagttaaagtctaatatcatgaagaagaaaaaaacttttatcctcaattctcttctcttggtctcaactcatcaacattatatttaagattttagtcaacaaaacaaaaatctaagcttcattcttagaactagagactagaggcacaaatgactttaaaattgtttacaattttacattagtacattatcaaatgtgtacttttggctatgatattttaaattgcttaataactcgttaaaaaaattaaaatggttgtgaatgtggtatggtgatcagttgacttgttgggtcaagatgatagggatttttaatcaattgatagttttttttagtaaacaaaataatcaatcaataaattaaagcgcaatatgtgaatcttaattgttctctattcattggtagagggccctcttaaaagtctacaaacagagtgaccacaaaattaaaaaaataaataaaagaaactaaagaagatacttatgattcaaagcaactccgcgtttttttttttttttgccaacattccacttcttatcattaataatgtttattaaaaaaaaaataagagagagagaaagtaatggaatttgatgggaagttttgacttagaagtctttcgagacttgaagtccttccttaggtaaacgatacacgctgcatgaacatgaactcttatttttttcctttttactattaaagtattaaagttgtggccttttatacatatatttgtatatggctattaaaaaaagggtttccattaagaaatatgggcaaagttcacgagagataggaaaaagatatgatctttattattatatatagccaaaccataagctttacttatgttacctttatatgaaaacataataattgtcggaaaattttataccttatgaattttagcttgaagagttcttttaattgcaggctactacacttttgagcgtgtggaggaatactatataaagtaaaaagttaagggaaaaaaagtacattttacttaaaagttgtgccaacgacctccttgacctcatctcaaagcttcctagcttgatctcaccctaaa

SEQ ID NO: 195039 - DNA, 980 bp, Cannabis indica
atatatatatagaaagagagagaagctattttatatgtcatgattcttaagtcaaaaaagttaaaaaatgattcaaaagaatagtcaaaaaagttatataacatttttcatacaccaaaagtcatctctgagactagcaattaataattcggtaaaattacaaagcaatatatagcagttatattttgacttttgtagccgtggcgacaaccatgagaactcgaaagatatatactttttatgagaacaatacttctcagaatccaaaattaaatacacttgagagtctagttgagctcattaacattaagtgcgcacacacacacacacacacatataatgaagttaacagtaacctagtcgctaccttccccataaacatacctgcttttcgttttggaactgcatcatctgtcctcggggaggagacaggaacttctcgatagacaaatacaaaagcaacttctgttatgtgattcagaaaaaggggtcaatgaaataaaatttgtttaagaaatcaatgtttgcatccaaatgtgaaaagctaaatctacagcacagttcctagacttaatcaaagacttttagacatagctaaagaaaatggacaatggagacggcatgaatctccattaagaagatctgatattcaaaacaagaataaggaaagaatggaatcaaacataagttaagattattaccatgctcaggaggagcagcgaacgaaataatatctccatgatgaacttcagcttcagggcctttctttttcaatttcttccagttgatatatgtcccattggtgctgcagagtctccaagaaaataatcaataaatcgattaaaaaagaagggtagaaaactgaatattcacaaaaaagaacacaatacacaaccttgaatctttcaagaagacagtagttttacatacggacgtctgtttctcctcctcaatgtcgaccttcttcctataaattttgc

SEQ ID NO: 195040 - DNA, 2248 bp, Cannabis indica
ttcatgaacagttacaaatgattaaatctcaaaggaataactgtcaccctatacatatataaatagggatagaacctagagaaaaaggggcggccaatcttgagagaaaacagatcatattgctattgtttattccttaaaaacagtatcattgtattctgtatacaaacatatttatccttaataagatggactcgtggactataaagatttaacttcaaaaccacatatgaccttcttgttatttattatttttttatataattaattttgtagtttatttattacaaaataggctaacaatttagttaataaaaatctgcattaacagtttggtgctttcattaagagtatttgcagtaaaactcaaaaaaataccctcctaaaaaatacaaccttaaaacacactcatggaagacgatactccatgtaacgaagagaactagccagaagagacaatccatcgtttagtaaaggagcagcttcgcaaagaatgaacaatgctgaaacttcccgttctggaagaaacggtggagactctaataaaactggggaacaaatcccaaaaaggcaaagtgaggatgcttataatccaatcagctatgttccactagtggaactgaaaaataggcaactttgacattgcctggctgaatcaaatcagaggaacgccaaatgagaacacgaagcgacaacaacaagggttgcataacaagaggcccctcaaaattaacctgatccatctgcgagacgactacaggggaggccccgaggctctaaaactaggagacaagggaacaaccaagggaatccctcaggcactcaggttgaacaacttgagaatgtaagagatatcccaatcgaatcgatggtggaaacccataaaatcctagaaacacaagaaatcaagagactcgacatgacgatccaggaacttcccatggatttacaaaccaagggaatgtacaacttgaggtgctagagtcttctcaaatgaatatagatgccaggtaaacacgacctgaaaaccaagaaattccacgacatgatgcgagaaatgtaagaaattggcctgggataggtcgacccccaagccaccaacaaaggcctaatcgcaatgatagagatagtacacacacttacttgagtaggagtcgtgtattaaatctatttcgaaggagaaggccaatgcaagaagagccataagagactgactcgagtatagatccaagtggatcaagatcaaggacccgcgaacataacagatcaactcaaactcatgcccatgacaggcgaacatgagaggaaggtggattgcgacgttattattgagatgaccatgagagtattagtaactctcaaagctactaatttggaagtaactcgagaataaggtctatgcaagcatttaaaattgtaatgcactagatcttcacaatagttaaatcagaatacaggcaggcaacagcctgtggatccaatccaattgtgagtgatacaattggaagataaattcaggcaataccaggatgaagagtatgggaaattatcaagatacgattcaaaacgaggaaacaaaaccatttcatcatgatattttgaattctcattttcctcaaggattcaaaaatccacatgtcgcttaatacgatgggacaactgatcttgtggcacaccttaacaacttcaaatccataatgcgagcaagcaatatttcaaataacttacgatgcattttattaccaacttctctaacaagagtagcaagaagttggtttgataaattcaccaaccattccataactttctagtaacaactatcaaaggactttaaaaagcagttccaggctacaagggatcgaagactagaagcgtctacattaaccaatattaagcaacaaccaagggaatccctaaaagcatacttaagtcgttttagtaatacgacagctaaagtcaaatttgaatgatagtattcagttaaaagctcttcaagctgggataacaactgacttgtcaaccgtaggaggtgaattatgggatgatttgcaaggccatcatgttagaaacattaataaattcaatgaaagagcacaaatcttcatgctgaaggaagaagcgcgaaatgaaatgaagctgctaaaatttagcttgggagacaaacccatcacaagtactgcaacaacaagtactgtgacaactgaagctggaaattcaaatcccaatggcttaaatgccaagagaaagg

SEQ ID NO: 195041 - DNA, 1665 bp, Cannabis indica
aacggccaaaaaagtttagggggtataatttcatacatgtcaaagttcgagaaggagaattgctaattagcctttaatatatatcaaaattcaaaagacaaaaattttaattattcttttttcaattcaaaaacaatcttttaaaaaaatttctttcttttctgagcattattagatatcagtagtgtttagtatcttttaaaagtgacatcttataattagttagtgatattttttaaaaattattacattaaattacatgaaatccgatattaattatagcaataataatattaaactttaaatacatacattagtaccttttaatatttttcttctcttttatcttttatagatacatatatttagctttagattgtgaatttgactttctttaataataataaattattatttaaattttttaataatactcaaaaactttaatgcaatatcactcatgacaatgcatgtgcagggtctcttacaaagcagtggccatgtctatctccttctcctcctcctcctcctcctacaataagttacacaacttatcttgcattttatttctaagcatatttcattggtttatcacaaccgttgatcaatttcatgacacgtgtggttgcatcactatgaatatgataatttatttcttttttataaatttttctttttaggtagatatactaattaacctacttgatagaaaggaaaagaaagaaagaaagaaagatagtgtaagataccacagaaacaaacacaagtagcatgtgaaaattttaagcttttcatatcacaactcacaatattgttcactattcactttacctgcttcttcttcttcttcttattctaaaaaattaaaaagaaaaaaaacaatacatcataataagggacaggcattcatggagtggcactgtaaaacggttgcaataattaaagcaaaattagtttgttgccaccggtgcctgatttaatcagaccgtccaagtccaaacacatcacatcagacggttgagatttattgttaggttcatggtcatgcttaattccaatttccacttgtgcaactaaatctttcttttttagctcactaattttagtatgtcaaagttggatgagttgtcttataaactataatcatcactaaattcttacttcaaatatatacatatatgttggaatgttgaattagataatctcatagttaactattgaaatgatatgtatggtcatctatctctatatatatgtataattataatatgtagatggggataaaacattttgtgataaatgaagcatgccaccacttgtgcaatttagtcttcttatgaaaatgcatataatatgttaaggatgatgaatgatcattataatgacatggattttttttaaaaaaaagataagaaaagaatatataaaggttcaaaaatatgatgaatcatgtcaatgtgcgtaaactaaatattgatagggatactttcaaaatataaaaatggatagaaatgtattaaaaaaataatttgtaggataaagattgtttaatttttatttgtaaataaatatttaaatttaatttttaatggtatacctaaattatatttgtggaactctgtagatatctcaccattaaatgtttattttttattggtatattta

SEQ ID NO: 195042 - DNA, 2551 bp, Cannabis indica
gtactagaccgaaaactggacctttccttcctcttgcatgagtacgtcacttatggcatgatcagacactaccaagtataggtataaatcctccccttccataggctttgactaaaattgtagctttggtcagatccgttttttagcgtttttgaaaagattcctcgcattcttcagtccattaaatttttgttgcctcacagcacattaaagaatgggatatatttgtccgttaatttgaaatgaacctactgagtgcggtgattcaaaccggaaacactttgcacatctttatggtttttttggggagggcatgtcaaggaaacccatgatttctctatattttcttcaattttgtgggagctaacaatgaagcccaagaatttcccgggaggaaaccccgaaggtacagtttttggagtttagcttcagcccatacttttgagaattgcaaaaacttcttcaagatctaggttacgctcctcaaaggttttagacttgcccatatcatccacgtaaacctccatctttctctgtaattgattcttgaacattttgttgaccatccgccgataggtggccctagcattctttagaccaaacgacatcactttgttacagtgtatgccctttttagtttgaagctggtatgttcctcatctgtgacgtgcatcttaatcaatttatagctggaataggcatccatgaagcttagcaatttgtacccagaagtggtgtctaccatttgatctaatcgcgggagcagaaatcaatcttgtgcacaagccttattcatgtgtataaagttgatgcacatcctccacgtgccattgggtttgggaaccaaaatagggttcgtgagccagaccaggtataatgcttcttggaggaagtcatgagtagtcagcttgtcaacttctactttcaccgcctctacccttatcggatctaagggcctttgtttttgggaaactggcgtcgtatcttcttgaatgttcaaggcatggaaaatcgtattatgatcaattcccatcacgtctgaatggctccatgctagcacatccaggttcttcataattatgtttacaatattctcttttacaaacggaggtaggttttttcccacttcgatggtttcctatggggtccacatcgctgatgcttttctcttccacctcctccattggttcttatgttcttttgtcccaactctgggatctaatttgtcttcaaaatcctcttgaatgacttcaatttccatttgagtctccatttatggagcaaagagttccttttctcagaccatgaacaaagtctgtgtcgagacattgtagcaattgcttgcactttttttatcacccttaactgggccaatagatccattatcgcaggagaacttcatgcacatgtgcctgatcaatgttactgccccaaaatcaactaggaggggacgtcccagtatcgcattgtatgttgttgggcaatccaccaccataaaagtggagtgcttaaaagtacttgcatcgttttcttctttgatggtgattgacagttggatttttcccatagacattaaggcatctctgttgaaactttgtagttagatcaggtttcgtgagtccaatcgcctagaacgtaaacttgaagagaatatttactgagcttccattatacactaggactcgggatactattttattggcaatttgagcttctattaccaagggatcattatgggggaatcgtacattcttagcattatctctcatgaaggtgatgggtatgttcattattctaggacgttggattggagactgcgccaacgcacacatttccccttcttcttatacttctcttaaatatctcttttgtaaattccttgtacttttgacaaggtgtggtccacttgagattgtggccacatatccatctactgaaggcggagcgagttctaggggatatagggtttcgggtcgttagagcgagtaacactactctaactggtgctggccgagcaaggagtataggcaactgtgatctaggagcttcagaatgagctacccctacagaggatttatggtgtagggatcatgtgctctgatcaaagtctcaattccatccttcatataatcacattcattagtggtgtggccttttttgtcgtggtattcacattccttgttctgatcctgcttatttctccctctatgggacattcacaggggtattctgtagtggaccatatggtaggttgctctatagacattctcccatgtgtctactaaactgatatactcagtgtatttgggttcatattccttccttggctacctcgaagaatcattttggttgttacctgcctccccttttgtttcgtgtatggctcatatatgaatctggaacttccattattgcctttttggaatccatactacatctagtatgtttttctccatacttagagaaataggtctacgtaggtgcgggaactgaagtagtgagtccgctaaaagttggaaaaaattgaattccaggaagaattaaagttgcg

SEQ ID NO: 195043 - DNA, 849 bp, Cannabis indica
tctctctctatctctctccaataaacaccccatggtgtttcatgatatcccctttgatcttggatttgatgcaccatcatctgaagtggtggtgccacctcgagttaaaaaaattacttgttttttgtttgaacgtttggtgatggctagggcaaaagcaacacctgggtcatctttttcaaaggttgttgttgctattggaggtattctcaaaccgcccttccatccaagtcgatcaaagaaaaattcaaagctccgaaaaaggtttattctttctcttctatacacctaatggtgtttcctgctatctcagcagtctttgtcaatgttgcacctccaactgaagtggtggttccctctcgggccacaaaaggttcatctttcattgatgtttttttgtttttactgagaacagtgatattttatctgtcttggtcctattgtctttatttgtttttttttagtctccgtatttactttgcatatcaattggagtttgtttgtttaatattctaatatgtttctctttccttactattttttgtttttactgtgaacacaaattttttcgtttcttctctaagtttgttcaggaacaatggtgatgagttgtacttatgttggttctttttctttccacgtgatggtgtttttcctgttactctcacaatacttgtcattgctcaatcagctcatggttctaagagggggagaagatttttcttagtcctttggctaatttgatagacacaaagggggagaagttttgacaaaacccttgtcggtttgttgtttctgtgccctctttttttgagggggagttttatggttttagtttcaaaactttta

SEQ ID NO: 195044 - DNA, 1651 bp, Cannabis indica
ttaacttaaataatcaagacaatagcatccaaacattctagggccgacaaaaagggtcatacacgataatacaacttgaaatttgtacgagagttagtggattttagtttgccttgaatgggttcaagttgtgtttaagttgactcgtctaatctgtttaataaacgggtcgtattcgtgttgatatggctaacacgaaactgatccgttaatgatatatttaaaattattgtagtactttaacacgtcataaataagtcataaacatgttgaatagtgttattggttcacatatttaaataaaatatgtttataaacgggttacacgggtcatgtcgtattaacccgtttataaattgattgtgttcaggtttcgttttctcacacgataataaatagatcgtgttcggattgatcatatacatattttatacataagtttcgacaagacatgtatacgattcgcgaatacaaagtgccagtgtcaattcaaaccaaactaaaaagaaaaagtattattgtggggcatcaatgtgcctagcacctccatgatagattgttttataattgtttaatgattctcaataatcttaaataattaagagtgcaataacaatattaaagctggtaaggatttctcataaaacaagagactacagaatgttttcaactcaaagcttctaactttgttctaacatatttcccgccaaagaggagaaacagaaacaaagtaaaggaaatggctttgagacccaaaaccctaagggatttcttcagtccacgaccacaccctgaatcacatccaccaccgaaacgcttaagggcttcctcttccgattccgatggtctctccgaccaagaaaagtcccgcattgagttccaaaaactggtggccaatgccaaacgcaacctcaaactgtgttccgacagagtcgaacaagcttctggtaagctcccacccaatttggaggacctcttggttgaagactcgtggttggaagctctccctggtgagctccacaaaccctacgccaccaccctttccaactttcttcaagctgagtcacgcgcctccgctgccgtacacatttacccacctccccaattgatcttcaatgctctcaattccactccttttgataatctcaaggctgttatactcggccaggtacgtacttgctcacattcatcttcattttgaatgtaataatcaaattatgaatattggaggttttgtgtttcaggatccttatcatggccctggtcaagccatgggtctttctttttcagttcccgaaggggttaagataccctcaagtctactcaacatttttaaggagcttaagcaggatctgggttgttctgttccttctcatggaaatcttgaaaaatgggctgttcaggtttctgtagaataaacaaaatagaagcatcatgttattcttgataaatgtttctctctgatttaattactcataatttccattgtagggtgtgcttttgctcaatgctgttctcactggtaagagtaggacattattataattgctgtatatcaaggtgttcagcaactaactttactgttcaaattatatctatcaatgttgtctctcttatccatgtttagtattgtcttttgaccttttttttt

SEQ ID NO: 195045 - DNA, 1937 bp, Cannabis indica
ccacaaattacttgtagaacttttgaacagcccgagccaaatatcaactggatgcccctgcagctcaacgactcccacaaccagtccaagcatctattccatggagtcctcttgcttcgggagagttaaaatttaaatgcggatgtggcttgtgataccagtagaaatatcattagtgttggagcagttattcgagatgctcaacgtggtgtaattactgcctttttaaagcccattatagaaatttttccatagcacgagatggaggcaaaagctatctttcacatcttgaactgacttttcacaaatgcaacaaccaattgcacaagttgagactgatactctgatggtttcaaacactttgaatgcaccttcttctacaatttcttcttataataatttaattgtggatatttcaatgtaaaacacttaattaatatggttgctcatagtttgactcgatatgctctagaatttgataaaacttacttttggttgaagaatttacctccaccgatatactatgttattgtaaatgacttatccttttaatttatatagcaaagtatttctctaaaaaaaaaagtttgaattaaaataaaataaaagaacctaccccatattcctaatcgtaacagattcactgtaagagatccaaacccaaaagaacaaacctcatcccaccattccaacaaacccagtcgaccccttccctcccattgtcaccggtaagaacaggtcccaaactagcaaaagactcaactttgagtttttttattttttattttaattcattaaagatatattaggaatattaactcaggtttaagtttaattttttacttttacaattttaaacaaactgggaaatagggttttacacgagtattatttttcacacctaaaagaataatagccatgagtaaggtaaaacaaaatgttagttgaaaaaaataaatatatttaagtgtataaaattaaaaatatatattttttatgccgtaaatttttcataaaaatatatgaaaaaaaatcccataaaaatgattttttatttaaaaatatcatataaattttattaaaaagacacaaaaaaaaaaaaaattctcgtattttgtgtaattttttataacacaatatatatattttttaagaatatgatattgtattaaaaaaaaaaatctagagcagggttacatatataagacgaggaatttctttaaagaaatttatcttttaactaaaaagcatcttaaaccaattcatgaaaaattaaagattaatttgtaaaaaagaatacgttataaattaaaaattatttaaataatttcttgaaaaaatcaatgggaataataatgggtaacgttatgtaaaatatcaaagttattcataataaacatactcaaattgtattttatttgtgtttatctagtgtgactgtgaaaatatatatagtatccagggccggccctgaaaatatatgggcccaagacaaattaaattttggggccctcaaaaatatattaaaaaaaaaattaaaagaagagtgttatgggatttgaacccatgaccttggactttatgccatccacctcaaccaactaagctataaatatttattgtttataatacacttaaattttacttaaataaaagcctaataattttttttatttttttttatttcgggcccccggaaagtgtgggccctaggcacgggcctagcccgcctatgcctagggccggccctgatagtatcttaaaagatattttccatttataaagaaaaaataaaaagagaatttcaaagaagaaaaatcttatttattatacctatatatttcacgtttaaaattcttaatctattctgtatcctactataactagaattcatttattattatatagatttgcatttaataaatatttgtttttcc

SEQ ID NO: 195046 - DNA, 1155 bp, Cannabis indica
atatatatttatatatatacatggaaagaaaatagtgagactggaatttcgattgttggggagttgacctgatagatgaatgaatattatttgcagattgaggagcttaagcattgtccatttgctgaggtaatctaagtttgtggtgggatttttttacaaaggaatcatctggtttaattttctttgcactagttttgaaactcaaatttcttattccagatttgttggtacttcactgactcttgggagcaattccggatcaatggagctattgacattattgatggatcaaatcctgatcctataaaacttcaggtaactgaacgaacacccttataatgctggaacgtgtttattggtttaaagtttagagatgttaaaaccgaaaaagtgtaactaattttgtttttctcattggttgatttcaaaagatcatttggctataaaggctgagctagttcagcttttaacttccctttgaactatctaaattttcccacatatttgtcttttcttttctgaatgatgcagcaaagagagaaatcatggttttccagttctcttaaatctaggctgcagtatttggggcctaatccaggtcttccaagtatagatgaagatccgactaaagaaacttttctcgacaattctagcggcccagtcaatgcattttgtgtgctaattttagatccagatcaggttataggtttctctagactaattttttcagtcaacagttcattgttttttcacagttctaacttcctgggatttaatccatgtccatttgcaggttgattacttgaatttgaagagcaaccagaggctaagctttgcatctagacaaggtgtcagcggggagaagtgctggacttctgggagaattaatccttaacatctgtattgtgatttcaatgcaacgtgttaccatccaacattgggaataaataagaaggtaatgttgtacctctgtatatgatcatcaattgcgttttacaaactatactagtgggtgatagaacttctttcttagatctccaattaatgaagctgtgtatatgcatatggctttaatgattgattgagcactctcacaacaatttgtatatgcttgtgctgtgcaaggtgttgctattctccacgtcactcacc

SEQ ID NO: 195047 - DNA, 1173 bp, Cannabis indica
aaaaatcaaatttcccaatcaaaatcaaatgcacatatgacatattagactcatctatggctatataagccaataaaaaatattatttttaatgataatgataattttaaatacattgaaggacgcagctactcctagaaaattgtatagtgatcgtcaatttttattagaggatagtttttattgaaaacgtggttgaggcataagaaaaagaaaatgtttaaaacttaaagcttgaaaattcttgccaaatggccccagcgcccagctttctgtgtagataagaatcgaaaatatgccccatatgcgattacatttcgagattatagggtcacactatcgtcatcatcatcagcaaatttgtttcaaactttgagtgagtgggtgcaaatatcaaagaccaggtcagagtcagagtagagataatgtggatgatgcttcggtgcttcctactacacacacacacaccatggataagtcttcttctaattcttcttacactcactcacacagaccctttatacatgtgtttaattaatttataataaatatttgatttttgtcttacaaacaagttagtttcttcacaaagcagtaaagtaattctaatagaaataaatgcttaatgaagtggtcatcgtgggatctgactaggatggtaccaattaacactctcatgctcacgtattatgaaaagcaagtaaacctgtctatttgcttggcttgcgttggaattgtaataatggccacaactttgatttcttctttctctcttcaattcaaacctaacaaaaaaattggtcctaatttcagcaatttttatttgatagtggaggttgggacttagtaggaaattcagtaatattgatgtgatgtcacctatattttatttgccaaaaagcagtggaaagaaagacgtgtttggtcttttcattttttaataagctgagcaaatcaatgctgctttaactttgatgatttttttgcttattatagctaaaatataaagttgatataaaaagcttttcaacgtattggaaaatctaaagaaagggaaagcttaatagtaagcaatggaggaatggaatggagccaccgcccttatgacgtggccacacacccatgacctagttgtgactcactgagtttgacactctattggtaatcaaaaag

SEQ ID NO: 195048 - DNA, 1958 bp, Cannabis indica
ttttttttttttttaaatcctatacaatgataatttattagggtaatttagacatctatttataaattataatattttataacagaaaaacagtttatttttactgtttatttcttttcttttttattaaatttactgtttagttaagtatgtaatggagtagtgttttggtgtttataccacgcatcaaattggaagcgaagaccaagtgtccaagtccaacttcttccacttgtactgagctgagacccatagcgtattatagggccgggtgtggtggtggtggtggtcggggttgccatggcctctgcggagcagcctttgaagaagcggaagctctacgaaacacaatccgaccaaaattctgacccttcaacaaccctagctcacactctaaaagacgtcgttccaccgctgtcccaggacgaaattctgaaaaggcggaggaacaaggaggagattcgaaatgtctacgagtgctacaaaaggattaggttttgtctttcgcagaaggaatctcatagtatcaggcctgacattgaacaagcgtatctctctctcatatctgcttctagaggtcagttttgcaattaccctatgctatttgccctaatttatcttagttttgaacttatcccttccgacccataaatctactctctctctccctctatatatatatatatatatatatatattctgaaactattagtttaaatttcagtcatttatcttcttaagttacattgttatatgataaaccccgatgggggctaacgctttgaggtttatgatttcagttggttgtttgtgtacatgtacttagcttagcaacaatgcgaaattctattgcaagagaactttagactctgaaaccttcaaataggagaaacgaagaacaaggagtctttgctatactgttgtggtctagactgtaaagtaaggcaattaaaaaataatgcgtttggatacaggacaacccaatatttgatcataagcgtgttttcccctagagtggattaggttgttagttagagtgtttcataaagcttatagttaccatcttcacttgcaaattgtgttttttcactactgtttcaaactttttgctctaactgtgccaatgatttgctaggaatgatatcttcctttagaatttgataaggaatctcatacatgctagctgtacgtgtaggctatgaaatattttttcttaaatctggtggcctgtctgctcacttttcaggttgtccaagtgtgcaacgtattgtagctgatcttattccacgatatgcatcatactgtccaactgctcttgaagctgctgctaaagttattgtcaatatgtatagttggagcttggcagggataagtagaggagatgacattgatggtgttgcatttcagattgctagatcgtgtattcttggactctctgatatttgttgcatagcttgttcagaagcaccgacatcgtctgtcatccagggcgttttctcttctgttttgcaaaatgtgctgatcttcttcatatcatcctttgagggaaaggatatatttcagatttttgggaaagaaataatagaagtaaaatattctactgagaattttaatgagcttaagcacgaaaattcagatgagaatgaatcttcattggtagcactatttaagttacgcgttcttagtctatttaggatcttcttccgttatccaaaagatttgcttgctgcttgttttgatttgcttagttctactggatcagagggagttcaaaatggactctatttcttgaatcagttgacaagcaagcttgatcttagtggggtccatcaactggagaaaaacaataatgaacttatgcagtaaagattcgattgaaacaagttccagacatgatgatgttatttctaaggatcttgtgtcagatggcaaaaagtgtttctccaaaatgcatctct

SEQ ID NO: 195049 - DNA, 1815 bp, Cannabis indica
ttttttttttttttttatttctcagttggtttatttatatttgtattttatttggctgatttctctgtctctctctctctctttcttactttggagacgacaacagcagagcttgtaagtaaggttattatgaaaacagagcatatttaaatatgattaaaaagatacggtcgtgggttgaaagcgaggcctgaggcggtcaatgcggaggacagtgagccgaggatttagatggatgctctgctctgcccttccctgccttacacatacacattttttttaaaagatattcacttattcacttacacgcacgcaccatcttctatatatctctctcctcacgtggcttcaccttaactatccctcctccatcccttctttctactttcattaaaatactatattttaattttcaaaagaaaaaacaacaaattaaccagagtcttctttaaatttaaaaatatcattaactcctaaaacaataacttcttctatctagctcattacattagggaatagggagtgtgcaatataacttgagtctactctatcccggctttaaattaagttattcttacatgaattgtgtgagggaattgttcgtttcctttgatgattattcaataataaaaaaaaaagataaatttttttataaccttgtaaaaatcgaagatagtgtttgtaccattttgtattactatattttgatgaataattttaaaaaataatttaatttatactaaatttggatcctacttcaaccacaaatttgaatccagtgagagccaaaattagagttgaaaccagcatatgtgattgattagaagtaggacaaatatggatggatccaagggcgagcaaagtcaagattaaatgtcaaagtcagattacgtcgaggaaaaagaattattggtataaaatctggtgatggagaagtaattagagaaaaagtgatatttagaaaaaataataatgtgagaaaaattgatgggcaccaaatattattaacataatcaattatttttccatttcttccactcttgattaatacatttttttttcttctaaattatcttctcattcaatgtttgcataaaaaatggaatttgaactacctactttcttttagctagttacaattgaggtaatagtggtatacatatttatattctattaggaaagatccaaatagtttatacttatattatctttactgttcttagcaataactagtcaatggtactttttttatccttagttttactctatagataaattggaactaattaattccttagttggaaaatagctaggtaggttaaccaaaataacaaaaaaaaagaaaagttgaagtgacctcaatgttagaaataaattatactttcaccagtacaaactttcattataattttccataagttaagcctttttataataaaggagagaactgacaacataataatatcatataaataggatttaaaaatacaattcagatctaatgttgagtctactcttatcacttttgactggtaaagattctgttccttcccaattgtttgatttaaaaaaaaacacttatattgctgtggtgcctgtgatgttatgagatgaaccagctttgttcattgtttctttaaatctaatcaaactttttggtacttagttcaagtttaaaccttgcagtgtttctgggataagaaaagaaagtaaagagtgtagattactagattagataatagaaggttgaaaaaagtataaggagtcttaattctgccaagtgatagagagaaaaaagaagagacagaaggagag

SEQ ID NO: 195050 - DNA, 1519 bp, Cannabis indica
tcttctaccattactagaaaaattagtatgtagtgtatgcctgtagaaaacttctaccacataattctttgatagattagtttttaagttaaaataaattactaaatacacattatttatgtatttatcctacacaaacagaataaatgattccatacaaataattaaaaacaagaaaaattagacaatataatatggtaacagtattaacctttttttttttactaaaatcattaacccccaagtgatctaaatcagtaataatgctaatttttggggtaacataacatcaaacatttgaattaaaggatttaatcattctctctttttattttatattttgaaaggaaagaatttcatcattcaagtgaaagtaatgaataattttaaaaaaaataaaaacgttagaagttactctaaataataataataatattaaattaaaaaacaaaaaataaaaaataaaaaataaaaaatagagaagaggcaaaattttccaagacaagtgccacaacaacaactctctatcactggtctggctcgtgttgggtctgctattggttcggttgaagagtttcacactttgattctttcttttatctttcccataagaaagattactctttccttttgtatcttccttcttcttattctataagaaagagaaaaaatatataataaattaacaaataaaaataaagatgggttggattccctgctctggaaaatcaaacagtaaagctaagaccaagaagaagaagataaatcagcaggaaacccagttgatcagatcaaacccccttcaggtaatctttgatatctctatcctattgtttaattttttgttttttgttattatttttcttctctttttgaataataggtcgataaagcttgatactgattacaggttccattcattatagtgattaataaattaccctttttctgtttggttctggtttttctcgaataatgaagatatggggttctttattgtttttggtatctgggtttttttgtatattgatcagaactaagagattcatttgtttcgttttttcactgtattaattttttaatgcctttgacatgtttgtcaataatacctcatgggaaattataatctctttccccttttggtatctgggtttcgtttaattttcaaacctcattgtttcatacgaaaacttaatccattcgagtttactcaataggtatactcatagtagcagtacatggtagaacttaccttactctatttttgaattagtagttggatcttaatagaaatggtctgtgattttgaaccataatggtaaaggtgaggaaattattccatgtttatgatgttttctttggaaatctgatgagtacctaaattttgtaaatcaagtgtgagtttgtaattgtctgatttccattgtcaacgcacaattccaccatcattttggttttgtggttgtactttccctgttatgaaaattgattatctaaataaatgcaaaaccaaacttca

SEQ ID NO: 195051 - DNA, 1069 bp, Cannabis indica
actatgaatagctatgctaatttagaagacaaaaagcttatgacaatgtttcaaccatgtagtattagcaggtaacagcatatgtgatttacatatctacttagaccacatttcatttctcctaaacatattaattccacataagcctaattttagctagagtatgtggctaaacttttgaatctggtctttttcatattcaaatgcatttctatatgatgagtcccttttcttttccatccctgacttttcttttggtctctgctaaaatacgccagaataccattgactatatatgggccaaaagggggtgtcccacctcacatttgagagatgaaagctatttactttataaagaatccaaagcattttcaatatatataactttaaagcagcaccaagagacagtgcagaagactaataagtctggttcataagttcacagctcaccctcctttggaaatgggttcgaaggctttaatttttagccatttgtaataccagacaacttactaatggttaaactaacagcttcttcatttgctttatgtctctttggctctgccctcttggaaataaccccttcaagttaagctttcattttcataaaacattctctttgtaattaattgtctgatatgcccttgtgtaagactatagttttatactagctaactctctagttcctttatattgcaacaaaaggaaaatgtaaacagcaaaacctgtttattaaatgatcaactgtatttaagtaatccagagagtgattaaaataaatttaatataactacaaaaagagaatgatattagaggttttgaatcaaatcaagttaatcaactcctacaatactccaatcaatggtaattacaaggctggtcacttcaattaacaagagctaagaaaccaaacttggcaagtatttaatgtattttaattattagtaacatgacgaataaccaatagaaactttgatgctacataatgtaaaacgtgtatcacaacatagattaaataacacctgataaaagagcacctgaacattctggtaatgttttttttttgctc

SEQ ID NO: 195052 - DNA, 591 bp, Cannabis indica
aaaaattaagggaactgtttttcaaaaggtaaaaagaaatcgtaaaaaattataataagaattgaataagttttttatgaaaaaaataaaaaataaggaactgttttcataagaatacaaataacaaaagttgtataaatgcggtcctactgcattaagtgggtcttaatatataaataacaaaattcttctcttcttccacgtgaagatttgacttcaactttacctttgccttggcgttttacgtttcagtaagagagcgagagtccaatgggtctttgggattacattaccgccacaaccgattcacttaaaaacaacacaccagatctgacgctggtgaagaactggtgttcaacctcttacggatacaccaaatacgccgtcaccgacattggcggcgccataaaagataacgccggcaaggtaatcactcgctacggacctgacgagaaaaccaagtctaaactcgtcccgttggccaccagcgttgctaaatactcggttgtggagggtcttaaattcgtcccaggtttgctctttctttttgtttatttctattttcttattttaaaataataacgttccaat

SEQ ID NO: 195053 - DNA, 1139 bp, Cannabis indica
accattttttctcatttttttttaaatcttttagatttctcactattagagataatcaagattggttcattctgttaatggttgctagttaattataagtggttagtcagttagtttagttgtatcttttctgttactctctttatgtaactaactgactgtgtgtatacatatatctgcatgcctttcagttacaaggtacagcttcattttctcgattccatcttccattctctctctctctctttcattgtaacatggtatcagatgcttaggcattcatggcgttgaaaggagtagagtccactgcatgaagtgatacaccagaagttccacaagcactccccaacaacaaccttcttcctctgaatcttcgcctggatcgatctaactacacgttctggcaatcactcgttttagttgttgtgcgtgcatacattcttgatggattcatatatactcagcaccaatcctcctccagcttgaattcataccctgcctaacaccaatggcttcgtcttgatcagtttttgatgcatttgatgagggtagatgtgagagtttagactgatggtttttagtgttttcggagaacaatggtcggctaatgatgacgattttgagggttcgatgttgtcttttagcttgtattgaaatatatatatatatatatatatatttatatatttatagagagagagtactccatttgccccggcctctcaaattaatgcaagagattcattacatacagacacctctaaggttatgagactcatttttttgtcaaatcatgtgcgtggttggttcggcccaaaaattaacacaatacatgtccattgtagttactattataaattaatgtataagcctagctaatttcattacacaatacactcatgcatattaatgagtaaatgaatttataagttgtaatagtctctaacggccattattctttggtttattacacacgatggagacaattactgcagtgctataacaatttttttttttaactttcaagaataaataaatacttaattaaaaaaaaagaataaataaatacaaaacaattgaataaatttaaaagctgaaaactaaaaaagaataaatgatcgaccacagtgggagtcgaa

SEQ ID NO: 195054 - DNA, 1742 bp, Cannabis indica
tatatatatatacatatttaattggtttatataaacgtgcatattcaatttttggttagaattttatttcttaatgattcgcttgtatttctatatagcttcatcttcatgggatagttattgaaatttttgtttgatttttcagaaactgagaagaagcttaggaactcagaagggttaattttaatgtgttagatggtgcaaatgagttaaggtgaggacaattttattatactagcgttacagaaatggaaggtaagcaaagtgtcattgcaagactaatgggctttgatgaacaccaacctctggaagctatccataagccacagagagtactctctgagaattatttgaggaaagttgcttctattggtgttgggaagaagaagaataagaaggaagccaaggaggtttgtcaaagaaaaggagtcttggatttgtcatttcaaaaatgtgcaactggagaagagtcttcaaagttggatttttttcaaaaacataagaatgacagtgtcacatgttctgagagatttgacttggtaagacaatatgaatcaagttcttcgcatatgagaattcttgttttgaaaccaatatccgggaaggctaagagatttggagtaaagaatgttcagtgcagtgtggaatctattagacaaagatcttctgcctcaagggaaatctttaaggagcttaaaagaataagaagatggaggaatttaggctttccaacaatgaactcaagcttaggattaagtggtggcgacactcctacattaaaatctgagattttgtcacctccttccacttgttcttttgagtactcagataaatcaactttaagcaacagatccaaaaagcagatttgggaaaggtgtctgttgagtgaaaaatataaagttgaaacgacttctagaattagtaccccagatgagctgattgctttgcaagatcctaattcatggcctagaaattgcaagcctggtctggacctagtaagtttgccaaacaacaactcaagtgtgaagcttatagcaatagatggtatttggggctagaaaagccccttaatcaggcaaggagtaagatgataataaaacatgattttataaaagatatggtagttgacaaagagattgagaacacaaataaatcctttggagaatctgagagtgagcaattagaacctaccatgtgcatcagcttagaagaagactatgattcttctagcctaactacagatacttcaactcaacaggtttgtttcttttttcatcataagaacacttttttctaaaggatattattggcttacttaactatgaagttaggattcctctttctatgagtcttgttaacctcaacttaggaaagtgatgcttcaaatgtataatgactaaagtaaattttctagttagtatttcattgttcaaatatttttataaatactcaaaaataataaaaataatttacaaaaatataaatttactatttctttttaataattttacgaatggtaattattttttaaaaaaataaaaattacagccagttgtttctctgccgttttgaaaatgttatttttattaggcgtgtcaatttaagtcattatacgacaacacgatatgaactcgatacgaattattgcaggttagagtcataaaaaagaaacatgtatcgaaattaagtcaaactcaaatgactcaatattgttatttcgattagattagagttaacgcacg

SEQ ID NO: 195055 - DNA, 2655 bp, Cannabis indica
aaaattaaaacccatgggcccacatgagtatttcggccatcaagggcttaataaagccatttttattttttttattccattttaaattctaaacctaaccctaaagttacaatataaatagaatatgatagctcttggttttcatgatactattgactcactttgttagacaaatagaaaatcaaagagagcttcatatattttgaactctcttcttcttctcaataatttcaaaccttgagtgattgagtaatttcccacacatttcaaggcaatactcaagatagtgtggaagattgtgtagtctttctgttacttgaacaagaatccaagttcaaatcttgatcatactctacaacataaaggatcaaggattagagatctgaacagaaggagtcatattatttatatgtaaggttttctataactttttaatgtctttaattcattattttaggaaattcatatttaggatgttagattacagaattataatccaaaatacatgttagtaaatctagatcctggtaaaatatttctaatagagtggtgggccacggtggccaatgatgacacattgtatttgtctcaagccctccaacaccaggtcgtcagtgtaagtatcctagtttataactttaatttttaatttcctgctattttccagcttcttcactaaccctttatcttctatttttaaaggatgttctccttgcccagcgtagtgcgaaagcaacagcaagaatggtccatgagcttaaaagcctcagggatgaatattaggcagttgatggcaagaagatcatagctatggaggacttgacaaatgccaaatcagaactagaccaggctacaaagagcctgaaagcctttgagggcaccaaatctcaactatcggagctcaagaagtacacttatcgggtggtgggtgaaaacaaagataggcaggaacacttccaaaaggtcgtggaccttgcggttaaagtccggcttgacaaaggcatctaaactacagtctcaactgtgaagaagaagcttcaagaagagaacatcaagttttccaaggaggtttaagacttaaaactcagctatcagcaagctcgcgacctaactaccaaactcgaaaagagtgaggtggagttgcagaaaaagttgagcaaagcataggaagaaatggcatagacaaaggcgacagtggtcgagcttaagaaggacgtcgaagccaaggaagaacggatttgggtcttggaggcggagctgaccatgactaaaaatgaccgggatggcctagtgaattcgaaagaggaactaaaataatggctagaggaggccaatgccaagttggtggaagccgaggagagattagaaaaggctgaggaaaagaggattgttggatggaaggatgcctttttcacctccgtctacacccttttccagagagatcaggatatatctttgaaggcattcggtgatgaggaggatgaagttcgcgcccaacttcctgttcgagtgcaagcagaaccaaaagaggcacaagattcgtccccgaaactgtagaccgatcctttgactgaagagccatctcttgacctcccacctgaaaagctaaaggcaccccttccagatgaagtgccaacttctgaatttctggtctaagaatcacctactaacctttttgctcaagagccaagttcggcccttgccaatactgatttgggtgtctagccttaaattttcccaattgttgcctttatcttcttctttatttatttatttttaatttagggacaaatgtcaccctttttgatgttgcagagacaattgcttatgcccttgcaacggggccttacattgtaattaatttacgttgttttgctttactaactgttgaggactaaaactacctttaaattacatctgcgtttaaattcattaagtgatgtgactttggatgaatttttactaagtaaatttgattttgaacaccctgaggttccagttccaacagtctaagccttaggatttcaactttgtgcttagtcttatgtcttaggttttcattaaattgtctactttcgaattccttgaggttatgattccaacagcctgagcctttgggtttcaacgaatttatcttaacatgcgtattcttaaaatggaaaacttttgaaagtaacttactctagactccttaaggttccaattccaaaggcttggaacatttggacttcagttcttacttttcttttgaagttttcgtttatttatcgttttagaagcctgaacttcttttaactgtccacctgggctaactggcagttgactgatctaggcgtggtaagaagtaatttactcttagtctcctgaggttctggtccaaaggcctagaccttttggacttcagtttatgcttctacccctcgatcatataaagaacacatatttaagagaatttttaaagacacatggttgtacataatacccctcaagtcagctgagagcttgggctcttggtcacctgtagaaacacacataaaagtttaaaaagacttcacatttttcttgaaattcctttgtaattatcataaaatgatttttgccctaaggcttacatttcttggaaaaaaaaaggaaatcaaatgtgcaagaatagaa

SEQ ID NO: 195056 - DNA, 2523 bp, Cannabis indica
atatatacatattttatttgattgacacgtgcattatgcatgtattgtaaattataatttctctttatttttttattattaattttttatttcttaaatatactgcattttttttttaaagctagtgtatttctggataaatagatttccaagtaaaattttaaacttgaataagactatgtaaataaacactacggaatagtcttacattatagatattatttattaccaatttaaaattgctataattaaacaaggaagaactcaaattatagacattatttgattaacagtattatttagtatggacttgtattaataactcatgtaaaattataatatatttttaataaactcaatctcaatatattctattaaattattgatcgtaataattaatgactcttgtatatttaccaaactatgaaaggagccctaataaaataataaaacaagaaacgaatttccaacccctttctcttccaacaccatatcaaaaataaaataatataagaaatttgaaaaataacgtcctaaacacaataacgattttatatattatttatttacttattttttcctgaaaaaaaaaaagcactaataatgtgcactaactgatatttttgtatttcagcaacaaaaataaaaacaaaaatatatattcttgactcttataaggttatctctaatattaaaactcaaatttagtgttgaaccaacaaaaaaaatataatatttcagtaattttttttattctaaccacaaaattaaatagtacacattaaatatatgaatatttattacagaatatattcctcaaaaaaaaaatatattacatattacaaacaatacataaatatttttaattattaaaagataaaaaattacatctaaataacttcactattttaattttaagtttatttaaaaatattaatggaacaaccaaattgcaaatactctacactaagtatgctttgaattcctttattttaaattaaaaattcaacatgctctatatttataattaatactaattatttttctaaatatattttactaattgtttttaaattttattttcttttatatggacatatatatttatttattttttatttctgaagagtagaaaaattcctattaataccatcatcaacaatgatcaatagatttgtcaattacaaccttagacaaaagagaacaatttttttgcagattaatctttgccgaaccaagggtcactttattcttctcgccaggaatgaaatgattggaaccaacctaacaaagaaacatgcataataagattttgaatatcactaacaaaaatattgtactaaactatgatcatagtatttaatgaatatcaccttgaatttaatgaatgaaattaaaatatatgttaacatagtattttaataatattatatattggtaatgactaaaatatgaaaatattaaaaaaataaagtcttaatgatatattttaaagaaattttacaaggtaatataaaattttgaggtaaaatagaagggtttcggttatttgaataatttcttttcaagaatatagagtaaagaccatactactattacaataatttacctctttaataactattttttatggaaataattttaagaagatattatatctaacattattggacttggaaaaaaattattattttcatttagactttggtgtcactaatttgtgtcaccttaacaagtgaaattttaaacttgtattatttgaatcaccgtggaggtgatgctgatgagcccccacaacaacaatagtgtcacatctagacactgactcaaattcttcccctatacgatgactcaaaacacttctactaacaagacatccctaactatccacctcctactctatcatatactttgtgttttttttttgttggaactcatgttgctgataatcttttggaagtactttaaggtagatatttcatgagtagctatttataatttattattaaagattataagtttttggtgatggctggtagttgaagataaatggtatcaaaattgttattgtttgaagcttttctcaccattgatacacagtatcaagaacaagtaacagaaagagaagaggagagaaagatcagagagaaagagaaagaaagaattgaaagattgtaaaggttctattgtattgagagagctggagagtttatagacagaacaaacaaagcaataacagattcaacagaaacgaaaaacaagaacaacagcactaacaaactctaaccaacttctaacacaattaactgccttgacaaaaataacttcagaaagagatggagaacaaaattcacatatctaaaatgttaaaaaaaaaactttaaattaatttgaacaaaattaattattgacaaaaatgccaataaataaatcaaaattatttgcggtgcaaatttaaaataagctcttgaatacatgctcattaccttggccacccccaattttttcttctgaaaattaaat

SEQ ID NO: 195057 - DNA, 1366 bp, Cannabis indica
tttatttatttataattttatacccaaaagattgtcaatactcaaatggaattgtataaattttcggaagcaattttgtttgttcgcattaaaattttagtagtttatggtttgacaaagcatgttttttcaattaaacaagatagatatcctctttcgagggtgctatgttgattgcgaatttctatatcgtaaattaacttttttctttaaaacattgttattaagtatcagtagcgtttagtacattttataggtagtattttacgattgattagagatttttattaaaagtattttcttaacttataggagactcgaaacttaattatactaatagtggtatgacatcgagaagggtgttagacaccactaatttaatacattttaacaattttttttttaatgttgaaattgagaaattgtggtcaaatttaactttgtcaccaagaaaaaaaatgaaaggtttaacttgacaatcaagtcttgattttgtgataagagttataaaatttggataaattatatgtgaaattaaaattaattatatatgttggggaaatttggggaaatttttttattttttatatttttattttaattttcatttacttcatcatcaaataaacaaaattcaaatgaataatatttatttatttataattttacacaaaaagattgtcaatagtcaaatttaactttgctaccaagaaaaaaatggaagtgtaatacatcatgtttaaaaaacatgtttggtatcatgtcttttaaataatgcttatatgaaacattgtattttaatatatttaattaaatatttaaacttggatttgaaattcatataattattaaagaaagtttagtcaataaatatgaataatttttaaacataattattattaaaaacacaaaatactaaatatattatttagataaaattcaaaatactagtgcacacctaaaaatatttattgttaaatttaaattacctattttgttttacttattaaaatatatgtttttaatcacataggcaagcttaatattctcaaaacaagcatgtaatttgtgatgttcttttaaaaagatatgaaaatttgtgagtgtaaaatatatatataaagaataaaaagaaaaagatatttgagaagaaaagtagtacaagtgtaattattattgttgtttaacaagtaggaaatttgtatagttcattggattacacgtggcacgcatagaagccatatataaatgcatgaaaaatggtactagaagtgaatgactagactagtgtgatatctactattaatctagtacacatactttattttaatagaattgctcaaatttattatttaatatttttctc

SEQ ID NO: 195058 - DNA, 2169 bp, Cannabis indica
aagttacaatctattttcagattttgtaactcattagatgttacaattttatgtgtattattatattatatacgatataatataacctccaacacataatatatattaatctcctattaatatataatttgtcacatttaaatattttaatctatattatattatatcaaataatataacactcaaacccggccctagccttggtggcgaacctagcaccctacccggacccaaccccgactcaaataaataaataagaagacaaaataaaaaaaaaaaaaaaaaaaaacaaaaaaacaaaaaaaaagaaagaaagaaagaaaaattaaaaaaaaaaaaaaatagcgtatttttggttaagccccatttcctcgttcatctagctcatacttacaagcagtaaaaaaaagttcctcgttcatgccagcttctgcaacatcggctctctctctctctggtataccctttacgatcatccaggttttccttctcattaactttgtcttaatttatatgccctaattttcgatttctgtaaatgttaatctgtaaattatcagtataccttcatggaagattgaattgcgataatatatatattttttcggtggtttattgggcagaatttgtgaagtgggattttggttttgagggctgagtagtgaggatggtgttggtgttggctttgggggatttacacgtaccccacagggcacctgatctgcctgcaaagtttaagtccatgcttgttcctggcaagatccagcatataatttgcacgggaaatctttgtatcaaagtatgtgatccagtatattttatgatcataaatttgtttagttaatggagcaattttgagctagctttaatttacccatttgtggtttttcttttgaagtattatatattcgtgtgtatgaagtcaatgtaggaaaattataatttaggttgtattccattccctttccaatcattctttctcttttctggtgatgagtaagaggatggtttccactcaattagatcaagtagaagtagttgaccgggtttagtttttagatcaaccttgattttggctttacataaccctgtcctgaaaaatgttcagttcataaactcgtttactacaaatggaaacgtttattcatatccattaactcagtacccttcctattttcaccatgtttgtagtgtcatttatagtagttttgcacttttgctaaaattgtgcttgcattgtttgtatttctacaatcaatttggaattactacgtggctggctaaatcaaaatgccactacctaagagtttgctgatgctgttttcaggaggttcatgactacttgaagactctttgtcctgatttgcatattactcgaggtgagtatgatgaagagacacgatatccagagaccaagacattaacaatcggtcaatttaagctaggattatgtcacggtcatcaggttggttctcttcccttttcaattcttaaatggatttttaatccttatcttcaaagtcaaacaccacgcatcttggttttctgataaacatgaagaaaaattattattgagcctgaacagaaaagatgattcaatattgcctttaatacatgtcctatattttcaagtttattggataagttctaattaacgtgtctttgtaatttgttagtttgtttggtttgcatctgtaagtctcgtggttctttttctgtgatatcattcatctgtgtcagattaagatgttcactattgggaaagatcaaggataatatcttcgattaaaaatttcttcttatatttaaatactgttaccacaattgcaggctcttttcattagaaggaacatatgtttatttatttattccataagacaaaatttccctatttggtccagtgtttgtttaaaacacagcattctattattctagtccattgaaagactgtcaattatgagaacaatggtagaatagttcatcaatggtctttaaacagtaaatatatataaaaaaatccttgaacttgaagtatcttcccctgtcattttacgtagattgagaaattgcttacatgcttatgtattccttctatctattgttgcattaaaaaagggggtgggtctaaattagtaatgaggaaatatatgtttctattaggtcctttat

SEQ ID NO: 195059 - DNA, 1251 bp, Cannabis indica
tacgagattccataacctacacagcaagattatttaatcaaccactctttattttaatagaaaaaatacacaacctaccactgctgctttcgaatagtttatattatatatttgagcacacattccacaaagtggtaatttaattcctttgacacagtaacaacaagtttaaatgagattccataaccaacacaacaagattagcctgaatttgaaatagcttacattatacattttgttcagaccaaaaaacaaaaaagcaaagtaaaatttctaattgattataattgttaaaatcctgaggtgtccttcaatatttttctgaaaaaaatcattccactagcatctctcaaagcatagtccaatgccaaaatatataaattaatgacgtaaatatattaaagcatatgttaaaacaagaaaaaccaatgttacacttgtagtaataaaactctatctgaatagtattgaattatttggtattattactgttcacagtgaacaagagatctataactgaaaacatgaccctcctgttcttaaatttgttcaactttgatcactaataaagttttgttccatattcatataattatttatataaacccactaaaaccaaaatcaggatgataaggactctaagcaagaaacaaaatgtgttgctgcttttaaaagcaatcaaaaggggtgactaatataagttaaataattaataaaaatgaggtgatgtgagcttaatgatagcttgcatgtaagaaaggaatgaaaattaagcaatagaattcaataaaaagaatgtgaaatagaaaaataagagtgtactcgctttaaattcctccttaaaaatactcactagaagcatcaaacaaaaaaataaaagttaattaaatctcggtatttcagaaagtagcagacagtttcttagtttgaaagtacctgatacccattccactctgaattttgtgaaggaaccccttgatttggggaaagcatcattggcataaagggagcagtctcattcaaagatctcggagaagaccaagatggtagagttgattgtcgtgcaccttgtaatgagacaggtctaccattaccatatcctgcagaagtatcacttcccgccgctgcatcagttggatcagggtgattaaacctgcagtttcctccatacttacaggagccagttctcatgtaatatgggcattctttctcaccctgcaatataaaccacataagatgactaaaagcaaa

SEQ ID NO: 195060 - DNA, 4740 bp, Cannabis indica
atgctgtggtggtcaaccttatcctttcagttagggattacttcacagggttagttcttctcccattcaccgaataatgtactcgcttcaagcatatatttcttgcttttatgttcccttaaattgttaagcaacagtcacttatacatgcttaatgatgctttatctttactctttcagatatgcaatctatctctacataagcacaatttctgtccaggtttgtttcctctcacctttgttcttttcttttaattggcaatgaatttggtttatttatgagcttgtttacccatcaaaacttctaattggtgttcaaactgagctgtgttttgccataccaggtgacacgttcactaaactgtaattggaattagaataatcaatgtaagaaatgaatcgggttaaaatataaaacaatcggaaacaatattttattttgttatttactaagttaacctaaaaggaaatcagaattattttattttgtttacataattagaaaaagtaatcagaatgacttaatttgactaaattaccattgttagagcatgtaattattttttatttatatatttttaaagggcatatttggttttttttatttttaattaataaaaatataattaatataaagtaagttaaggaaaagtaaaggtattctttatgaaaatagaaagagaacctttctctttgttttctccttaatttgcgtggaccccactagtttctcccattccaataaacaaataaatggaaatcaatcccatacaattcattcccattccgctttactaaacatgccataaattattcagaaaccacagcttgcctcagtcttaagtaattatatgttaattgccttgatgttttgatataagtgataaaatgtaagtacactatgcacttacaatgatacagaaaaggccatgattaagtgactggttgtcaggcatggaacattttgtgaatctagaccctttttatggcaggctgttggaacctatctgatttcattttgaacctacataatcactttttcaatttatatcaagatattggcttccttttctgaatggttaaattttcctcgagttacatttgatgtgtcattgcattaatgttcttgtataggtgttgttgggaattcttcttgccatatatcttccaaacttggattcttatcctggttacgttgtgattcaaccagaatctcttgacaatgctgaatatgaagaactacctggtggagataatatttgtcctgaaaggcatgctaattttttctcacgtaagtaatttaagcatgtcgttattgataccaataatttctgttttggctttaaaaactggattctgttatggtgtcctatatactcttcaatcctttaactgatatcataccatgctactgcagaaatatatttcggatggataactccactcatgcagaaaggttatagaaaaccgataactgaaaaagatttgtggaagttagactcatgggatcaaactgagactttgattaaaaagttggctttaccttatcttcttttaatatgttacatacatatgttttttcttttttcataaactaatgatatgaattatgcttttcatttttcaggttccaaagatgttgggttgaagaatctcaatgttccaaaccatggcttttaagagcactgaatcgtagtcttggaagaaggtattgaactaacacttctttttttttttccttttttctttcaattctaacttaaagaagagataataattttatttgcttcttttacaaaatgttgtatgtaggttttggtatggagccctattcagggtaaagatcttattcgctgttattctttctaggactttttattgtcacaattgtttttaataaagagtatttaatgattgaagcttaactaaaaactgtcaaaaacaatctttgtctcatgtttgatgtctcaagatgcttatttatctttcactgaactctttgtagattgtatatgacctatctcagtttgttgggcccattgttttgagtcatctcctacaggttagttcctttttatggggtcttttccatttataatttgtctgcatatctttttcttttgctctgaaattaaaatacttaatttcttatggagaaaatgataaattgtaaaaaataatataaggaggaaaaatgacatgtcttttatgtgaataattctagaatcatggttggaactgatgacaatggtttttgacataagtttttcttttctcattatagaagctaatcgagcaatataattgacatggtaacaataaattagctcaatgtgaaatgaaatctggttcaatccattttaccatcatatttgttttatgcattgtagagtgtagtttttgaatttgaatcatggactttctatttgtcttgttacgagctgcagtcgatgcaacgaggggatccagcttggattggttgtatatatgccttcttaatctttgctggagtggtatggcttctatctttcatctactcaagtaaagtaatgtgctttaagcttaaaattggaattcttctgtacagaactagtggcaagttgaactctgaatactgtagtttactgcttattccttggaaggctgacatagatgttcctttgatttctttagatttctgacttcttcgcgttttaattcatacaagataggaatggaaggaaactagagttgttgattgtgttcaaagagtaactttgtgacgattaacttgtttattgactagttgatttcaactattttcagtctattggggtgttgactgaatctcaatattaccagaatgttatgcgtgttggttttcggatgagatcaaccttggtaaaatcctctcttttatgttacacttgtaaattatgttgtgttgtctaattctgtcaaacgttttaggtggctgctatatttagaaaatcattacgattgactcatgagagtcgcaagaatttctcaacaggaatgataacaaatatgattacaacagatgctaattcacttcaggtaaatatactatagattaattctattttgctttgaaagaggttacttcttgcttgtatacattattttctttggttggatgagtgtggaagattggggccaaaggccattaatcaaattataactatgccatgttcgaaaatttcagcaaatatgccaacaacttcatgggttatggtcatctccacttcgtattatcatagctctagttcttctttaccaacaattaggagtttcatctctttttggggcactaatgctagttctcatgctcccggttcaggtagatacactttcggtttcggttgtttcattgctaccttgctaatcctttaaattcttagtttcttcatccaaatagtgaatctcactgcagcatcaagggctgtgtattgtatttggtttgatattttcgttatcaaacatatgctcatatctttcagcattactcccttttgattcttgataaaatgattttctttgtgacaaaacagacaattatactttccaaaatgagaaaactcacggaagaaggattactgcgcactgacaagagagttggcctcatgaatgaaattctttcagccatggatattgtgaagtacggtttttctcttttatttttgttataaagcttcatatcatcagaactaaatgcactgacactctgttgaacatgttccagatgctatgcgtgggaaagaagcttccaatctcgtgttcagaatatgcgaaatgatgagctatcatggttccgtaaagctcaattactagctgctgtatgtgtgaaaactagtagttgaaacataaatatggttagaaaggatatttagattgaaaaaaatatataataatatgggatcaagcctctaaaagagagcaagctatgttcgatttgtcctgtttcataactgtaatttttataatagtttcttttcgattgcagtttaatagcttcatactaaacagtatcccagttgttgtaacggttgtatcatttggactttttacgttgcttggaggggatttgactcctgcaagggccttcacatcgctttctctctttgcagtgctgagatttccactgaacatgctgcctaatctattaagtcaggtatttattctagtaaagtttttctttggccttactattctgtgttcatcgatgattgattaaaatatgatatgactctgctttgaaaggttgtgaatgcaaatatatcattacaacgtttggaggagctactcttagctgaagagagaactctacaaccaaacacccctcttcaacatgggcttccagctatctcaattaaggatggatacttttcatgggacgcaaacgtaaacttttcaacatccatactttaaattatacaaatatgaagtcaaaatagcatataatataatgtggtttatcaaacagtgctacctactaattatacaggaatatttctcagtagacttcttcaatgtgagccttacagctttcttaacctttgtcaacacctccttataacctttcttgagctaacatacattacaagaatatttactacaagctacaagtctcatttactgatagctaatttagaaaatttctcaagatgtagaaactatgctaatgctaatgctattccaattgcaatgatggtaaatttttccctattttcaggcagataa

SEQ ID NO: 195061 - DNA, 1805 bp, Cannabis indica
actgagtttcagtactcttacagccttattaaggagaataatatcgattttgagttgtttggttcgcaagaaaattatgtattattttcttttctagttttctcggaaaatcatttcaccagagttagagaacttataatcactgctgttatacataatttcttttttctttttgtacatgtggaattttaattttcactcaaaataaaataaagaagaaaacctttgagcttggtcgatcaactttcagatgtttactcaatcattttccgtttggttggctagaaatagtaaccgaaaaataaagaaaaaagaatgaaaagaatagaaaattttattttgagaaaatgattttaatgttttgcattgtttgttgtgaatattttacatttcacaagttttgaaacctttttttatttttttgtaaatgtaagaattgtttttgatgtgattttctgcttaactacattttctcttcattccattataaaatacaggggcttgcatatgaaggaatgaagtaaagtgtagtgtgttcataatcgtagagttggattttctactttagaggtacattaattatctgtggtttattttattgtgatgaaaacaaatttaaccttgttattttcttaattagtttatttgtaataaaatagtaaagtttatggtatatttgaaaagaaacaaaatactttttaagccataaaacaaagtttatggtatataagaattgttccacccttaaattaatcttgctctttatgtgttgttatagtcctaaatatatatcatttgtttccttgttaattttaacttagttcttgtcctaataggaaggagtaaatagtcattcatatctacttttctgcttttatgttttgtgttcagtccttttactttaacaccatgtttggtaagaaggaaagaaaataagtgggatggaaaaattatgaaggaaagaaaattattttcttgtatgttgtttggtaaataagatggagagaaaattttcttaaatggaaattactattttgtttttataattgtaatttaataattattagtgaagataatttagtaatttacacatatattttaccataatcattttctctccacttttaggtggataaattttagtggactccacatttttctctcataccaaacacacttatatttacattctcgtcacttttctctcttaagttttctttcctttttatttttctaccataccaaatatatagtaaaagtagaatgtgtgcgtagtcagcttaaaatgttttaagagtatctgtttcatttattctttattttaattgaaattctatttttgaggttgagttttggcattactttgatgcaatagttgattatatgagagtttttaatattatgaaaaatatccctatgaattatgattttgccttctatgtgatatagtccttaacacaacaaaacaaaacaaaaaaattaactttgtcaaatgttaggaacataagtgattcatctagctcatctccatgacattctctataaactctacttttattttatattttgtggtagcacaatagttaattgtatggtgcataaaagttttgactatatgttgttgaataatttcaattatggtctttcattatttagtatgatgacacaatcacaatgtatgatatacttacttgtttttttaaatccttgattatctgcatatatgtttgcataagtgaaaaattaatggtgaaatatgattgtgtttcagattatggtaatttacaaaaaaaaaaaaaaaaacc

SEQ ID NO: 195062 - DNA, 1136 bp, Cannabis indica
acataatattgtactaaataatagtaatacattaataccatacaatccaaaacaatactatacaatacaatgcatcgtggtataccaaacgagcccttaaaaaactatggggagtcattatttgtatggttgaagcttatttttttaaaactttagatagtatgattggatgtgctctaacactactataagagttgaatgttttgagtaattagcaattttttatattatttataaaataaaaatatattggataaataaatagtatttgtattttatttatgtatttatttagtgtaataataatttttaaattatattatgaactcataataattagtatattcaatactcatatatttaaattgtatcaaccccacattggaaatacatcagctgaaaaagaaagaaaataaaaggtgattgttgtagttaatcaatgtctggtctaaacctcagatttaggtaaacaaagaaaaaagacaaaaatgatgtggagttcaattcaataataactaaaaattatgtttattttaagcattttattttattttagagtgaaataacactatggattgcaatattgaattattattatgcatcactgaaaatcatgtcatcaactcaagtttggatttgaggagcccatatagaatagaatagaatcactctcatctcaactattagtctctgcattgcatgcacatcacctactcccccccactgcttattttccctagatttccatatttttcttttcacttttcaccaaatcactttgttatattatatatttcattattgaaaaattatttggtagtctccctaaaaaaaacactctgtatcaatgtatttctttttttttttttttgttcttcttaaaaagttatattttttttggtaaatagtaatataactattcaaaattttaaatttgtaagcggcataaatctaatatttatttttagtcaacataagtactcatgtttgtaaaactataattttcttttcagttttcgacagtacagtactccgtttctaaatttatttaaaagaatatttagtaagatagtgatactctatgtctcttgtctagatccaatgatctagaatttgtagctttattatgtgtactg

SEQ ID NO: 195063 - DNA, 4709 bp, Cannabis indica
ttttaatttttaatttttatgaaattacgagctttgaaggagaatcccattaaaagagttttttggttctctctgtggagtgtgaccctgtgtgtggctagtagtttagccgtggtttttgtgttgtagtctgtgtgttggttcattggtgagtgcgcttggtgagttttgcttggtaaggatgagtgaagagattgaaaacattatctcattaacaggtggcatgaatgtcgaaggggaagatgagtgggaatcaaacgaacaagtggctttgaagtttaaggaaggttcattggtgggtagagttttagcaagaagacattgtactgtcaactttctcaaaactatttttagtaggatctgggagaaagagggaggttggtttgtggatatattagcaaaagagaaagggtgtatgatactagggctctcctttgatgataaagttttggctgaaaaggtgtacaaaaagtcaacatggatttttcatggaggaatattaatcactgagaaatggcctccaaatggtaactagaaagaggctagtctaaatatggtggagtgttggattaagatgaagggttttccccctaatgctttgaccttgaataatgttaagaggttgggcaacatggcaggagaggtttcgaatatccaatggttgaataccaatgtaatgctaatgagggatacagtgagagtgaagataaaattccctacctctaaatgagcttttgttggtagatacattcctaacaatggtggccaaacttggattcagttcaagtttgaaagtctcccgctattatgctttacttgtggtcactttggacatgagcaaatggattgtaggaaggaagtggttaagacgaaacacagctctggcgtggtggtaccttactacggcagttggctaaaggatgagagtaacataacaaactgttttgtaactctggtgactcctagtatcagtcaccgccggtgggaggaggaaggaaacaatggtgtccaaaggcctcgttctgaggaggctagtgtcgtaccacctattacccagcaggtattgtataaaggagaagagtgtcaggttcatggggacaatacaaggagaaaaacggctaaagctgagggagttggtgggtctcgagatggttacgttggtagaggatctgtgaaagagattttatctaaggagcagtcaaccttaaccattttggaaagttctgctgagaatggagacaaaaggaattttaatgaggtggatcctaatcaacgtgaggagggacaggtggataaaatgcagatgagtcatcacagggagggtgaagtggacattgctgaacgacatatcgtagagaacaaaagagaggaagtcgcatctgttctctttgatgttactgagtttgattcccagaagaaaagcagtccttccaatagtaaatcgacgaagaagggagaaaagagagaagggagaggtgtgattctaagaggaagtcaccgtagcaaagagagaaatgaggaagcatcgacagaccattccaagaaacggtcgacgatggaaaaggaggcagcgagcgatatggagatcgatgatgaaccagggggaaaaagggcaaatcgtgaaattgagatggagagaacaatggaaagtcataaatttaatctcccaggattggtgacgggttttgcaacgggctggatggatgaaaaggaaaaaacggtgaacggtgcgaatggtcgaaagcttaaatcggcaaaagttttggctcgaggaaaagcttctcggttgggtaataaaggtagagaagatgggcatgttgacaacgatggtgaggttggggagcaagtaaggtcgattaggatttatcggtcttaaacgaagatgataaagcggcacaccttgagatgcaaggtcgccgatcacaatgttagttctgtggtggaatgtccagggcctcggcaaccctgagacattcaatgctctccacttgagaattgtggagttaaacccgaatttgatgtttatttctgaatcgaagttactaaatagtcaagctgagattgtggggaggagattgggttttagtgagtttttttctggtggaaagggtggggcttagcgatggtttaatgctgttgtgggaagccgattttaaggtaaaaattctatctcattccagatttcatattcatacttatgtctgtgatttgaattcaatggtgtggaattttactggggtgtatggtgatctggttagaagccaaagacatcacttttgggctatgcttcatcgaattagagatgaaactcatggcccgtggcttattgggggtgattttaatgaggttctccatgcgaaagaaaagcagggggtagggagaagaatttgaattctatggatgggttcaggaaagttgtggaggagtgtgactttgaagaccttactaatgatattgatacttttacttggtgtaatggtcaaaaggagaattttatgctggaaaaattagatagatgcctagccacttcggattgggttaatctttttcctcaaagtagagctttctatcttgaatggcggtgttcagaccacaaggctttggtgcttgataccgaggggggacgggattccaatgaagaggggaaggcacttcgatcccggtttcactttgatgaggcttgggtagaagaggaagagtgtagtgacattgttagagaaggttggaacacgggggctccttgctcatcggattgggactttaagagtaaaactcaaaggtgtgggagtagattaaatagctggaatacaaagaagaaaaaagagttgaagcacagagttaaggagggtacaaggagggtgaatgagttgtcaaaaagaatgaatgttgataattggggattacttaaaggtgcttaaaataaccttaatgcaattcttgagaaacatgagaggtactggaggcagcgaagcagagctttatggatgaaatgtggggataaaaactccaaatacttccatcataaggcgacggcgagaaaaaagaagaacaagatcagtgagataatggatcagcaaggtgggtggatgagagatcactctgacattagcaaggtcgctactgaatatttccaaggcattttcacttctactaacccgagtgagcagataatgagtgaggtggtggacaaagtgaaatgtaaagtctctgtgaacacaaatagggaccttctagaggctttcactgaagaggagatcactagagtggttttctctttgaaccctctaaaggccccaggaagagatggtctccctgccctttttttccagaagtattgggaaactactaaaggtgatctcattcgggtttgcctcaacatcctcaataacaatgcgccattggatcatctcaatgacactcttattccgctaatccccaaagtggacaaaccatcaaagatggaggagtttcggccgattagcctttgtaatgttatatacaagattatctccaagtgcctagccaatcgaatgaagatgtgtttgaatgaggtaattttggagtttcaaagtgcctttgtgggaagtagaataattcaagataacgcaattgtaggctttgaagggatacattgtatgaaacgaaacaggtttgggaatggttcaaaagtggccttcaagttggatatgtcgaaagcttatgatagagttgaatggccttttgtggaggcagtcatgttgaaattgggatttgatagtcagtggatcatgaaaatttctcagtgcatttcttctgtgtctttctcgtgttgattaatggaagaccttcgaatatctttactcctaagaggggactaagacaaggggatccactatccccttttctttttctgttttgtgccgaggctctgtctagcctaatactggatgcggaagagatgggtcttattcatgggctgaggtttggtagaaatggtgtataggtatcccacctattctttgcagacgacagtttgatttttgtggaagcaactaaggaagaatgtcaccaagtcaagaaaatcttggcagcctacgaagcggcatcgggccaaaccatcaatttcacaaaatctgagatgtgctttgggaaagtggttgatgaagtctcgaaaactgaatgtgcggatttatttggagttaagaaggtagatttttttgacaagtatcttggtatcccaatctttgtgggaagaaagaaatgtgaactttttgctgcaattaaaaagagggtgtggaatagacttagaggttggaaaagaagcttgttttcggcggtcagcaaagaggtgttgattaaagtagtcatccaagcaatgccttgctatacaatgggggtgttccgacttcccaagaaaaatatccatgagcttcaaggaatgactgctagattctggtggggttcttcaaaagaaaaaaagaaaactcattagggagcttggagtaaactttgtcttcctaaggagaaagggggttggggttcaaagacttagagctttttaataaagccttgctagccaagcaagtgtggcgggttgttagaaatcctatgtcactggtaggaaaggtgttgaaaagcagctatctctccaaatcctctatcttggacgctaaaaaaggctcatgttctttcgcagtttggaggggattgctatggggtagagagattgt

SEQ ID NO: 195064 - DNA, 1725 bp, Cannabis indica
acactatactttcagcaactcctgaaaaaacaagcacagacatagacttcatatatgaatacaattgaatatgcctaatatgtaggcaaatccaatagcaaaatggtatgatgactaaaaaacaaaggaatgtagatattgaatagctcaaatttgaaattccctcaggacaacaataattgtaagccttgtaccttctctttctgtttgaaaatggtctcaatcttcttcatatactcatctatcagtttctacaccaaaaattaatgtagaaaaattagcaagaggaaatgaaacaaatgacttgaaaagaaataacaaaagaaagaattcctctttctttactagtctatagatacccctagagattgaagtctatagagagaaacaacacaaatgtcatgttacctgcaaatcactcgacaagtccttcacattatcttcagagagttttttctcctgcataaatgtgtgaaatcaagataacaaaggatcctagtcaaaggttaaaaaaaagaaggtacaagatactggaaggagaactgaaacaaaggtggatctaacgcttcaaaccttttcaagtttttcataggcctttagagcatcccttcgtatattccgcaaagccacctacagcataaagaacacgtgtgactttagaattgaggcaattaacagatttcaagttgcacggagaagtttcatcatgacagccatgtagacaaatagaaaagggaaaattaacaagagagtatgatttacagcatatggttagtaaactaaacctgaccccaaatcataaaaattttaagatgctgggcaattacactaatttcacaacaaattaaaaacatttactttctaaaagtaaacaaaatttgtaaacttacttttccttcctcggcctgttttgctacaacttttgacaattcctggattcacaaaacagcaataagtcaagcatgcatggaggagtcaaatgataagaataattcagattgatgcagaaccaactaagcaccatgtaattatagtgtaagaagatctttaatcaagaggaggtaccttccttctgtctgatgttaattgtgggagggacaatcttataacatcaccatcattgtttggtgtcattccaagatcagaactgactattgctttctctatagccttcaagctgaaatatagatgattacaagaattgtaaagataaaacagaataacagagcctacatatagaattacaagatgcaattgtcatacaaaaagctttcttgctttgaggtgacaatgagaaaggaaattaactatccacgccttttctcaatggcaagcatgtatttaatatttattgctaaaaacagaattagaatgatatgctggtattgtgaaattccaactgtttttaaactatacacatatatgtctgtggaatacctggatttgtcatatggctggatcatgagggaacttgcatcaggagtactgatttgagcaatgctcttcaaggtaactggtgttccatagtactccacctagaaaagcaacgataaagagatatttcttagtaaatataaggacaaaatctaacatcagttaacaccattgatctacatcatgataacacgaaaagatgagtgactcttaaaacagctgttaaccaggagctctaataaatcattttatggagaaaagttacttgcaataagtatacactaaaatgat

SEQ ID NO: 195065 - DNA, 882 bp, Cannabis indica
attatgataaataggtatgttcttctagtataaattatcttcaagttgttatattaaaaaaaaattactaaaaattaatgtgagattattattttgtactattttaaaaatacaaattttaatttatcattttataaaataaatagtccaattattaatttttataaactacaaattcaaaagtatttatcttatattttattctgttttatcttgaaaaaaagagagacagagacaagagagagctatactaaactatgcattgtatttgtatggcattaagtactgtcttagtcttgatgagttaacaccttccttaacagaaattaaatggaatgatctctctatatatatgttgtgttattatatttattagatgatgatatataatggggttgggaatagtgataggagctatgaagatgaagatggtggtggtgagttggcaatcgtcggcggcatcggcgcaaagggcggcgatgttgggtggtttgatggtgccattgggtgtgaaggtgttgttgaagatgaaagtgtttcggttaagatattgggaggtaattgatgagtcaaggttacttttttttcaattgggtcacattttagttactacttatgatgaaaatagtgatgaaaatagtaatggtcagtcttctatttgtagtagattttttaaggggcttttggtttgatttatcaaagacttgttagtacttcatctccaaattctgatgaattagcagctcatcaccaagatagctttaatactctttctatggttgccctttaattaatacttcttcttcttcttcttctctttaagttactcttaacttctacttaacttatatatatatatatatatatatatatatatatata

SEQ ID NO: 195066 - DNA, 1272 bp, Cannabis indica
gccagccgtactgaagatttcctttcccaagtcgccttgactagtctctccggtgccattgttgtactcaaatcttgcgaagacttactacccatggccgaaggccttaaaatcgttcaaagatgtatcgatgttgccactcttaaggtcctaatcataattcattttggctctctatagctaacttgtgcttaattagtttaagcaatcctttaattttgttcttaattactattcaggcttgtaacgaagcaaactttccgagtcgatcgccgacaaattggtggacggaggagctttcgattttggagattgaattcttcggaagaataattacagccatgaggaatcgtggcgccaaagttctaactatagcgagcgctttgattacttacacggaaagagcgcttcgagatctggtccgagatcattccgggaacgggacgaaatctatagctccgaacgaacccgaagtccgagtccgacaacgggagattctagaagcggttgtggctctcttaccagcagagaaagctgcttttccgataaactttctctgttgtcttctcagatctgctatcttcctgaaagcatccaacggctgtaagagcgagttggagaagcggatctctgtgatcttggaacacgttacggtcgatgatttgctggttttgtcattcacttacgacggtgaacggctgttcgatttagacagtgtgaggaagatcatctcggggtttgtggagaaggaaaaaagcgtggcggttttcaacggtggggattatagggagacgtgttcgacggcgatgcacagggttgccaagaccgttgatgcttaccttagtgagatagccgcttatggtgagctcactatttcgaaatttaatggcattgctaatcttatccccaaaggatcgcgaaaggttgatgatgatctctatcgagccatcgacatcttcttgaaggtatattttttttttttttggtttaaggttttctcaacctaattaactctaattttcgcatgcatatataaattttgttaattgtcttatatagttatattataaagtcatatatggttaaccaaaagtaggtacaatttttatgggacattaagtttacaaaaaatatagatatgtgcatatacaagtttttttttttgtttgacattacagattttaatttttatttattttatggttttcacgttgttgcttcatgaaactaatgtaaaaatatggttgatttttttttttttttaacttaaaa

SEQ ID NO: 195067 - DNA, 1889 bp, Cannabis indica
tgtctttacataagttggtattagatttgatttttatgcttaaaataaggccaaaattaaagagtaatccacggtcacactatcaaatcaatgttcatgttttgctaggtataaaaatacccttgctatttgaaaagtctctccttcactctaacttaatttctctttctttccttcttgctttcacgcgcaatagccaacaagagaaatccaagcgcctaaacccatcgattttgacctatgtcatcgtcctaccttgccaccacattgtcatcatcattccccctcgtcaccacaagaaacccacgacaagaaactcacaacaagacccaaatgaaactcaaacgattattgggtatcatcgttgaacttgcacatcccctctctctctttcttgcgcgtaagctgttttgctaatttttttgcaaaaaaaattggatataggttttacagcatttttttgcactttctactgataaaaatttgatagtgctcgatgggttctcaatatcagcatgttctagagatttttttgatagattccaatcacacacatctaattaccaaaatcatatcatggggttaaggcttgttagtatgttctagaggttagggatgaatattcaatattacctattgagtagtatgaaatattcatccctaacctttagaacatgttaatatcaagtaactacctagttccatcaagtacatgctcgataggtgttcgatagtgctcgatggttatgttaagttttgttaaaaatcctttgaactcaatgatacttgataatgctcgataggtaatattgaatattcatacctaacctctagaacatgttcatatcgagtacccatcgagcactatcgaatttttatgagtagaaagtatgaaaatgcaaaaaaaaaaaatagtaaaacccatatccaaaatttttgtctagcttgtgcaagagctcattcaagttgtttttttggttcgtgggtttcgacctagggatgagtctcacgatttgggaatagatttttgaatggtggtttcaccgttgattgggggtctatgtttagggtctagcttcgtgtgagggtgtttcaaagggggttttgtcatgcgatcgtggctctaaggattgatttggggtggcgacaatgggttcagatagggttgctcgatcgatttccgtgaaaaaaatgagaggagggaatcagagagtttgagagagaaaatgagatagatggaaggagagtgtttcaaatgcaagggaacttacgggatcaaggaaaagatacgcatcaacttgttagggtgtccaatttgagttattttttaattttggtcccattataagcattaaaaaaaaatcaaaatttcctattataattatatggacctcacaaaattttaatgtgaaaagaaaagtgaagaaaaaataatttacaatatatattgtaactaaaatatttgattacttttatttttaattaaaaataatttatataagattattatattgtaattagacatatatatatttttttttctttcattctctctttttaaatatgataaaaaaaaaccatcttttttctaccacctcaattttctatctcttttattttttgaggagtgctattgtcaatttcctatctttctatttttcttttccttatatcaaatatagagttaaagttggattgatgtatatttattttgtcactgttattttgttgcttttttaatacacatgtatttttgctggtctttatatttggatagtgattaataaatgtattttttttttttttggatattttgtagtttatttagagttgatctaagaatgatttgcatgttgctaatgaggttaataattttccttttttttttt

SEQ ID NO: 195068 - DNA, 2275 bp, Cannabis indica
gttcatatggttactcgagatttaggccaatgtaccattgatcatcattatgacatgaatcaactacactgatgtattggattgtaattagttaacgattctccatattacttattcaattaattatgtagaactcaatattaaaatacactaataataaaataccacctcttgtgggacatgttaaggtgcccgcatacagttgtttccattgaagacttgttctattgatcttataattttgacatgacatatatatgtatatcatgttgatgtctttctttgttgtccgaaaagcacatctgttcgattctctctgtgttttgtgtgtttagatttttgctttcgtataatatatgtgcagtgaataataaggtacaaaacatcatataattattcataatgcgaaaatgtcaggctcaggcatcaaatctctctagctactaaaaaaagccattgtaccaccatctttttcactgggttaagtgggattttttactttctttacttttggcttttacccaattgtttagaaacaaacgattgtagtagtacacattcatttctttcattaattgcttaatttgtttatattattaccaataatacaaagactaaggtaataatattagaatataaatttttttttttggtttaatttgctttgtaaagtattgaaataaatgaatatcattctaataaaattataatttttccattttagtagaaataatgattccatccaaaagtagaattttttttttactcatattaaattgaattaaaccatttctattttgttttttcattcatatttaattttcattattcccaaccattcttacacataatttagcatatagtacgtagtcaaaagtgtatggtgtggtggacgtgcccataacaacaattaattccctaattatattataattacactaattgaatttggattactaagaatcttctagaccatcttttatatatcgaaaaaatggatggtatcatcattttcgattggattaattggttaattggggccctcacgggaaaaatatcagagtatactaacatttacatatgtcgatatatgatcaaataatcgatggttattataaagattctacaagaaaggaggggaccccaaagtctttttattattgggatccttgtcacataagtagaagggtcgaccctttattggatgatcgaataaggctcatagtttatttggggtctaattgttttacttattgtgttcatgagatcaacataatgaatcgatggatctatatctattacctacaataaatttatctattaattgggtcattatctcaatccctcctccaataaaattaaaaacatgtaattaatgacacaagctattagcccccttattatcaaatgccaacaacttactgagatgtaacggtttcttatgttatttaatagatttaaaaaatatgtaaaacatacccatgggaaatttcaacatcaaaattaacttaaattgaattaaaaaataattagcagataatattaacaaaacacaattcaagaattaaggaaaaataagggtataacataaaagataaaatcagaaaataaataatcaataaaaccgtaaaatcaatactaaaagttatactggttcaagtctaataaatcgataacacaccgaaacttcttttattgattgagcaagaatataggtacagttgagcgctattctttatttgaattctcttaaggtgttttctctctaacactctttcctaattaagaagcttctttatctacagaagtgtctcctttacgaaaaacccaactcaatcctctcttttctttgtacctctttctctacctctcaatcaaaactttctctcaaaagaacttctgtaattttctgttgtttttcgtattatgttcccaaatgaagagatggctatttatagattgagggcttcaaacaactaagtaattaatttggttaagacttaaccgaattgacttgctccttacaatgagatctctaagtcagcacttggtatcgagctctctccggacatgtatcacgcttccaaattgacgaagcgcattctgaaaggacgtcccaaataggcacaaagccaaactatccaaaacaccttcctggaatgagcaactagccttatagtactcctttcgaggacgactaactttcttaaaccacatcgagacttctttccagatggacaaattagccttctgaaactcttttctggtcgaatga

SEQ ID NO: 195069 - DNA, 2562 bp, Cannabis indica
gaaatgtttcatagatgtaacttacaagttaagattgaaacaaaactaaatatatgggatatttacattgcgaccaattagtatctacccattttatagcatttatttccattgtatttcctgaatttatggtaagcgatttacctattaactgaaacatacttgtacaagtttatagcaaagcagctgtaacaagagtaataaagagatttaaatattgtgctagatgaggctaaataatccaaaccatactaaagattaccaaaatacatttttatctagagtaatgattgagataaagaaaatcttaaccacacaataaaaactgacttaatctctacataataataaatatatgactaacatttaatacatatctattatgcaatttgagtgtctctagcattactctttaattcaactgatgatgacataaactataaacgacaaagcacaaactaatcagaataaccgacacattgggaaaattaaattttaataaattatctatgttaaagaaaaacaattattttaatctttaaaacggagtattaatacacgatatgacagaatctatggggtggaaaaggccataagacacgcattgtggtttcccttctatatttcagcaatcaagtggtcatatcctagagcaacacagcaatcaagtgtcttgcaagttggctgtcgaatgctttcattggaattaaagacgcgccaacaccaagaatgttttccagcagccgccaaaaagaaatggcttggggctctgaaagccagtagagagaaaacacacatggctttagaaggcttgaaaataaaaaactgcaatcgtaaagataaatgtttatataaaacatgaataggtgtataccttcaccataggtgagaggagcatgcttccccgcgctggaaagattcttctctttctttcatcatttatccaaaaccagtgcacttcttcatcattcttcaaggatgacagaagcttccttcaaaaccgagaatggtggagtggactattgcatgtttccatctcattaacaaatccaatccactccagtccacctcggttctctatgcctgcactcccgccagttgggaaatgggaacccccccagcagcaagtactttaagctcagcttccagctggcagggtgcaggcatgggccctgcccctcaccggggccgcgggctaatccaaaacatgcatcgtattgttgatgagactgtaaaaacaaatgcacacatatatgattaagactctcgagaatacagaattctattataaatgttcatacgagtaaaactcgaacaaaaaatgaaaattagagaactcaattaaaacatctaattaggatatcagttgacattacagaacatccattttaatggatacagctgtcaagcccatttcccattaagatagtttcaatctcatttagcatcattgctagtcttagcaggaagggaatgcaaacaaggacaaagtcagattcaacttaggcctcaacttcaaccataaagttacaaatgttacattttcttttcaacaaataactaagaacgtacttctcaaaaaaataactaagaaggtacttcatttcagtcatattgcatacctgtgagaaaggttgatgaacatgttcatgaggatggataaaaggtactccaggacgctgacaaggatattgggaggtatgcagatacatgccagatgtggagtgtgcaccaacatgattaggattaaatggtgaaatcatggtttcaggcagagcgtagccaattcccccaggagctgatgcaggagaccatggcccaggtagatgttgaggaagaggatgagcctgaggttctgcagaaatctgaggtggtccatgagtagaacccagttgaggaaattccgtattgtagtttattgcaggggtgtacataggctgtatggtgtatgatcctccattaaacccaaacccgggatcaaacctttgcacatacctgtcaaacatttttatgttattccagttggcttaaaaatactaatatctggagctaattgaatcataattcataaacatacacaaagactttggaaaatgattaataataggtatcatattctttactatggagccccgtattagaaggctggattaaaagaaaaacagtgtaaagatgacaacaaacaattaaaaaagaagtgtgtttaaatataaattataacatatatgaacacctttattggaatgaagatggccaattttgatgtgttaccgaaaaaaatatgaaagatatggaactaataaagacaaaacaatagttgccaattgcaatgtctaagaaagattgccttatatttataagcgaaaaatgaaattttttatatatcaaacaagcaaaaaatggttgcaaaacaaccttttggatgcaaacatatactctattataaataatacccgcacacaaaatatatatgcaatgtatagcagcatacctatcatagttcctgtcgtagtcaggatccttgcggtcaatttctcggtcccgaaatatagctaccctatt

SEQ ID NO: 195070 - DNA, 638 bp, Cannabis indica
atatatatatagactagacatcaatcaacagagacatgcattcaatattaatttgatcatttgtatgtacggagaaataattattgtacgtttatagatcgaaatgtgatatggtatcattcattttagattatatatacatcacaaattacacaatttaataatatagtagactagatctagactctcttaaaacacaataattatttattactaattaatttaattgatatagctagtaaataatttctttctctatatttaccttaaatactaattactaaattgcataaaattaatatatagtgttgaagaatttttggaatccaaatattaatcaacagaaaatggacagtagtatgtaagagaagtcgtaactggaatatttgagattagatcttgtcggtctaactttcatttttctacgtacgtgtgttagttttgtcaaattatatacaaatgtcaattcatgttgagtttgaaaattgtcaaattagtatcttatacttgtacaacaaaaactccataaatatcaaaataaattatatgtacatgcatgcatgctttatgccaacgaaagtgatatctgtctaatatatactgatcagaaaaaacacagctatattcatttttccaaa

SEQ ID NO: 195071 - DNA, 2975 bp, Cannabis indica
ttttcagcacttcaggctattacaacgaaaaatcacagcttgctgaatgggaaacagatcagagttatgtgggcaaatcgtgatcctggttcaagaaagagtgggatagggaatgtgtttgtgaaggtacataatttattcctatataataagaaattaccaattatatataatattgtataaaggtcatctctgctaatgaaaactactcacttttgtattctattggcagaacttgtgcgagtccattgataacgtgcgtcttcaagacttgtttagcaaatttggatacattttaagttgtaaagtgaacaagtatgatgatggaaaaagcaaaggacatggctttgttcaattcgacaatgaggactctgcagttgctgctattcagagcatgaatggaaccagtgttggcgataaggaactgtaagtgtgctatattactacttaattgaatgaatattaaaataaaaatcaaaggtggatgatcatgaacaacttattttgttattgaattaattgctgaattacaatacttcttttcatggtgtacagatttgtatcaaagtttatcgggaagtatgaaagaatgaagaccagtgatgttaaatttacaaatctgtacgttaaaaacttggacccatctgttagtgaagagcttctgagagagaaattctcagtatttggaaatattagtagcttggctattgcaaagaatgagagtgggaagcccagaggctttgtttttgtcaattacgataacccagatgatgctaaacgagcggtagaagccatgaatggttcagaactaggtaaattacttgcaattttctgcaatccagctgtgcaaaatgcattttatatttaactcttttctgttttacattgaaaaggctcccagattctgtatgttgcaagagcacagaaagcagtagagcgcaagcaaattctgaaacatcaatacgaggaaaaacgcaaagagaaaattaagaagtacaaggtaatttccctcctagctgttctctcttacctgtttatagctttgttctaatgcatattgtttctgtaaacagaactctaacgtgtacataaagaatatagatgatgatgtcactgaggaagagctgaaagaacactttagtcagtgcggtactataacctctgtaaaattaatgacgaatgacaaaggaattaacaaagggttcggttttgtttgcttctctagtcctgaagaggcctacagtgctgttaatactttcaatggtaagttgacgagtgtagtgagactagagtttttagaaaggaaaccccaccattactgagattttattgttgacgaatttctcacagggtcaatgtttcatcggaaaccgttatacgtgtctattgctcagagaaaggaggatagacaagcccacctgcaacagcttcaccatatgcatcgtctgtcaggactatctgcaccttcggctcctgttggctctgctggagggtattctcctttctactactctgctcctccttctggtgttgttccgcaagtgccttctgggccagggttactatatccatctccaggtttcagaccagattggagggttaatggttttgctacttcatccagaccccccttccagccaccatcaccacttcctgtaagtgcaacttaattaccttaaatgattatactgtttatggtgtgtttgttgatatataatctcaaattattcccactttttataatgcacacttgcaggttcatccaaatgcttgtagacaccacaggccaaacaggggtaggatgaatggacacattcttccgagtgtgtcacacttgcaacaacagctgccattgatgtattcaaaagattcaactaatcagcaggtttgcttactttttctttcttttttcttgatcagttaattaatcaattccattaatgtaatccaatattatatgtggcagcgtaatgggcaatcaaaatatttgccaaatgggcgtgtaagagacactaacaggggatcatctggattctcatcccatcttcatcatcctcaagggctagaaattttgagcagcatgctctctgctgcttctcctcagaatcagaagcgtatgcttggagatcgtctctttccaatggtcagcaaataccaggtataataaactttactttcacttttacatactcttctttgtgaaatgaaagagtgttgaattgttgaatgtttgtgttgtatatgcacagccggatctggcttcgaaaatcactggaatgcttctggatatggacaatgcagagctgctgctattgctggagtcaccagactcattggttaccaaagtgaaggaagctgtggaggttcttaagagtgtgtcagactccaactccaactctaagtccaacaacagccccattcacttgtctgctgaggttgcagtgaattgatcatatcatctttgatcatcttttactcaactaactcaaccataactttctgtgtctatggtagaggcaaagtactttagtaaagcattggaacaactatgaggcattttgaacaattcttttctgacttctttcccaccatttcttaaactttgtttcttggggtgacttgaaaatggttttcaccgatctttctcataagatttagaagagaatgacacttatcgttttcgatcaccaattgtagtcctgatgcgttattatcacatatttggttaactaggccaataattgattctaaatgaacaaataacatcttaaaaacataatacgcaatggagtagagatggatggctagattggtaagtatatttataagatgccttaagcacatggatttagaacaatatccaaaatctactttggttacctcctaggacttgtaacttattccagtagtttattagtattaccattttctatacataaattataggcttaatttctggccaaacaatcaagttt

SEQ ID NO: 195072 - DNA, 1492 bp, Cannabis indica
atttatttagtatattatttttatgttacttgttttttatattttcatatattttataaaaaaactgtaaaaatattaaaaagaaatacgttaaacgtaaaaaagtaatttacctttataaaaaaaaataagtagaccttactaaattcttaaaaaaaaaaaaaaaagttggtaaaccatttattgggccaaacatcataagcccataaacgaattggaccttaatccacgcagacttttaacagacgggattgcagactctccaccattcgcgcgtggaatctactctcttttctcttctggtttgatgagactaatgtacctgtaaattgatctttcgataaatgaagaacaaactcgcataaactcagtgagctcgattcgttgactggtctggaaggggccaccattgtcaaatagctttctcatcggctcgacttttgttcttgtttaagatatcttctattcttctccttagccattttgatctcagcccaattcaattagagcatttactggtataataaacagactcatctagggcttgcgttgcgacatactgaatttcaataaagttggagttaaatccgtgagaaacgaagaagaagatcatatgaaatcggcggggttgagggttttcttgatttgtttgattttttctgttggtttgaatctctcttatggcgaggagcctaagaagacgaataagtttagagagcgagaggctagtgacgattcccttggttatccaaacatgtaaggggctttatgtaattgcatttttgggtgtaattctggtcacaaagtgtttgattcatatgatttgttttcatgggttttcttttgtatttgtgatcagtgacgaagatgctttggtgaattcgaaatgttccaagcatttggagctaagatggcaaactgaagttagttctagtatttatgctacacccttaatagctgatattaacaggtataaaagaaaaatttatgtcaatctcctatttgagtttatttgttgttattcaatacaggaatgatttgttgaaattcgtctgttaattacttcatgtcttgtctttgatgagactagttattactacctggttggctcattaatttatatagattgaattgagtggattactttgtctttgcattgtctgataatttcgctggctttgatttcgtgtttttgcttttcagtgatgggaagcttgaaatagtggtgccttcttttgttcattatctggaagttctggaaggctcagatggagacaaaatgccaggtacataatacatatagttgttttgctaacggctggaagtttattttttcattcacattttacttgtcatctctatatatgcagaagtggtttgagtgttttccattaatgtcactacactagataaattgaagtatttccttgaattgttgggaagtatgaagaaagtactttattagttttaaatcttttcttttccttttttt

SEQ ID NO: 195073 - DNA, 1206 bp, Cannabis indica
aagtccaattcaatgtatttactgtgggcatgtaagacaagatatgcagttaagaggggtactcaaattatcacaccatataacaggtgatctaggatgttgaatatgaaattttgtaaacagagaatgcatccaagtgatttctgagacaacttgagctaaacttcggtattcatttattgtgcttgattgagagacagtgtgttgccttttgcactgccatgctacaagattagaagcaaagaaaattgaaaaatttgaggttgacctcctatcatcaggatcacttgcccaatccgtatcacagaaggttgtgacatcaagttctatagatttcttaaggagtaaaccatgagataaagtaccattaagatatctcaagatcctcttgaaaatattccagtgtgcatgaagaggatttgccatgaattgatagaccttgttcacaccaaatgaaatctcaggtctattaatggccaaatattgaatagcaccaactatagacatgtactcttgtggattttcaataaggtcaccctaaaaaatagacaattttaagccactagtcataagagttagagcaggttatgcatcttgtatttgagctcaacaaagtaagtctttgatgtattttccttgagccagatgcaagccttcctcatgtttgtggacctcaataccaaggaaatagtggagatgaccaagatttttgagagagattcttgagtctgaagcctttatcacagaggaaacttgttcaaagtcactacatgtgatggatatcatcaacatataccagaatgagaatcatgaacttggatgtgtgctgaataaaaagaccgtggtcagatttggatgaaataaaaccaaaggatagtaagaactgttgtaatttctccttggtgcctatttgaggccataacgagccttattgagtttgcacacaaggtgaggagcatcaggtagctcaaaattaacaggttgtgtcatgtacacttcttcctttaaatacccatataataaagcatttcatacatccaattgttaaatgcaccatccttttactaaggccaaagaaagaacaattctaatggtcactggttcgacagttggactgaaggtttcagtaaagtcttgctttgaacttgttgatagtgccatctggattgagtttgatcttatacacccacttacaaccaattggtg

SEQ ID NO: 195074 - DNA, 707 bp, Cannabis indica
ttttttttctgaacgttattggtttgtgtgagaatttgaccgaacattaaactccaaaataaagtaagaaatttctaaccgtataagcaagttaaaaccaattaacaaccaccaaatttaaatttaacttaaccactagagtaaaatagtgattaaaacatgtcacgattaattaccgcagatttgatttgagactttgctaacagaaaggaagactcttgtcatgtgcctggaccaattattccaacatttaagtacttagccaatgattctgattaattttcttctcttttttcattggggtccaaaagattcttgactatattatacgcctactacttacacaattgttacttataattagtcagcttggtcaaagtgcacaatagttgcatattaatctatacaatctacatttatttagagatgtactacataatttaacatattaatttcgggtccatgatttttatttatagtttcactatcatatggagacctaccactgctttccttcgtaattgtactatataaagacagtgaaaaacaaagatcaaacatgatatatatatggtggataatgtttagtttgaagattaattactattgtgtaaaattaggaagatgttgtgtaataaaccgtaatatataaatataataggaaaaaatacaggtagaagattgttttcatagacctttttcttttt

SEQ ID NO: 195075 - DNA, 1018 bp, Cannabis indica
ccattatatatgtagttatatggttcgcatggtcattaacacagtctgctctgctacgtttgacagtggagtttcaccatatttttgtcaaagataagcaatatccctcttaatattatttttcttctataactgtttatttattgtagagtattgacatgtaaatcgttttaggttcaacgattggaaaccgttacatgttcctttttcttataaaaaaatgttgttatccagagaattctgatgaacagaatactcgccagaatacagatggtaatacttctctatgggtgggtttagccgttgtacagtcttacaatcctaggcgaaaagtacctcgtagtaagatatctatcccggatctggaatgttgcttatcaaaggcatcctttacggcagcacaaaactctggtaatctttgctgcgtgctttaattaatatcaaatatatttataggattgtatatactcttctcctttgtgttggaaatagtcttacacttgtgtttgctgattccatttacaagcttcaatacacatgccacgaattggttaccaagctggatcagatcgttctgagtggtacaccattgaacgtcttcttcgaaaatatgcatccatttacggcataaaaatctttgtgtatgtctctttattgtctttcttaggtgcttacacggggtcagtgaaaactgatttcttgcaaacttttcaggtactattaccaaaggtcatcgtgacaggtttaaccgttgttacaaggtgcggcgcggcatcgtaaacatataatgttttctgtctttggtcatgaattatgtacttgatattttaagagctatgtcagggcactcccaaagacattgtattctattaggcttgtataaatctttgggctttttgtggaggagatcagagtaataatagtaaaatctaataccttcaaacatcatagctggtttcctttcatttctcttttagtaactttgatctttagaagctaattaacaattacaataaaa

SEQ ID NO: 195076 - DNA, 1271 bp, Cannabis indica
tagttcatttcagacatattatttagaattaaagtattttttttgatgacgtgtaaagcattattgtaattgagatttattaagtaatttttgtagttattttatatttaagtatattttgaaaaaattccttatcataattgagatttgttaagttagttaggtatatttttgaaaaaatcccgtaaaaaaattcacaaattacataatcgtcccattcaccaatatcccaaatttcgcggttggatttctctctttggacgcagagaactatggcgaaatctgtctcgtcagccacctcttctcttatacaaaccctaaagcggtacttcaagaagccatgggagataaccgggccctgcgcgagccccgaatacaggttggctgttcccaatgctctcgagtaccggctggagtgtccggcgacgactaagctccaggcctgtgtgcccacctccgatcctgagaccgtctttgacattaagtactactccagagaccagcgccgaaaccgtcccccgatcagacgcactgtcctcaagaaggcggatgtcgagaagttaacgaaggagaagaccttcgatgattccgacttccctagggtttacttgaccgctcatgttcaggaagatgaaaatgctcgcggtggaggctatcagaaatgagccttaattttgggttggtaaactcctcaacattaaattcatataaaatacttctgattaggatggcttgatttaagttttcaatattgaaaagtaattgatgtgaatgtttgttgctatgctgatctggttttactggattttctttgccctagtttgcatgtaaatctacatagaaaacttaacatttacctttatgaatttgagtgatttccctgctggaatactttctggaataacagtatagtactattcctctttcacaccatccgttataccatctggtctattaatttgacaagaagaagaacttctgtttcataccatctgctataatttaatttggtttggttctagtgaatacgggttaatatataatttcgcatatatgttgggagaattattccaaataaatctgttaattgggcaatccaattgtattcttctttgtttgtgatgtggaagaggagcaattttttcaaggacaaatagttgatttcttaaaaaactaatcatttcggtcagtattttcttttgtgattgaagtagtctttaaattacattttgagttacatagctgggattcccatgaaccccccccccccc

SEQ ID NO: 195077 - DNA, 1065 bp, Cannabis indica
atatatatttatatatataaccttggcattgcaatcgattgggcaagccttgaccggcagcaggtccaagaactaaatgatcaaactttgtccttttggtgggcagatctacaatggtagtgctttgatgcaattccctaactaaaattcacaccgtaattcgtgagtgtcaagtaaatccagaaaaatactagtaagaaacacagttagaagaagaaaaagaggaagaggaaatttaacctgagaaaaaatatggaagaaagcatagaataggaagaaggataaggaaacgacgccatccgccgggggttctcatcatcaaatgggcgataccatgtgagaatctctctatcgaatcagactggtttggattggaaacttagatgagttaccaagaagaagaagaagaagaattattttcactttggggttttttttttttttaattagcttcacatgctctggatttcagattttcgaacatttacaaaacgacatgtcgtttgtaattttccactctaccaaaacgacctgggaattctcattttgtgcactaaagcaatcatgttcgttttcttttaaaggttttttcttttaaagctcaaattttataggttttctctttgcttgctttgctcaagcagctcaaccaattgttttggttttcctataaaaaaaaaatgttggttttgaaaatagtaagtatttttcctttaaacaacatgaattagaatagaataatattcaaaatgaggagttcaatttttgtgtcatattaaaatattttctttctaattttttttttaaataatttacaatatcaagtatcaacaataaaattattttagttgaccttgtgtgtttgaagaactataaatatattttgacattgtaaactataaactaaaaacatattatggaggagaattataagagtaatgcagttttttttttttaaaaaaaaaaaaaatgatgtgaagaataatgcaatgttatgttggctcatttggtttttttcctctttttttttaacttttagaattaaaaaaaatatttgcgagtgct

SEQ ID NO: 195078 - DNA, 1703 bp, Cannabis indica
tataattcgtccctaatgtaatcgtccctcatggcaatttttcttttagtatgggtaaatgattaaaattaataaatactattaaaaaaggaaacagaagaagaaagaatactattaaaaaacaaaaagaagaagaaagttcccattgtaattttctaaaacaaaaaattaagtatgatatatagctcatgtacaataattaaaatggtatttttgagaactctatatttacataattacataattacatttggaaaattaaataaagctaagaaagttaaatgtcccccggcaagtcactcaattatttatatatactttaatttaaactaaagtaaagaattattctctctctcctctttagaccctccacgtacaatactaacaatagtttttcaacttataattttatttatttttttggttaagaagcagttttgattagcctaatctgtaactcgaaggtgcaaagaatttttgtttgagcaaatttcgttcaagagtaactgtggcacatggaaatgtgaagtctaagttgaaagaatgggataaaagtgagatccaccgagatttgttgtccaagtaaaatccatatagacctcataaaatatgagctgtttcgcaacttaagcagccaaaagtccaattaatgcatacataggaattagttgtacacatatatttatatatatatatatatatacatataatatatatatatataacgatatcaaataataattgtcagtgtcaagttctttccatagtctaaggtccgggaagaaggagaacgagtcacatcatactcgtaaccatatcttgatacaacattaatattccatgtccttccgctgattaccaatatatattgtttttacagaaatatacataagtttcatacaaaccctttattcaaaaatttcaacaattccttttaatacattcacatttgtagtgtcttccatttttttttttacttttggtaatgtcattttaagacttcatcaattccttgtatgttatacatgggccccacatttgtgttaccatggtcatgtttcgtattccatccaataaaagacaatactagttaatagaattacttaattagtgggagcctcacatcgaattctataattaatatgatggcatgacaatataaagtgtttataataaataagtttacaaataatcctgtcagttgagaaatgaacccctcagtttaattcatttttttcattttaattttgtgaggaaattatacgctatacttattttttgtttcatattttaatttttacttttattttactactctttaatttatactcacttttataagttatattcttattatgtgcattaaaaagtttaattttgataagttttgtgaggttatatttgatactttgattataaaaaagggtatttatcaattaatattattttagagttatatttagttaatgtataataaaaatgggtagttttcaacttatccctaatttttttagaggcttaaggagataatatagtgcaattaaatgaagtggacgttgattaatttgttatccgaatatttttgccacggtgtaactgtaccgcccaaaaccactaaaaaaaacagttattttagtaatatttttaatcacaacaaaaattacttgtaattaaacataatatttagatacaagttgtcacta

SEQ ID NO: 195079 - DNA, 1247 bp, Cannabis indica
ttaatttaagtgaaattggcctgaacctagtcaaggttaggggtggattattgatcaattctcatttcttgactttgtagcatgaactaaaattcttggagagtgagagtatattaacacgagatgtgagaaagaccgccgaggattcatatttattgccaagatctccaaagatgtataggcagagttcttgatcataaaggacttgacctacagtcgttaacgcatctaaaaaattcttcatcttgaggatgtattcatcaatcgaaatggatcctttcttggtggtttgaagatgaaagcgaagctaaagtaggggcacccgtgactgagtaacaaataagtcagagaacgtgttctagatcttagcagaggattcagcgttaaccacatgatcaagcattggttatgagattgagttcatgtgccaactcatgataaaggcatcgcaccattgtcagaagtcaaacttaggattgggatctgtagtgttagatatgaattgaggaagggttgatggccaaggagaatttcatcaaaattgtggcacgaacaacaggtagaatggaggatcaccaatagggatagtttgattggtcgagacgtatagcgatcagtaggagattgttgtttaatgaaagattgaacgcaataggtggagcagcctgtgctaatggcaaagcaggtggaggacgaccgtcgttggttggtggttgggaattggtggtggaagaggaaatcatggctctgatattaagttggaaaaatagagaaaaaaaaacagggagaaaatgtgaaaagagctcccctagcttaatgagctttctccaggatttatatctatataagaagttgttacaagatttgggtagtaacgtccattccgtttctgataaatcctaacatattagatactaacttcctaactaactaatagtcgttaacataaaccaatcgcaatactgatacatacacatagaaaaatactaagaagcattaataatactttttagcatttctcatattataatatattttaaatttccacatatgattatgaaattcatttctctgttttttatattttgtttgttttatttatgttgctttatgaaagaaatttctcatatagccaagtggcaaatttggacggtttgaataaattgaaaagagaaattcagtatataatgtgggcacgccaatttaatatttgattagttatgattcaaaaagaaaaaaaaaggtta

SEQ ID NO: 195080 - DNA, 981 bp, Cannabis indica
tataataattttgatgaattagaggatagatatagagagataagttaaaataattaggagatggtggccaatgatgtggtataataaagttataaacaatgatggtgggggtggccatatgaatggttggaggattatatattattcgtttagtgattttccttttcatttattctttcttctatgtattttttttttaaaaaataaataaataaataaatcaaccaagagaaacgtcacgcaaacacttgctttttcctatttgtggttttattcttttagtgcaatctaaagtggcataccactaacgatggttaatgtttggtgtcaacaattgttttaatttagataccaaatatttttttcaaaaatataaaaataaaatgataatcattttagtttagattctgatcaatacatatatgctactactactattaatattttattaaatttatttgtactgcaggtcttaaattatataaattttaatgaattaattcacaaattttattttccagcaaattagacctaagttttaataaattagtccttaaattttatttttttagcaaattagtccccaaatttttatttgaaacatgaagttctcactattaaatatatggtattttatttatatatttatttacttttgaatttatttaaatatttttatattgattacattatcaaattaaaaaaaatgatattttttttatttatatgtatgttttttaaatattccaaaataaggagaagaaaaataattcaagacatatttttttttttgtatatatggaaataagaaaaaaatatatatttttattatatgtatttttgtaaaatcaaatcaagacatattttaaatattacaaaactatatatacatttaaactactaatttatctttttatgaacaacacttgtacaaaatatatttgctatcgaaaagttcctctgcacttcaagcaaatattc

SEQ ID NO: 195081 - DNA, 1476 bp, Cannabis indica
cacaagtgacaagtcacaagtcacaagagtactgagtataagaaacaaaagtggtcaatttcattggtaaacaacaaccttgctcaccaatattttatttattttcaaaatccacctttaattatcgtaacaacaccaggcacactaaaatccatcctatttcttttacaaaaaaaaaataaaatccatcctttttttttcttaagaagaagaagaacaacaaaaaagtttgaaaaaaaggaatggaaaaaaattgtgtggaaataaggtttattgtttgtgctatactaaaccaaatctcattttatcataataaggaaaagaaaaactagaaaacaaatctcatttctcaagaaattactaattagattttttattttgttaaatgataaaataaacgataaaaataaatcttgagcttaatatatcctcttataacattactgtatatgagtagatcatctatgatattgttgaggctaaaagagattagaaatgtaacaaagccatatataatcaataatacttttggaaagatgatctctcatattcttaatgcaaaataatagaagaaataatttttttttggtgactcattaggtttgtttatacattctcactaaagaaaataattgcataatttgttgtttttattgtgaaattctttttcatttattttataactaaagattaaaatattataaatgtttatgcatatacataaagattattacagtcaacctttcaaaaaaattataataatgaaagtagagttattcttctacatagtcatcaaaactaatttatatttaaactattttaaaatatatatttttttagaaatattctaatatacaatcttattccaattaaaaaatttattttttattattttttgtattttttattatttttcgttctcatatatttaattattttgattttatatgttgagtaagaggtacgaataaaagataaagacaaagttattttaaataacgactttagactgttgttgacttctcaatggtgttgtgtgtgttggaaggagagttgttgggcattcagttagcgctgaaagaggcagttgatcgtcgagtttgcaaggtcaagatataaacggattccaaagtggcagctttggcttttgagtcgggttctcttccttttggttggggcacttatcctttgttttttcattgtcttgagctgtgtaaatcctttgaggaggtcgttgtttcgttcattctctgtttggagaatggtttggccgattccttagcttgttgggctagagaatcgagggtgaagaccactggtcttgtaagggatgtagctctcttttgtgactactagtttctgccttgctttctaataaacttttacttataaaaaaaaaataaaacaaaagtaatgaagtgagacatcctagcatataaacattcgactggtgagattctaatttttttaatattt

SEQ ID NO: 195082 - DNA, 1927 bp, Cannabis indica
tatattttttgttgggttatctttgatttgggcggattattcgggtcgggaggtttacaaaaatctatagggttccaccacggccacttcttaataatttttttaagggataagctgattgtaatattttatggaggtcagaacgatatccctttcacaaaggagaaaaatataataaatgagtccaaattattacactatcagtacaagatagaaaatccagcattatcactatcagtacaaaaatgagtgcaaactttaaataaaactatataataaattattatattttaaattaatttaactaagtaattgatgacgccattcgttaattttcttacatatgtattgatgaatttagtatatactatttgataattaaatatattttgatatataaccacttcacttgactcacacacgtataaatatagatacgcatattgtttataaattaatatataccatataatatatatggcttattaaattactatatgcacatacatatagcactaaacaaacatgcatgcatagattaaagagagttcaaaataagtgtgaaagcagaagaaatatataaatatatatacagagccagacatgcgaggccaaggaccatgatcgaaggcggcacgggcggctttgacagccaaatcgatatcttccttatctccttcggcaactcttgctataacctccccattccttggatctatcgtctcaaatgtttttccttttaggaatatatatagagaaaacaaaaattaagttcttcaattattatataataattatttgtttcaactacatattacgcttttatatacacgaattaagtttaaaaaaaattaaaacaatttatataggcgtaaaaggtattatattggcatggcaatgactagtagtagttagcctacgactacaattactttttccatttcccttaatggattatgtttaaagaaaaatatatacttaaatgattggggttatggtggtgatcgtaattcataagtacatatatacatatgtacgtaacaaatatatatatatatatattattcttccaagccacgatcgaaatttaagtaaaactagtaaacgaaaataatgaatattagatgtaatctttttaactttaaagagaacggaaatacataagaaataatgatgagtactagaagaacatctcttaaaatatttaaattaaatgtgaaaaatgaaaaagaataaaaactcgaagatgtaagaaaatataaataatgttatggaacataagagcagacctgaaactgagtcgacaattctccgttaataataatttggtgaatttattgtgggcatcttcacatcaaacgagtactcggatttgttgccattacagtcatcagtaatattgctccccatctctctatgttatttttcccctctattcaaacacaaaattaagtaataatgccctcttgtaccttgccatattatatatatagttctattatgtatttaacacaccgtatacagccacgtacgttcttatgacacatgtacaagtgacctaagcagtgatgagataatatattaagtatgttgtatacatgcatgagaagaaaaagattaccaattgatattatatgtcttttgacatggtcaattttggaaatatataatttggaaactagctatagctcaccaaaaacataaatttactgagctttgttcatatattatatttttatactcatatttttttacctacgacaaataaattaatatttcttaatggtgtatcgtaatctttttgtttgtgtgatatgggacggtcaatatgggtgggttcaacgttttcttattagacttgttctctatattatatatcaccacctcgaatatgcagacatcctaaaatagggcacgcattaggatt

SEQ ID NO: 195083 - DNA, 1007 bp, Cannabis indica
actaatcacaaactcttgtaaaataaactaagaagaccgaactctaatagaaccactataattcactatctcatttgtgtttatcctatttttattcacatacttgcttattattccttaaatattcaccattctagctgaatactcgcaattctgcataaagatatttttatctttctttctcaaatacttattagagcctaaatataaattgcataaagatatttttatctttctttctcaaatacttattagagcctaaatataaaagattggatgaacacaaatgctctaaaagattatcattcgaactcaactattcttttaaaaatagtattttattaaaatcatttctctgatcaacgttttataaaaatgaaatagcacatcttacaacttatttttatattacgtttttttagttttgaagcatcatatccttcatatgtgtgtgtataggaacttaagaatctgcctttaaagagccattgtgactagtgagtgaaagaactttttggtcatccttacaagcgactggccagcagtaaagagaatttgttacaacatacaagttacaaacaaaatgtgttcgttttccaaaagaaaaagaaaaagaagatagagaatatgagtttcctctggacatgactgaaaatgaaatctataagaataaatctccaaaattcttctactgttcttccagacagatactacttaactctatgtattttcctcaaccaagcttcttcactacatatcacgataaatagtccaaccctcatgactcaaaaagatctcaaacaacgacggaaaactaaaagggctcattttggtaactgtaggactagaaagtaagatctttggggtcttctataatgcttgccaatgttttcaagaacgaagcaagatcggaaccgtagattacacgatgatcagccgtgatattaacctgtatacaaagtaatttttagcatcagaaaaaatcactgtgatcctacattagtaat

SEQ ID NO: 195084 - DNA, 2956 bp, Cannabis indica
aaattggtgttcgtagatctaagagaatcctagattacctaaagatatacttatggaggctaaaaaaggtgaccattttgggggttgccctatccacaatagatgattactctaggaaagtgtggatttacctacttaagaacaagaatgatgctttctcaaagttcaaagaaaggaatattatgatggaaaaccaaactagcaaaaaggtgaaagtgcttaggacagacaatgggttagaattttgcaataatttttttagttcttattgtagatgtaatgggatttttaggcatagaactattaggcacacaccctaatagaatggggtggttgagaggataaataagaatatcatggataagtccaagtgcatgatgtttaatgttgatttatcaaaagattttgggaggaaatctgtgataacagctgcttacttagtgagcatgtgtccctctagtgctataaaccttaagaccccataagaaatgtggtctagaagacaaccaaatctgtcacacttaagagtgtttggttgtgcaacgtatgcacaccaaagtagaggaaagttagaacctagggccatcaaatgtgtctttctatgctaccttgaaggtgtcaaaggctataggatttgggttaaagatcaatagggttttaaaaccataataagtagggatgtaattttcatgaaactaatttcccttatttaagaggaactaacattggaactgcatgaaattttggtactaataatggatcaggtacaatccaaggcacatcaacacaacaagtggaaatagaacctaatttaaatcaagtaaaaccaggaacagaagacactagtcaagtggaaccaggtacaggaaatacaggtcaaatggactaaggacaaacaacacctgatacggttcaggtggaaccagtagtttcgacagaacatgactcaggacaggtggaaggaaaccttgagaattatcaactaaatagagatagagagaagagaattcccaagccaaattagaaaatccgctttaatgtatgggatgaagtaatatcctatgctttcctaagtgccatagagataaaatatattgaactagaatcctatatagtggctataaaatccaaagatgtagagaaatgaaataaggctcttaatgaagaaatgtgatctctggtgaagaacaagacttggattgttgtcaagagacttgattggaagaacataatagcctgcaagtggttattcaaactcaaggaaagaattagaaaagatgacctaatgagatacaaggttaggcttgtagctaaggggttcacacaaagagaagggataaacttcactgagatattctcccctggtttgaagaataatgctagccttagctatacaatttgatctgaaaataaagcagatggatgtgaccactgcatttttgaatgtatttagaagaagaaatcttcatagaatagcctaaaggatttatcaaaatgaaagaagaggagatggtgtgtaaactataaaagtcgctaaatgggctaaagaaatcacccaaatagcggaacaaaagatttgacactttcatgatgtaatagggattcaaaaagatctattttgatacctgtcactacaaagagatcagattacatcatctgcatatctgattctatatgtagatgacatgctatttagtagcaaagaaaaggctaaggttgaaaacttaaaaaacatactcaaatatgaatttgagatgaaagacttagggagtgcaacaaagatcctaggcatgacaattaagaggaacatggaaaaggaaaagataacacttatctagaaagacgacattattaaaatcctagagaaattctccatgacggatgcaaaagttacaaagcaacctattacaagttaacaccaactatccaaagctcaatgttcccaaaacaaaggcctgaattaaaagttatgaaggacattccctactctaatacaatgggatctataatgtatctcatggtgtgcaccaaacctatccttgcacacaccatgagcatactcagtaagtacatggcctaccctggcaaagagcactagttggccatgaaatggacagtaaaatatttactgggaaccactaaggtaggactaaaatacaaaagatgaaataaaacctaggcactgaatgatatattgatccaaattatgttggtgatagcgataacagaagatcaacatttgcatactatcaatgggtgttgtattagctggtaagtccagctccaaccagtagtagccatgtctaccactgaatctgaatatattgcagtttcagaagcaattaaggaagcagtgtggctacagggattgctagaggagatactaaagaagacagagtaagtataatctattcagacaatcagagttgcatacatttatgcaagaaccatgtgttccatgatagaacgaagcatgtagaaataaaataccactatatcaaagataaagtggttcaggaaaaaatctacacatagaagattccaactgaagaaaaccctgttgacataggaactaaaattgttaccctaaacaagttcaagttatgtatgaacttggtgagtgacaccagactagagctaagaccctcagatcaacatacctaaactaatatccattatgtttgaagctcacctagtatgaagacttgggtggaaatttttaaatcaaatctccacagtaggctggccacatcaacacctagacagaagcgatttccaactgaaatcagttacaagaaaaagaagaaagactcgaccctacttcaataaattataacaaacttttagttaataccaaacttgtataaaaatcaaaaagctcagctataaataaaaacatacttgttatagaaaaagtcaagttgaacagatcctagtaagagagagagagagagag

SEQ ID NO: 195085 - DNA, 1804 bp, Cannabis indica
taataaattacaaaaaaaaaaaaactaactaaaaatattattaaaatttataaataatacaaacaaaattgagttaaattaaataaaatatcttacttgaatcaaaattatcatttattcaaaataaacaaaaaatagaaaaataaaaaaagaaaataaattaaaaaaggccaattttcttacatgaataataacagaagaagaaactgaaccaaagaacgatgaagaagacgatgacgacgacgaagtatccaatgccagctccggcagatacccttgtaatccgatgttatacaccggagtaccatcgggatagtacagtccataattcctctccgatgccggaccaggtttcatattctcattaaaaagggcaaaaacgtaaatatccaccggtaccgtcggattcgccggagtaccttgattctgttcgattcttctaagaagattactgttatagacctcagcattttccggtgtagctccagcttcgttttcgtcacctttcgaaggccaaccagtttcggagattctcacttcgactccggagtgtcccaaggctttgatcgcggcgtaaacagcgtcgatctgagcgtacaacatgttatcgtagtggagattcgtatttggatcggtcattccttgatttggacggaagagaacgtaatctaaagatacttcgttagggttatctttgtaagcgaagtaagggtaagcgttgattaagaatggtgatttagtttgtgaatggaaattgaggattggatttaggtattgagctagatctgatctgaataaaccatttgaaggtgggtatgaatttgataaaattgttaatgaatgagctgttgttatgctaaccctagaatttagccccaaattgactaatgtatcgtacattgttttcatcgcagggtacaaagacgacattaattgagtgtcgtttaggttgaagacttcgtttccgactacgattgaggtgatttgtgtttggggtaagtaaggtgagaggtgtgtttggatccattgttgagctttgattgggttattggctatggattggagattttcgttgccgagtccgattgtgaaatctgtttgggtgtttgagaaagctttgagtacgtttggatcggcgtcgtagagtttaactctggttatgtttagtgatcggagaagggttgagactcgtgacggtgatgggaggttgtttgctatttggccgtagtttattccgactccgatgcttgccacgtggattctggaatctgagaaaggaaatgtgagaaaatgtgagaaaattttcagttatgaataacagaaaagtaataagtttgttttatatgaaatgctctgtttggttaatttaatgtgaaatactcatatgtgggaattgggtctgtttggttagtgggaaaaaacagagtaaataagaaacaaagaaaagatagagaaactttctaaattaataagttttgtgatgagatgaagatctgtttggaaaaatgggaagttttggagctgaggaaagaaaaagtgagaaaatttgttagttgattgaacataaagttgaacaacttgaaatgcaatatggggaattggtctgtttggttagtgcgaaaaatacagagtagttattaaataaagaaaagatgagaaatttttcagttatgggaaaacagagcaaagtaataaatttttagttagttttgataaagtttaaactttaaagagaacgtaacgtaaaaaaattcatatatgggaagaggtctgtttggttagtgagaaaattttcagttatgaa

SEQ ID NO: 195086 - DNA, 733 bp, Cannabis indica
acaggattagaagaaatttcaaaagggtgttgtgggactggaactatagagtatggtgattcgtgcaagggtatggacacttgcaaagacccaagcaagtacgtattctgggatgctgttcatcccactgaaaaaatgtataaaatcattgcagataacgccgtcgcagctgctaataagaaccttttcatgaaataactaatatatatataaattcccggctcaatttctgtgcaaattctggacgatattctggaatttgccatttgctatataaatatttatatcatcttttgttgtctatgatcatattctattattttaatgatgttaattctttgttttatcaatggattatagttttcggaatcttctcattttgtttattgataagttctgggcatctccaaagtagcccaaaaagaggtttaaagtggacttactatcaataacaaccaatcaaaagaaattatttctgtgatacaatttaatagtgaatcttatatattttaatttaaaattaatttaaagtcaaatatgttagacaccgcgttggaaatcgttgatatgattttttttgttttcacatttattttatatattattgtgattttaattatctcgaatgatgtgaaatatattttataatgcgcggcaccatgaagataacgtccctactgctcgacttaattagagtaaacatactaaaatatattaagaatgaaattccatt

SEQ ID NO: 195087 - DNA, 1015 bp, Cannabis indica
aaataggtcaatggtaatggattaatacagtcacaatttctttttaaaattttcctttttttaagcagtaggtttccctccctcttcattgcaatgatgtggtatttaccttgattggagtagatatgatatttgttttcttctgtgacagccgtgcttcagtttggtgattcttttgataatttagggatcagtaatattacctctttgtatccaattgtgagatgttctttggctttgtccatttccatggtcatcatcttattgataattaattttatatgttttttcccccttttccccatccattccgttggtggttgtgagcaattaaagctttcacgctagccccagaatttttcatgacatttgtctgcaaatatcactgcagtatcaaagcaagcaggttgaggaggttacctgcacttttcggaatatagaaaacttcaattagttgttccttcagactcactagaggtactttacaaactctggtttgttataataggttaattaatattcatgtccataaatctctctctttcctcctatttctttcttgtaaatataacaattgcagagtttttagttttgttatcttgcaaagaatatgattttggacaatatttcaaaagatgaattgttcttttcgtctcacgctaaatgttttaattgttcattgatagatgtaactgagatgaaaaagttgtggccttgcttaattttcagtttatttattgttaagataacactatgttgaaatgaagagtaaaactagcttgtgtacatttgataatagtgtgctgtttgaatactgtaggattctcgtttctattcatccatgggtgatagaataattgatttgtatggattgttgtcctaattactgtgaatctataccaggcaaattgtgatagcttcaatcccttaaatttaaatcatgatttagccttatatagaagacagaagacagttatcagtttattttgctcgaacttaagattgaaattttaat

SEQ ID NO: 195088 - DNA, 2977 bp, Cannabis indica
ataacaatcttaatagttcaaggagaatttttaacggcaaaaaaattcaagggacatgatttagtacatattatagttcgggaagaaaaattgcttaattttttttttttccttatcaatcattgtagccgttgtgggaagttataacacccatgtgaaaccaaagtcagttcataccaatttgcttactttcacctgtttctgctttgtccttttacatctttatttaaaactatattattgtatctgtgggcttatatatatatatactacttggtcatcactggtcaaaagttcattaatttgtgtctatgtaactaaattaacgatcaggattttgaataaactagttttaaacttaaaaagaggaattacagaaaaatgttcattaaagtaattatattggtatacttgagttgagttgagtttaaggagtggttgaaaaataattgtaactttgaatataagagatacaattattaattgagagaataattaaaatattcttagacagtttgataattaagctggtggataacagcttttagatgggccacacattaaataagtcaatcacagcccttaacgtttgaccatctaatatggtaattcaagctaaaacaccaactccacacaaattattattaagaataattacataaaatactattgtaaaatatttacatttttatcttcaaagaatatttttttatatttttacggttttccaaaaaataagataaaatcaacaagaaaacaacataaaagtaacatgaaaataacaacagaaaaacaacaaaaaataacatacatataacaaaaattaacaacaaatgaacaaaatttaaacataaaaagaccgtattttatgtaaataaaatcaaaaaaatcgtaaaatatttaaaatttcgtaaaaccgtatttttgttattttttttttttgttgtttttgtgcatttgtgaaattatcccttattattattggttatttatgtgaagaataaatagagactggatttcgtcaaaccccaataacatgataattttttaattgggttacggtcgacttgtgtgatacgaaattaaaatatatcgacccatttatattcagtatatcaataaattattaatttataattaaagtataattatatttcataaaatacacaaatctaaagttaaataaaaaaaaaaaattagcttacatgaatatagcataacttattcataattttaaaatttttgttcactatattgatattttctgttgaataacttaatcatcaatttttgatttaaaatttaatgtattattcaagtcaaataaattaatacatttaaaaaatatatgagatactaattacgtcgatcaattgatagtgtaggataaatctagtcgacacttgaacacgatgagttgacaagtgaacacaaaggatcaacttaccactacaaagttttagcatcggtttgaataggtgcaaacaattttgagctgaactgattgagctataacatcgatgaacaaccgacgctaaccttgaacaagggcataggttaagagaccaacacgagtagacaaaaatgatgctacacaactttcgtgttgcttatcaacaactttcatgttgctattgagggattagtgttggtgtttataacgacagtgattcaatgacaccaatccaaaccactatatctacaatgagttcacactcgacacttcactttcattagagaaaaccctcaactgtttgtgaattgtcttgtgatttcactatcgttatcttcttttttatgtttttcagtcatggatagtctatttcgccaggctagttgttgtttatagttttattatctaaatttttaaggaacattttaatcaattgttgatttacatcttttcttcgcagttcttgatttggatgagcatgtcctttggctaaacaattagttatcttttgacaattgttgatgtctacatcatgaacgtcatgaattttaaagtgattctaaacacttttgcaaaaataaataaataaataaaaaaatttggagtgatcatggagacacatttttggggttttttttttaattataatatcatttataaaatttaaattaactgtgagtttacagttttttcaatatttttcccaaaataagtattgttattttttacgttgtttatagcaacattatactatattgtttatacattattattcatgttgctttatatttatattatattgttcaacgtgttgtttttatgtttttttttcatagagctccataaaaatgataataaaaaacgtaaatttgtgaaaataaaatatcatttcagtcccctttgtgtaaaaatactttagaataatttctaatgatagtattcttaaaggatgctaaaaatttacacatcatctcaaaatataatattttattttatttctcttctacatcatttttgagactcttacttctaaaaatacttcaatgtatatcactctttaaaaatgatataattataatctcacacattattatttaatatatatcctaatttttagctacaataactttttagcttcaattttttattaaaaaataataaataacattgatactacaacatagcattcatgcaaatttctagaatgacatctctttcttcccaatagtatagcatctcaatattttagcacataatatgtctacttcaccaaacatcctctaaagttttactattagagatgctctaaaaaacccatgatgaaatggacattaaaaaaaattaaaaagagagcgagagtccaaatctaatattaaattgagatatagaactattttattgaaaaatttacataccataggaaaaaaatttaaaaaaaattacaaaaatacattaatacagaaaaaatttatttttgcgctttgaacttttttattataaaatacctctcttcagtaaaacaat

SEQ ID NO: 195089 - DNA, 823 bp, Cannabis indica
gtaaagggtcattttggggtcatgaggtaaaaatttaattataagtttactttgtgcttgatatcttgatttatgttgtacataactgacatttattcatcttatatgtctaccatggctgaactggacacactacacttgcagtggggtaatcctcttaatctatttctattttttccatatgttttactagaatttcattgtgtgtgcatcttttgtctagagtcagggcttgtaactaattggttttgagatgagacccctgtatcttacaattataacatggtattagagtcaaactaaactccaatttgtatccgatccaaatccaaaaactggtcaaaaaaaatcacttgtgattcggcaatagggagccaaaaagaaatatagccaccatcttgaggggatgttagagagtctcatatccacaatgtgtggaaactaaataccacgcataggatacatgagctactcctctcatagcgaattagttttgagatgggacgccatgcatcttacaattataacatctccaatagtttcttttttcttcccttttcctatttgtttggtgagacaaattgaagtgcattagattttgggtgccattgctacaagaaatgattatgcactttgagtcattggtttgatgaatgtctgatatgtttgtacctttttccttcttgttccagatgtgtataatattttatacctttataaaccaatggtcttgctagttactttctttgctctacctgtaaacttgtgtgcttcctatcattattttttgaaaaagagagaagatccttttgtcattgacagg

SEQ ID NO: 195090 - DNA, 831 bp, Cannabis indica
tgttatgtgatcatgtgaaatgttttaatgaacaatttgattttgtgcgcataaataccttatcattattaatcaacaaactatatatttaaatatatgtgtaaattcatgcagatcaatctctgaaacttaggtatgaatgatatatatgattatgattatgtattttttgtggactcaatttataattaaaaaaaatatatataaaaatatatatatgaactttctattatttgtgattggttataaataacatattgttagtgtactatacttttcattatttggttactttctcttttgaattatttattttattttattttattttttttgttttattcatatccttttggttttatgcatggggacctaagttatggcataccatagattggatatataagaaggcactttaaggacattattttaccttttaagctttgactcaaacttttttttcaaaaagaaagaaaaaatgatctttatgtttgtttgtttgatatactttttatttttatttattatataagatattcaaatgcacaaaatgctttctacaagatattgaaatgagcataaaaatatataaatagatagaagagaaatgttaaagggtacttatggtatatagtatttttatgaagtgtaacattattattagtgtaatttaatattgaatccaatactaaaaggtactactagtgtctagcaccctcttagatgtcatatcgttgttggtagacttaagtaccgagtcttatataatttaatctatgaaatttttgaaatgaccataaaaatatataaaaagatagatatgacccgtct

SEQ ID NO: 195091 - DNA, 1514 bp, Cannabis indica
ttattatatttttaaattccaataccattcatcacgtttatttatttatttattttattattatatgattaattaatttttgttacttgtgtgtattttgtttgttcacgtatcatcactcagcaataattattgtttcaactataatatttcacctaatcagtaatcacaatcgcattacgaagcacaacagtacaatagaagcataagtgtactatattagatttataaatacttaagagaagaccataaatttatagtctttccttccaaaaaaaaaaaaaaaaacaaattacattttctttattgttctctttctatcctcctctcattctgaggtatgtttctccacaaaaattttgtattagtaaacgtaatctggaatttagatttttgtcatttcaattctttttctttggttaatgcttgcatgtttctcagaatctgaaagaaagttctgttattctgaatcttttgaacccataaaatttatcttagtatttacatataaaggctatcttcttttttactagaataaagagaaggaaggcgaaaaacaggatttggctgtaataattgcaagtatttttccgattaaggtgagaatggaggccctagtaccacaaacggtacaatttaccaactggatttactccgacaagtttacgaatagaccaggcaggtcgttccctgtttctcagacactgaaggaccggaaaaggtttccggtgcttgtttcagctcgatttccggctaacggagcttcgaatcggcgtagaaatgtggatatggaagtttcatgctcttacaagagcgttccaggtagtttacaagtcattctttctctctgttggctatgaaatcctttaatttgtgacagatttgatttcagttttgttttccctaatttattttctacatatacttattttggatgcttccaaaccaaatcgttcaaattgcgtgaaataatgatttgaatttttattttcacggtgctgttatagggaatagcatgtaaagaatatgaataagaaaaatacttttcttatttttgttcttgttacaatccactaggtttagcaaagatgaacatagtttcgtcaactgtggggtcaacctgtcataatggagattgtccatccttatcgtcattctgcaacctatgcagtgtcttgtttttgtcataaacagctcctttcaacacctgatgtagattggttgtttatttctgaatataatattatcatattgaataattaggcgtagttaatagtcatacttgagacttcatactggaaaaggctaataggtttaaataagcttttaggaatccgtgaaattagggggatttaccacccgacccttcttattgttaagttgggtctcctttgtgtttgagaccatctgttttgcaagtaatattttataatcttcccactctctccttcctctttctgttacttgttttgtcagtaatttttctgaggctacttgggtgtcctctccatgtg

SEQ ID NO: 195092 - DNA, 2594 bp, Cannabis indica
atacattttttcgttctcatcttagttcgtatcttcagcatcaactttttgttcacagtattacaatttatccttttagtgaaactataaagtgaccctcacttttgtgcgagtcactaaataattaagaatgatttttagttacccacataattagactttaaacttatggtgttagtctctcatattgtggatcactaaaaatatgaagggtcaccaaaaagtgttacccataattttctaattcttttatttattaaaaaaactgactaatagagtcacattaggagtaactggggaagcttgtcccgggatgcctcacgcgctactatataggtatttttaataaaaaaaaaatataaaaattaaaaattaaaaagacacggtaatagtttctctctctttctcaatggatcttatcaatttttttatatattttttattaaaaaaattattttggataacaggttcaaaaccctaataatagtttccctctctcatttctcaatatcgtctctttcagatatttttttctctcatctcttctctcttctcgcattggtctccaaaacctgccctcctccctttgagatctatagtataccaaccatcctccattgaagacggcaacctccaaaggccaaggtgagctccactgactgacgatggacacttctaaactttgagcccattgtttacctaataagacttcaaaatagagtttgatccctacgctgtctccttcttctctaccaccgtagaaccacggttgatgtctctgccaccaaaaccccaactaagttcacccaaatttttggcttactcagtattatttttttttacaatctgaatatttgtgtctccctctctctagctatgtgtctttgatctatgcagttggacgacgtttatatataggtggtcgtgggtttcacctttaatgttgtttgtgattctgggtacatgatcggcgttcatgttcgaagggcttggggtacgagcttggtgtttgattttcgtggttggcagtgtggggaactttgagttcgaacttggacagactttgaatctaaattttttcttaggtttattttgttacaagagtacactgtgtaatactttgaaactgaattgagtttatttcattctaaatgaataatggataaataacgtaatctgggttttcttttatttgtgtctttcaatgttttaataatagaaactgatatgagtttgtattaaacctcatataatgtgtaattttaatttaaagttgagtgtaaagattgtattccattttcattaataatcttaataaaaataaatattttaattaataaaaatattttctattttgtcattttgttttttagttttataattttagttgaaaatgaaaatataattttttaaaaaataaaaataaaaataaatatagtgacacactatgagggtggttattatctttttattataatcaagttggactctaaaagtttgcagtgacgcgcatcgagagactgtaaaaagttttagtgacctcgttgaagcatcactaaatatcacatttccagtctctcgcattagtgacccgcaatgaagggttactaaaaatatttagagtcccttaaaatgggtcactgaaacctatttttctagaagtgtcatgaagttcccacaaacaatgccaactgttgatgctgaaaattggctcaagcacaatttgttattgagactttgaatcgtttacaccaggtttgatctattcaaattacattctcaatcggtttacacaatttttctcttaactctcttaatcgggtttgggtcacttgctttcggagtttagatatgaatttgagggtgtattttgacaaaatatcaactagtttggtgtgatccgaaatctgtctatttttcgagtgaagggatcttctatttataggcgggaatgaatgtctgcttcattcttcttttctgttctgattccttcatgtgcgctaattctcatctgctgctcattgcacctcctcttttcgtcctttgaatctattaattgcgtctttcttttccttattgaattgttctctgcatctcttcttattaagaactctgctcttttgtcttcgagtttcttgctttgcttctttctttagtgaaacagtgcatttatcgtctatgatattataacatcaactcttttttcttatttctatttcttgaaattacttttttacttttaggattatttttatctcttacactatataacataaaattttattcagactatttttaaactttaattattcatacccttattccagccctttgtacgtacttgttcaatacataaaataattcaaaacaattttgatggatttggaaaggtttattgttgtgtaatttatattctcaaccttaggtctccattttatggtcttacatatgaaagagaatataatataagatttgaaaccttataaaaagttcttatcaacaacttatttttaacacatggatgcaatatcatttgttctttttcttccgattttggactaattaagaaatggagccaaatcgtctgtcccttt

SEQ ID NO: 195093 - DNA, 2948 bp, Cannabis indica
attagcaaatcgtttaacataataaacttaaacatgaacaatagaattaagttttgacaaagtgaaatattagaacaaaaaacagacgacatgtcaacattgctcgcaattgcttggatcaccacaagtgagtctatttcaacaacagtattcttccattctttctttttgatctaactcagtgcctccttaacaccgataacctccgccaaacatagttgaacacaaccagttttgaacaaacaaaaagcctcaatcaaacgaccatcatctcctcgagcaaggcaacctacaccaaaagcttgacttgcagcaaataaagctctgtctacgttcacctagatagtacctatttttggtgcaatccaatgctcgactctactgttaaaactcgaaggaatcaatagcgactcaaaacgatgagaacgagcatatctccatcgatcaaggactcaatgagcagagacaacaacatcgacaatattatgagcttttttgttccataatatcattcttggtattccaaatggaccaagaaactattaacgcttcttcaaacatagcagagtggccacgactcaacacctccagcaaccaatcactaaactcttgaatagacacatttccaaaatcaacaccttattctagtaggaatggacaaaagggcaagaaactaggacatgaaagatcaattcctcctccttaagaaagaaaacacagttcagctccactggcacatgcttagaaaaaagctgcgttcaagttggtagagaactagtaatgactttccaagcaaaatgagtgactttaggtggaactttggctttccacaacctatgccacaggtctgactccatatcagcagactagcttcctttggaggcttgcaacctctggtagtttctcttcactttataaatccccgagtttttatgtaaccagaaccacttgtcttccaaagtagaagaattaagaggaatacttaggataagatcacaatctttagcttcaaatatattattttacaactttcgaatctcattgagaaccatccaaaattattagttgattaacatttttctcaacaagactttgatgagaagtaatgataaaagggttatgtatatcaagaagccaaggaaaattaatgatagggacattcataccagcaccaatacgaatatgggcttctactgaaataatgtcttgagtttcgaaaatgcttctccatataaagctaggattttggctcaacacaattgagtgaaagttcccatggggatagtacctggctttgtaaatacgacctacaagggatgactcatgaagcagcaaccaccaagcttgtttacccaaatagatggctttgtaaatacgacctacaaggggtgactttgtaaattataatcatgaagatttctaaaactaacaccacctgagcttttgtgtttacacagacgattccagctcatccaactagttcctctagattttttagagttaccccacaaatacttagacataagcctttcttattcactgcaagtctccaaagaaataagaaaaacagacatcgcatagctaggaagagcttgagcaactattttaatcaacacttctcgatttgcctttgggagaaatttgccttcccaactcaaaattattttctccattttctccttaagaaagcctaaaatatctttctttttatggccaattgtacaaggtaattcaaaataaaaattcttctcatctgcaacaaccatacctaaaacatgtacagagcctcacacacatatcagcaggggtattggagctaaaaaagactaatgattttgtgaaattcacccgctgactagaagcttgctcaaacatatgaagtagcaggagtacattatcatcgtcttcctcagtagcacaacaatacacataactgtcgttagcaaaaaaagcatgtgagaaatagtagggactcattggaaactttacatcacgttagctcaccattcctttcaaactacttaattaaagatgagaatccctcagcacaaaggagggaaaggtagagagataaaggatctctttgttgtatgcctctaccaagaataataggacccaagctcctacctccatgcacaaccttatacttaaacggtagtcaacgtaagatctacccaacgagaatgaaatcccatactgagcatcatagccttgagacaccccattttatacgatcataggctttacttaaatcaagctttaaggccataaaacctatcttaccctttcgctcacgtttaagataatgcatgacctcaaacactaccataatattatataaaattaaacgtccagggataaaattagattgattctcagaaataacactaggtaaaactaacgtcaagcaattagcaagcacttttgaaatcactttatacagcacattgcacaacgaaataggacgcaatcacttatttatagtattaataggctaattaagatttttgtctcccgaactttgacatgtaccaaatcatgccccctaaacttttaaggtcgttaaaaatgctccctgaattattgagattgttggatttaagaacttttgtccaattttagtaagaaaagtctaacatgaatgaaagttaaggaatcatgatttagtacgtgtcaaagttcgagggacatgatttggtagatatcaaagtcttgggagcatggtttagtacataaaaaatcactgaaatagtaaaattgaatgaaattagacaaaagtccttaaatctaacaatctcaatagttcaggagtaatttttaatagccagaaaagttcaaggggcatgatttggtacatgttaaagtttagggataaaaatcctaattagcctatttaatattttaatgggtaatttttatttttatgagttttgtggtaaaagtttaca

SEQ ID NO: 195094 - DNA, 1249 bp, Cannabis indica
aagaaaaagaaaaagaaaacccactccaaagattagatttttaagcaaatcccagatagaaatttcggttcttttgctccctaagaaatttgtgataaattttttgatatgggttttattcaattatgcaaaaaataaaggatattttgtttttgggtgtggtagatttgagaaccttgggtttataaaccactgatgtccacacaaactagtggcttgggttttagtcacagtattttcaacaaaacgtatattatttgttaagcctaattacttatggtcccaaaaatttgggagtagaaagatgagatctgaatgtgaatttttagtggatgttatttccttacatggggtccattcataaccctttttttaaccgttgatcatggtgagaaatgatcttggcctttcattttagacacaccagtattgaatattttctggtgtagaaaacaaatatgtggcaaaatttgaataaaactgaaatgaacggtgccaaataaggttagtacttttcatggtattgacctggaatgttcacaaccaaacacttgtttaaaaaattgaaccttttgatttactatcaaagctgccacgtgaacaatttttgtgctcgaaagggaacaatattttcagagttttaggcataaatcaaagttctaagaaatagtttatagccaatatgttttttatgtgaaacacaatttaattataccaattttctgtagaatgtactagattttttttttcaatgatttattttatatagacatacaatagctctaaaagtacgtataaattagtgctatagaaacaaattatttaaataaataacgaaaaatgaaatattattatttattataaaactaaatgataggaacttctctaaaaataagcgtatgccattatagacgaagaacacgcggtattctttagtaaaaggcgaaagaatagttcgcaatgtgctcaccgcatgcatggctgcgttgtaataactgggttagatttttgttcttatagcctcatcttgcttaacttgtgtgttcagcgtttgatgtggggtttttgttaacaaacatgataaactatactagagtaacctaaatagctatttgctttctattagctttttacaagtaattttttagttgtatataattagtttggtgatatttttgattcatcttttctgtaaactaaaataaaactgactaatatgaatttgctattcggaacatgtatttttttt

SEQ ID NO: 195095 - DNA, 3212 bp, Cannabis indica
acaactaacgacaataactgtcattaacagtacagaacatatacccttaacaatcagtaatgacacaaacgacactacaaattctgtttataataataataatcataataagaagagcaaaagggttttcaattattagctttctggatgaacaagtggtccagtgcagacaacaagctgagacgactcttcaacaatcatcataaacataaatggatgattggtttcaacggtaggcagcggaggaggcttattaagaggtctcctactggctgtttcttgtctctttgatattcgagtttgagagccttgaaacgatcgttggaggagtaggagtggtaaacatgatgagcattcatgaaaggtagtcgggttgtttttccgttgagaaggtaaaactcatgctctatagtgttggaggccttgaaataaacttgccatgctcctttgaaatataatgcatttgcaacacagagtagtgttcctaatctttctctctcgcacaaaatttgtttgatcaacctttagtctctttttccacccacaaattcacatctttcttaacttgatcaccctataattatacataacaaacaacattttcggattaaaagattatgatcagcggcgaagtcagaaataaaatttaagtggaataattatctatttttataataaaatgttaaatagcatttatggtgcctagcgccctttataaagtgtcataagctataaggcgtttgcaacggaaaagagaggctttggagttggctttgggaatcaagaaactccaagagctgctccaatgtgttggcaccatattatattaatcatcatgttttgtttatacaaaatgattaattaatattttaaaaattagaaaccaattagttttttttttatttaaatgaaatttgtattagtttgatacacacagtagtcaactttcttttacaagtactcaaaaaaaaaagatagtcattttatttttttactaccatttgaaaatacttttacatatatagaagatttgctaattaaaatagtttcccgtttgatatacatattaatattaatcagagtaaacaaaaggtacgtagataagaacagaataaatactattagagatatgagatttccataaattatttaatttaaatcatatatggatcagtggtgtgagtgatacctgataaaatttgcactgttgaagccagcatacaattcatcaatggattttagaaagaaagttttggcttcgatcatcatcaactctgcacatgcactcagttagaaaactgaaaataatgaatttgatcattgatgattagtgtgaccataaataaaagtgattttaatgtacccttattgtttacaaattacctaaacataccatttaattgataattttaatcatacgaacactcgtgggatgtgttgaattttagaccaatcttctcctttctctttctcacaccgttgctctaccaaaggacaatggtctatatctaaacgagtaagagatgtaggcagcccttcttctggcaaacaccgcagccttggacaattataaatatccaatgtctgaagggatgtgagttgttgaaaggccttcccgtttagggtctcaaggttgctacaaaaactgatgtcaagttcctcaagagtgataggaaggaccccttcctcaggaaacgattcatcttcccacccaatgatgtatagggatttcaaacatgagagtttctgcagatcccatttactaaggttctcaaaaagtgcttctgtgtaccctaaccaaatactctctacttcggagtgtgatccccaatctagaagtgactccaacactggacaataccatatatgtatctccataagaaagggtgaagctgtgacagtctgttgagtagttctcggaaccaaaacctccatttcttcacaattctcaatatggagatactccaaggatggaagataacaaggtaacccaacattaagcttgggacaattattcacataaagcgattttagaagaggtaatacttgaccttcctcaagaatggctttattaccaaatgaccattctttccacatcaacatatcttgaataaataaactttctaaacaaatgaatagaggataactgctgtgatgcatctcagaatcacctattgacagcacactatcacatcctttaattgtgagatctttcagagaaggtagtcgtccgagtggtggcaaaaaccagcagcttttacaatctttcaaacagattgatactaaattagaaaatgcacaatcactaatccagttcgagaatgttgtgcctctatagtttataatcacaagatcctccatgtttgtatggggtcgaagtgcgtcaagtacatctaattcttcttccgaactatcaaccccatcaacatcattgtcccaactcaaagttagttgcttaaggtccttcttaccctttaaattagcttttgaagcctccttcgcatcattaatattttccagaccagaaatcttaagctctccacgtagatgttcagcatttgctaactctgtaattttaaacccatcatcattatgcttgacactcaataatacctttggtaagatttgcaagtatttcatctcatcgattccttgtggcagctcattcaaaggtacacctttaatatctaagtaacgcaacttggtcaattttctcatactctttggtaattgagaaaggtttccacaccatgtcaacaataaagtttgtaaattgaacaaactacaaatcgaatcagataactcttcaatgtcagtataagacaaatccaaataccttaaatgtatcagattgccaattgaatcaggtaacttctcgaaagaagtattgctcaaagaaagcactcttaaacaacttccctttgtaagcaacatctcaaagaggaccgagtagtttggagagacttgtccaagtggtgtccgcaatgacaatgctataaaggtacgcagacaacaagctttactcaaactagtaaggttgttattgctcccctgacatgacacatgacgaacatttgttgaaaagccaagtaaatcacggctcaagtctaatctgtaacaaaagtcacctgatacaagtatggctaaatcatgtacgaggtcatgcatttggagacggggtccattcgtcttactacttgaatgttgaaaga

SEQ ID NO: 195096 - DNA, 1348 bp, Cannabis indica
aatggcagaatttgagtttttcgccctctatcaaaaagccatccaaaatatttgagcaattctttcttcaatatctagttacacatagcaaattgctcctcttcatgaacttcattaatctcataaattttgtgcgaggaaggaagagggagaagttcatccaagtctgccacttagtttcctctatcaaaatcaattccttcccaacttcttgtatgtatttgttgtctttctcgctcaaaaaccaatctaagaacaaccatattaccttttggaacccaacacgacgaggagaaataagagagaagaatttctcagagatagtcagacccagagagcctcctccatttttccagcaagcccagagcaacgaagaacacgagaaataattcccatggagaacaagctagaaagctcgacttggattcctaacgagtttggaacccattaattccttggggtcgacaaatggggagactcgagaaattcagtgttgttgttccccattggctgcaccacagtggttgccacctccacacgcaacatcagagacaggacacacaagcttgggtccttgcgaccatggtgattgaagttggtgaggggggctattgtagaaggtatcccttcgcatgaccaggagatgaaaataaattctgaaattggaattgatatacctgattagtgtgttgggccttacttgagtcccaacaagtcagcccattaacttgaattagggattgacattctcttatattcgaaacaaacataatgggttctttgtacttgtttatatgggttctttgatgcaagagagacttctcaatacattgcgtacctcatttcttccctcacttacttatatatagaacctattctcactcacaaacccaccctaaaatacaatgactcaaatgcccgcctaacaaattgttttgaggctctacgaatgagttttactatcaatttaatagacaactgcctacatctgttgttagaaagtgctcatttatattttttttagaaatcacggcaaatgattatttatatatttgtttacaggttttacaagaagtattaagccgctactcaattcgtgaagatttgtttggcaaagtttgcatcattatagacaaagtaagttgaacaaattttagcagaatttaatctggtactcttttatcagggttatcgtgttgtgttgagttgatgttttgttgtagcttctatttgaatgaataaccattcatgcctctcttgagtttaattttttcaatttgatgttttaattctttctgatctctttgcgtattggtgttcactatcagattgagaaaattccactcaa

SEQ ID NO: 195097 - DNA, 999 bp, Cannabis indica
ttttatttatttttcatttttctttgttcttcttcttgtcgatgcctagaaatcaccacaaaaaggcaacccaaaacctagcacctgaccctcaccgagctcgaaacccaggttctccgttcaccccctcggtcagtcttctccatttactacacaagctccgatcgttcacattctttgtgcttcatcccaagtggtcatccctgagcttaacacccattgtacccacaagcatgcttgctccgttcaagaccccaaacacatcgccaccagggccagccctaggcataggcgggctaggcccgtgcctagggcccacacttttcgggggcccaaaataaaaaatttaaaaaaaaatattaggcttttatttaagtaaaatttaagtgtattataagcaacaaatatttatagcttagttggttgaggtggatggcataatgttcaaggtcatgggtttaaatcccataacactcttcttttagtttttttttatatatatatttttgagggcccaaaaatttaattcgtcttgggcccatatattttcaggtcggccctgatcgccacccttcgattgaaacctaggagccctttgagaacctactacgcccatcccacccaaagcatagtgccattgctgcccaaaatctacgttcaaatctcgtcattgttgttagccccgcctctcattgtcgacgagatctaaacaaatcagacacttttctctctcctatgagatttggtcgtcgtctgtaactagccccattgtcgaagtatcacccccacactggtttcgctgacattttcgaagtctaacgagccaacctcaagttttggattctggatcaatggcagtgggaggcagagaaagagagaagatgatgaataaatagcttgcaaaaaaagtgatagtcggttaagtatggtttccatgggccatgggtttgcttgtgactgtcgaagaagaagaataacaaacgagagagagagagagag

SEQ ID NO: 195098 - DNA, 1079 bp, Cannabis indica
tttctgttttctgattggctaatttgattaaaaaattaataaaattatcatgtggggtgaagcaggcaacattagtattgtctagctcttagtactcttaccttcgtggaaagtcaaattatcgttgcttctcaaaaatcgtattacttaacgcaaatgatatctttcacaattacaccatcaaatctcaatataatttaatgcatatggaaaattagggctagcaattcttgttatcggatatcgtattcgtgtcgacatgtttatgacacgaaatttttataataaatacaaacatgacacgattttttaacaggtcgtacgatattatacgatacgataatacgtttaataaacgtgtcatgacacaaacccgaaattaacttgtttaacatgcaattaaacatgttatgacatgactcaaatttgacacgattaatataattatgaacataaacataaatattactaataaaattcatagttttaatttattattattattttataaagaaaatgagaagaaacatgtttttatgagggtttttaatagagcttttatttcattttacatgatataaaaatgaaaaatacttatgtatgcttaattgcttacacgtgttataattgtattatttttgagttaagcgtgttgatccaaaaatggcacatttaataaacgtgttaaacatgtcaacccatatttgacacggaagttaaatgtgtcacccaaactaatttattttgtatcgtttttgagttgtgtcatcgttttgtgtcacaaatttctagcccaatggaaaataatgctttgcaattgaatttgattaaaaaatataaacaagatttgtgagataactttttactaggatgtccaagttgatgtaagtttttattacactttcaaatgagtataaccttaaatttccttgaaaaaaacccttaaatttaatgtatgtagaacccaaaatttgactatttaactatgagtcttcgtttgacctcaaatagacagatattgaattttattatttctacaccccaaatttaagttatacactttcctaacgtgtagatct

SEQ ID NO: 195099 - DNA, 2566 bp, Cannabis indica
aatccaattaagatgatatttttattatatatatttatatatcatataatttatatgactatttaaaaaatataaaaattaaaatttaatatattttttattagtggttgatttaaattttaaattcagtctatatatttactttattatcataattaattaaaatataacaattgtaaaaataaaaaaaaattgtgatacacgcgaacaaaccgactaattttattgagcgagttactatttttttttctttaattaggttggttgcacttagatttttgtaactcaatttttatattaagttgaataaatgtaccataatctgacaaaatcgaccgacgtaccaacctaaatccaataatataattgtttttaaaagcttcttgttattttgtagatcgaatagaggtctatttctacatagttacaatcttgtattttgtaaattaattaaatttcaatatgtatattttttaataattatattaaaaaaattaaaataagtgtgttctattctacattatttaatgcataatgatttagaagatttatattatattagtagtcatataattgaattttaataattgagtaaatatattatttaatgtgattaaatttatataaaaagaatacatatttaattataattttttttaattaattaatatatacttagtgataaaaatagatcatacatattttaatttaacaaataattttaaaaaattattaattaattagagctaaaaaagaaggaaaacttgaaaagcagttacgtcaataaagccaaaaaaagtaaaaagcaacacgccgtttcaaacaggtttagttaaataataaattaattaaataatgattaaatctgaatagggtaatattgtgtgcaatactaaagcttctagaaggttgaattgaatgaagttggatcttatcataacaagcactactagcaagtagtaatgtaatactacaccactctctctccatctctactttttacatttttgtttcgtaatggggtcccctccctaatccctatatatgtttcccaccacaacccaatctcttctcatatatcaaaaattgcttctagaatatcataccctcttctctttccctctctctttttcttttccaggttttctggccaaacttagccctatttagtatttatacacacctttcactcttttcaatttcattcaaatccttaatcaatcatggaaatcattcctgggcttccagatgatatagcccgtgagtgtttgattagagctaaacatcaagattttcccacaatagcttccacatgccgagcttggatggcccagattcaacacccggagtttttccaaacaaggaaggccgtcggattaagccagaatctaatcgttatggctcaagctcgggtccaacccggacgcgaatcgggttctgcatctaagtatttggctactcccacttataggcttacggttttttgaaccggagacgggtctttggtcggagttgaaacctgggttcgggttaaccgaaggtcttcctctgttttgccagctggttcgggtcggatcggatgttgttataatgggcgggtgggatccgaggacttggactgcttctaccgctgtgtatatttacgattttgtccaggctcagtggcgacgtggcactgacatgccaggtgtaccgagatcgttctttggttgcgtggcttctgaatccatggtcttcgttgcgggtggacacgatgatcagaaaaatgcgttgaaatcagcgatggcgtatgacgtggcgaaagatgagtggttgttgatgcctgacatggcaagagagcgtgacgagtgcaaaggagtgttccaccatggcaaagtccacgtcatcggagggtaccgaaccgagatgcaagggcaatttgagagcagtgctgaagtttttgatgtttccacgtggaagtgggacccaatctgcgaagacttcttggaagccagctcatgccccaggacatgtgtctcgggtggtaacaacggactcttgtacatgtgtcgtactggtgaggtggcggcgttagagaacgacacgtggaaagtgattggcagtttgcctaatgagatgcgagaaatcgcttatgtggttacctggcaagataagctactggtgattggctccccgagtttcggtgagccccacattgcttacgtgtttgacacgaagaattacacgtggacaaaaacagctgtgcccgaagaatactcgactcatgttcaatcagggtgttgtttagagctttaaagaataaaaaaagaaaaagaaaatggtttttagaatgtaacatgtttttagttgttgacatttgaagtttgtgagttttttttttcttttcttttttatgtgtacatacgaagaattttgttttgaacttgaataatagttgttcaatttttagctttcaaaaaaagcatttaattcaactataaattaatacttctcgatcttgagtacataaaacatttatttgtttctaatttggtaactattactaatgacttttggtggtagtgaa

SEQ ID NO: 195100 - DNA, 2167 bp, Cannabis indica
ctctctctctctctctctctctctctctctctctctctctctctctctctctctctctctctctctctctctttctctttctctctttttttcctcagacaaataaataataatacaaatgacacatcagcaatcagcagtgaatattataaatgacagctcagcactaagtatcatataaatagggtaatagagtgtaatatgtcataacggctcctcagatatttttgttcagctctgtaagaaaaacacacgagaaaaagagtgatcaaattcaaacaacccttgcaccaaagaaataaaaatgaagagaaaaattgctattgagaaaatcgacgataagcaaagaagattggtttccttttctaagaggaaatccggtctcttcaataaggccaaacaactttctcacctcactggcgctcaaatcgccgttatcatcttgtccgagaccggtcgtccctacgttcaagcctcccccactccctcttccttcgagtctctcatagctcccttcgtctcatcgtctccctcgacttccactaccgaaaccactcatgagatgacctcgtcgacgacggagacggagacttcgacgactcaaggtgatcaagacgtgttcaaccttaacgattcgttgagatatttactggagttcgacgttgagaactgcaacgacttgaaagagcttgaggcgctgaagaagaaactagaagaaacgagaaaaaggactgccgtggccttggatttgtcagttgccgaatatcttctttctgactagtactgatgatgagaaagaacttcatcagtattcttatcaacttctggtattattattctctattaattgctatgatcagattagggtttctttttttttttttgaggaagggtttatttgtttttaattagttatataactacggtaattttcatatacatataattaggtcattgtaataatatcttccttggtcaattgtaattgttgatcattcattccaatatatataagcagtagagattttaatttcagtgtattctgtgcaattatatatatatactaattgtttttcagatattttttacttaaaaattggacaaaacttagtggtttataggtttattgtagataagaaatttattaataattcaaaactagtgaggagagggaaaccgaatactataacctaattaattaatatattcaaaactagaaacttaagtgtgtaaagaaaattagtgttgaatttaaggaagagagtgacgatgacatgggtttcagtctgtttaattaggagctcctttaactttgctatatttttagttttttttttgggggttattacctttttatcttctgttttgggagttttatcttttattcgtaacaatatatgaactgttcagggtcttgttaatttgaacatctttagttcttcaggttatcctatatataaagcttcgatcttggcatatattatctcttttggagtcagttttggcttcatattatttaattaaatttgagcattttgctctaattaatggattctaaatatctctactagactgagactagtccactatatatatatatatatatatatattgctctaatcaattctaaatatctcatataatcatatttatttgatgacgcatcatctatttattacctgacatacattaaatcaatactaacagaatgttaacaatgatattctttatctctcctcaattaatattaatactctctctactagctaatactaattataatattacttcgtattgttaattaataatttttattgttagattagtttgagataatgaatcatgatcttattgaaattgttcaaatcaaggtattgaatgtaatcatgactatatatatatatgtatttattacattaatagtagtactcatatatgatcattaattagtttattcatgggaaaaaaaaagctatctcatttatagttattaattgtatataaaggatgattcccaatcacagaacatatacatatattttttttattattttttaaaagaaattcatttccaatgagaaaattattcaaggaaatgtaagtccagagcggcaagggcctcattccataattagaatgataacgagagagactatgatctctaaaa

SEQ ID NO: 195101 - DNA, 1160 bp, Cannabis indica
aatcaatatagattttgaatgaatagtcttacctcttttttccattactgtcaagaagaattaaaccattcttttcccaagtgcgaatcacttcactttgggtatagtacagacggccagatggatcatagtaatactgcttttcaatttcaattttaaagaatgagtatcattattatgaattaataaaaatacaatataattacatttgcaaatgatagtaaaagctaataatatatgaacttatgagtagaaatagagaaatatttcactattaatatctatgaatcatactttgtaaaataaataaagtttcatttcattaaggataattattttgtggctccttgtgttgtttgtctaataatttaaatttatataattaatatgtactacttaccctgtaaactttgccagagaccatgtggcgctcttcagcaatccatcctggaagaagccacccgtaaccttgacacgagttgtcatggatggtagacattgtcccaggcttctttggcctacggcggcgccgctgtgaaagtgtataggcagctgatgactggttaatcacttgacccaaaaaataatagtcattgtgatagtcatagtcttgagccattatttggtttgtagcaatcctctaacttgttttgaatggaagaatactatgcatatacatgtatatatacacataaatgtagtctcatgtgtaacgtatattttttgtttattctttctaagtgatattacttagggctatccctaaaatatatgggtatatttggagagtggaaataggaatgtaaaaccaaatttatatttggtatggttttagtagaaggtttatgtttatgtgagttccatctttaagtttatttatttttgtttttggtaatctaatttttttgttaaaaacttagtttcaaccttctcaattaaaatctaccaagtaaaatttcttacacaaaatactataatttgccaagaaaattaaaaaaaaaaatgtttaaggatcaaattgacaaaatttatacatttttttttaggaatctgcgcctaaagaaattgaggacaatttatggaagaaagaaattaggtgtacaactacaaaaactcaaagtcaaatagtcaatctcctttttaagaaaaaaaaaaaacta

SEQ ID NO: 195102 - DNA, 834 bp, Cannabis indica
acatgtccaattagacaatatcttccactagccgaaacaacttcaaatgcttgaatatgtgccaatgcaacatctctaacatcaacaaatctatagattctgttgggaaaagtttgatcaactcctacatccaaatgaacaaaaacttatagatttgcctttaatatgtaataacttagtaaagaagaattagattctaaaaagtataccatttacttgattaagaatatttttcacagtaatgttaagagttgattgtaaggcaggaccaatcacaactcctggatttatagtcaccaaatcaatcccattctcttttgcaaacttccaagcaccctcttcagctaaagtttttgcaagtgcataccaatccttaaacaacaaaaatgacttaattatattattatactagaagataataatgtcatttcttcattgtggtaaatctcaccttcgattttttgtcagaaattagtatccgaaaaccaagtttcatcagctacaacatctggtgtgacaagtctcccattggcaaaaactgctctgcttgaagatgtaaaaactactctctttacacaaccagcttttgcacatgatttcagcacattaagcgttcccttcaccgcaggatcgatcaattcggcctgaaatagaacctctgttaatattcaaaacaaaaatatacaacctgtcaagtgacggacccaagatttaaagtaagggggcgtaatttttttattttcaaggcaagggcaaaattaaacaaaaatacttttagtgggatttgaacattcacctctatcttatatataatctaacttaactattacacta

SEQ ID NO: 195103 - DNA, 985 bp, Cannabis indica
aaaaaatatattttattctcacttttaaatactgaagattaaaaacacagtaataatctctagaactgtaactatcgttgtagtttcttattatctaatattgtcgttttttaaatttaaagtatacaaaacgacttcatcaaaaaaaaaaaaagtatacgaaacgacagcgactttatttgtcgtttacccgccaaaacgacacgttgcattgcatatgaaacttttgcgcagtgcgccgccacagatagagggatccatcttctccacttcagaatatattccttttcttatttaatatattctcaaatctaaagaaaaaaaaaagaaattaaaaatatttctctttgttttcccaacgttgtggtggatcgctcttgcgggtctctatttcccgtaccagaagcaatctaaaaccctagatcagaaaacgagctacgattcctgccatggctggctcaatctcttcctctgatcacgaacgagatctttccaagccccgtctctacaacccctaccaggacctccaggtacctagcagaaacctctatcagctcccgacttcccccgagtttctcttcgtcgaagaagcacgtcgccagcgtcgatcttggggcgagaatctcaccttctatactggttgcacttacctcgccggtgccgttggtggcgctggaactggccttgtgactggagttaagtcgtttgagtccagtgacaccatgaagctccgtatcaatcggattctaaatgcgtcgggacattcgggacgggtttggggaaaccgattgggtgtgatcgggttgctatttgcgggtttggagagcggtatcgttacattgagggatactgacgatgtttggaatagtgtggcggcgggtctcggtactggtgcgctgtatcgagcggcgaggggcgttaggtcggcggcagtggcgggcgcggttggtggggctttggtcggggtagctttgacggcgaaaca

SEQ ID NO: 195104 - DNA, 1731 bp, Cannabis indica
cccaaggaagaaccaccttcaatttatttgccaacacttttgaaatcactttgtagagcacattacataaagatataggtcgcaaatcacccatcgaactccgatttttctttttaggaatcaagacaacatttgtggcatttaaactagtcggaaaagaccccataacaacaaaaaatcttggacaagacgaaccacatccttactgacaatatgccaacatctctgaaaaaatcttggtgtcatttcatcgggccccggagatttatccgaggcatttgaaacacagctttcttcacttcctcatctgaaacctcctttagcaactccaaatttctgggcattagacactcgatactgaacattagaagttactgttgtccagtcgctaacagcagaggaaaataactccttaaaataattcaccattaactcttccaaactcgaaccccactccacccaatggccatcagaatccttcaattgagtaattaaattattacgacgtcgagcatcagctgaagcataaaaatacttactaatttgctcaccatcttggagccataattgtttggatcgttgacgccaaaatatctcccgttgggcataggctttcgaaagttatttttttgcttcagcaaagtggttaacagaatttgaatctctacccaatctccatctacttacctccttcttacacttactaattctttatttaaaattccccgtatactctttcccccaatcttgcaactgctggccacaatgatatatcttatccgaaatcaccaaattagagtttgcctcctaactatccttcacgatttgcacacacagctgctccctcagccaagcattttcaaagcggaaacgcttcaagtaaggttaaacaactccacaagtaacatctagtaagattggacagtggtccgaagtggagaaatccatgttatagagcttagcaaaagtaaaaaaatcaagccaagattgactaaccaaagcacggtctaatcgaacctccacccatccttccgtacctcgacctctctcccaagtaaattctattaataagcatttccattttgagaatatatggttagagaatcctaaattttacactcttaggagtgcttggaatgtaaattcttataatatgtctaatgtaggtgcttattctaggtttcttcattctcagaaagcttgtgtctcttctcttaattcttggggtaagtcggttagaaatagttttaagtctcgggtcaccactcttcagcaggaaattgagagaattcaatctactcattttagagataggaatataacttcaaatgttaagcatcttcaatcacaactagatgctcttttgtataaggaggaggtttactggtgggagagggctagggttcattggctttaggctggggatagaaacacagctttctttcatcgtttcgcctctaataggaagtgaaataataccattaaatttcttagggatgataatggtaatgttcttagtagtttagaagatttgagtaatcttatcacttcttattttgaggaccttttccattgtgatggttgtgacccggaggcagctaatcatattcttgattgtcttggccctcctcttgaggattctgagattgaccttatgcttcagcctttcacttttgatgaagttcaacatgctgttttctagctctccggagataaggctccaggtcttga

SEQ ID NO: 195105 - DNA, 1073 bp, Cannabis indica
atagttggccaaaaatatccttggtgaaagattttcctcgaaagactgggtgtggatgtgtgttctttgcaaaatccttcatgtatctcatgcatgagagcgcttatctcaatcatggctatacaccttaagtacgacatttataatcctctcttatatagctttccagccatgatcacatatctgggggcttgatattatattttttaagaagtggctttctcctcaaggagtatgcctgattctagatacttcaattttgaggccatcaatgaatttaggtgatcaatgactgatacccctagtgtttctgtgcttaaagtgagaagatggatgatgaggactattccatatttctattcctctagatctgttgcaaatttagctagcatgtctgagaaggcattcttatctctagggatttccttcatataataatgcttagaatgttgcaataggtccctggacttagctacgtaactagccatcttttccactttttcctggtattctcaaaatacttggttgacaaccagctacaaatcactgtatagttcaatgttcttggtgccaacttctttagccaatggtaagccaacaatcattgcttcgtgtttggcttcattgttagaagcctcaaactcaaatacgagttcactttggagttgaagttagtacggagatattagaattattccagctccaaaacttttctcatttgtcactctgtctatgcaaattaactagacttctatctccaagatgggcattttaggattttcatttatcctcgtacattccacaatgaaatctagtaaggcttgacctttcattgaaattcttggttgatattgaatattaaattggcttagctccattgcccattttaagagtcttcctgatgattagagcttctgtaatacttgatggagagggtggtttgtccgtaccgtaatgcgcgtgagctcaaaagtatggtcttaacttccatgaagcaattagcaagcaaacaaaaagcttttcaatcatggtatatcttgactctacgcctagcaatcctttgctcatgtaat

SEQ ID NO: 195106 - DNA, 2361 bp, Cannabis indica
  modified_base (56)..(56): a, c, t, g, unknown or other
ctttaatttttattttttatttattttattttattaactaatttgtttttcttttntttcttttttctttttttttttgtttttccaaaagttattttaatgcctcatttttttattacgtttactattttatgtatatgttgaataaataatataatcttacactagactactatacctaacactgattttgttttattatgaatctctatttatgtataaacaatcgtaatccatgcatgattctagggtttttggcatatttgccttgtgatacagcatcaatttaatttttctattttgtatttttaaatggtttatatacttttaaagttgtaaatttttgctgaaattttatcgcaatatatatactactttcaacttttttattattattatttttaaatgatataacttaccgttagttcagaaaagaaattggtattgttaatataataacaattaaaagaaatatagtttttctttttcttttaattaatatttaaacaaaactatattgtgaaataaatattttaaatatagctcacaacatacaattaaaacatatatatctatagatgatcgtggatgcgcaattgcagtaacaaacaatagtgaagatgaagaaatgtgattaagaaagaataaacataagatagatcaggggaatataccattaattttgatcctcttagatcatttctatagagatacaaataagtaatgccaaatcaaaatatagtttacttagaaaaaaaatacagaaaattacgttatttatggtaaaatatttacacatttatgttcaattttttttttttaatatgtttacgttattctaattacaagaaaatcacatcaaaataacaacagaacaacataaaaaaaataatatatacatatatataacaaaaaattaacaaaattataacataaaaatacattaaaaataccatattttctgtaaataaaatcttaaaagtcttaaaaattatttaaaatttcgtacgaccctattttagtaaactttttattgtacttcaatggtgtaatatattaatttgacacataataaatattgtgcaaaatttgaaacaatatttactatgatgtgtaatttacatcatatgttatttttttatttatttttatactatttttattattttattagtatataacaatatcattaaattatgaactatttatatatttctttatgttcttacataatgaagtagtgataaaataaaagttttatatatattattcataaaagtattacttaaatattaacatttgcatcaagttttatagttgtgtgttggagtacaatgccaaaaatatattgaagtatattacaaattattttttgtgtcaaatatagcacaatttttacttctcctgtcagagatgaccttatttaagcaaaatactacatatgtaatggagttttataaatactactaaaactattttgctcttaccaaaatagtaccctagacatttatgtctgttatgaaaataccaacatatgattgaacttaaaacaacaaaattaatgcagaaaacataaaatagaacaccaagattttacttggttcggtaactgagcaatgaactcagctacctaccctaaggacatgcacaaccataaactaggttggaaatctttattgataagcttcaattgtttcagtgataattaattgagcacaaacaaaggagtcttgctcttataacaatcaatctcacactgatagaaggctcctctaggaggaacattctatatttacaacccttaatcctctcacacctaaaaatattgctcaactttttattttaaaattttcggatgaatcggtcaaacttaggttgtttcctttttctttaaaagataaagtcaaagcttggtaaactcacttccaactggaaccataacaacttgggatcaactttttgataaattcttgccaaatttttccccacgtccgaaattgataatttaagaagagaaatctctgaattttatcaaaaagataatgaagaattttaggaatattgggaaagatttaaagatttattattaaaatgttcccatcatggttgtaaaaaatagagacttgtaaaatatttttatgatggtttaaccccttcaaactgacaaataattcaatctatgcatacgagaatttttttgaaattacaagggcaagaggcttgagaagctcttgaagaattatctattaattcacaacaatgaaattattctgggcctaggtctagcaaataattcacctaaaagaggaagaaaatatgaaataaaagaataaattgatttgagaacatcttttgaaaaat

SEQ ID NO: 195107 - DNA, 3245 bp, Cannabis indica
atccaccatgaaaaaatctatttctttctgtccaaatagcacacataatacaaatcaaagtttgaaatttagttttagagtacatcgtggatagatggatcacataatattcgtcttgcatatgatgagctttctggcaatcaatcacaaaagttgaagctttccaaactgattttgcatacagacaagtaaacaaacatgtcctatggattcataagcattattacatagtgaacatgtcatcgagtcaataactttcctcctttttaagtgtaacaacaacaggtaatgcactttggataaccttccaggcaacattttttatcttgggaggcaaatttaagttccaaaagtttttctaccaattactccgagtattagatgtggaagaatcatctacttcagcaatagagtcggccaaatgaaaactggacttgatcgtatagacactcgttgtcgtatgatgacaaatgagtatgtcttaagtttggaaataactcaatggtattgtaatgatcctatcaacattaattggagcaaaatgagtatttagtaaagcaactttccatttcctaatgtccttaatgatcgggtatccaaggatcgataccacaagtgatgttgagtctattcccaattttgtagcgcatgcccttaataagcaactctctgcatcaatgcaatacctttccatgttaataaaggagagtgaccaagacttgcttccaaaaaggagtaattagagaaatatttatgcttcaatagctggctaagtaaagagtttggtagttcaagaatacgccatgcctacttagccaagagagcttggttaaaatggataaatgaacaaaaacccatacctccctcaaattttgatttacaacgaagtttccatctctttcaatgtatctttgagccattttggttggatcttgacaaaatgtttgccatcataggctctaactggtcacaaaactttattgtgagacgaaagcaactcatagcataagtgggtatggattgaacccaacttttaagagctcctccattctgccaatagataaaagttcgtcattccaagcatgaagtagcttccatatcccttctttgatactactgaataattcagttcaatcttgtcctgcataagctggtaaccccaagtaggtttcaggacattcacatatagtcatacatagtgtttaagagaaaaaggttctcgtaccatcttgtgtgatcagggaaaaggacatgacaaatttttttagtgttaagaaactgaccagaggctatataataagggtccataactcaattaatggcccttgttgaattctcattgactcgacaaaataaaagactatcgttagtaaataataagtgacagactgatggaacgtgttttgtgagttttaggccttgcatatttccaattaattcttcatgttgttacaatcgacacagtcctttcgaacatctgagaaataagtatggagaaaatagatcaccctgacataaccctcttgatggagtgacattacccactggctctctatttagtaaaaaggataaacttgtagatgataaacaattcatgattaaaaaaatccgtttgttgtaaaaccccatcttccccatcattgatgataaatatgaccattcaactctattaaaagttttactcatgtccaattcaagagcaggaaagccattccttccctgggtcttatgcctaagatggtgtacaagttcaaaagccactaatatgttgtttatgataaggcgatttgaaagaaaagcgctttgcatttctaaaattacatttgaaagcacctccttaaaatgaataagcaagacctttgtgatgagcttataaatcacattgcataaacttaatgggcagaaattacccataactagtggcatttgagtttttggaataagggtaatgagtgatttgtttaacaattgcatatttgccccttcattcaaaacttttagaacaactttggtgacttaaggacgcaccacttgccaaatatgttgataaaatatagttgacgtaccatcacaaccaggattcttatccagactcattgaagtcagggccgagtaaacttcgtgacttgtgaaaggctgcagctgtgtatcattcatggcttcagttatggttgtagggattgttgaaataatatgatctaaggcagtatcatctatgcccaaagttgaaaacaattcctcaaagtgtgtagagataatatgagccacactgtgctttgtggtgaaagggacactgtttgagtcattaaggaatttgattttgttgttcgacttccctgaagaggcataagcatgaaagaattttctattttggtcttcacattttagccaatcaatctgtgatctttggtgccaatatatttcctcctaagataataaatcatccaaaatgtctttagctttttttagttcttgtacatctgatctcaattcaatctcaaaattattcagctttaatacttcgttttactttttgtagattttttgcttcataccaccatatttttgtgagtgccacttttggagttcatgagtagaagcatccaaattagagatgaagttctgaataactgtacctagttgaacctatgagtgtaaggcttgaacctccaccgagatttctctatgattcgaagaaaaatagacaagatgatttgtaataattggttggaaggcatatgtccaatgatcattgacaaaacaccaatgaggtcattctttaatcgtttgtatgaatgtctgctttttgcccaaatgaaaggatccccaacatagggtagaacattcaattgatagcggtcaagaacaaattgaaattgttccatttgagcatcattccttaaaagtcctcctatttatcttatttcgataggatctcattgaaatctccaataagtagccatggcagaaatggagaaacatcttttaacctttccaaaagagcccaagtgtgcactatttgttgtgtttttggtacgccataaaacttagtaaagtgccaacttaatcctccatagaaagccatgtaacagtcaaaaatatttgcattaagattgagaagagttatatttacatcatccttccataacaacataagaccccaacttaagcctactctagggacttcaagtccattaataaaatgtaaactttgacgaaaatgaaaaatgacattacaactaagt

SEQ ID NO: 195108 - DNA, 3463 bp, Cannabis indica
ttttgaaattgtttttgtgacatttaaatcactcggttggtgcgcagatttcatggataacagatcatgcctttctttttcctgattaacttatctgtaatgtgattgtctctagaacattatacatttccagtcaaacccaacaccacaaccaaatgtttcaccttcttaatttacttctttactaaaatgttttggtaaattctttcagaccctttcattgctgctgagtacaatggtggatgtcttcggaaacaatgcacaaccatcaaacccggctgaagcatcagaaataatagatctaattgactttctgtcagttctctgtcctttatatttttatctactaagcttgtcatatctctgccttaagatacttacatatgctttactcgtgtatttttcgcagtcatcatgttgttcattatgaagggcagggagggcctgtgcaatctagtagcaagcctcgacccgaagttttggccatttttggaagagtattggaaactctacatcctgatgtacaacatcttctttcccacttgagaccggatataaactgttcgatttatgctgctactcatcctaagctggcccagaatccatcacaaaactctcttacctaatatagacgacgttgtagtttacttagaaccggtagcaatgtcaaatatcaggttagtttgtctcaccagagttcttcacttcatatcactctccttgcccaagattaattttcattatatcggtaagcttctgctttggaaacatgaatagaagaactcatccttgcataatttttatttttcttttatttataaaaagaaaaaaagtgaccaagattgatttgtgaagttgatttgagttagatgatcaaatgaatccattcaagtgattatgcctattagaacaatctgcaatcaaattcactcccagaaacaacaatgacatcacacttatctctttcgtaaataccatttggatccttaaatttaccgcaaaagtattcgctgcactagtttactgtttacactcgtaagatccttagattagattggatttgagctgtattggattcagaatataaaattcgcacttagtgcagatcggatgcactatggataaaatagtgcggattgaattagataaaaaccccagtttaaaagttgaatgagctctcttgaatctattttcagcaaacacttttagaggcaagtcaattttcttggagaaaagtggtatttgaaagataccttgtttttatgtatatattattgggtaatttggaattggatgaggatatagttaggattatctaaaatacacaattcttgttctactagtaaaatttggtctaaatttgaggcaaaaattcttagccttatataatttttcggttttagcgtgacgaaaattctctttaatttatttggcataggattcatcttgaactataacaattattgtgaacatgcttattttgttacatttcattcacttatgatgtagttattaattgaaattatttaaataaaattagttgaaatttagtttattgacactttaagtacaaacattaactcaaagaatgtatataaatatttgaagaatttatcattagaccataatttatccatgtattctcttttctaaactcacaaatcatatatactatattagcatcatattatttttatattaacaaactatttaaaaatataaaccaaatgtttgataggatatttttgcaatgacttaaatagttgagggagattttgaaaaaaaaaactatgaggaattttggctaccaaaaaaaaaaatacagaaagaaacttacaagaatctataattactagaaaaaaaaaaaaagatctatttacccaatcaagacacatcaatactaataattagctattttgggtccactcaattacttgagtgagagtaaaagaaagggatgaatttctccatctaccaaaaataaaaaaaaaatgttaaaaagatattattgatgtctagtaattttttacgtgttaaatatttttatatatttttattgatctaattaaatattagattttatattatttaatgcaataatggttaaagagtataactaataacgtaaaataatatatttaaaagatgctaggtactatttatgcgtgcccaatagcgcaatgttcaaaataaaatcaccaaatttgtggtaattactaattagtaacaaagtagtttttggatatgaatgttgtagaatggaattgaattgacttatatatatatatatatattttaatttaatttaattaattattgggataacatgtgatgcacacaaataatcaatatttttttttgataaaatacaaacaattaatattcgataatgagttgatagacattagataggttaataatgagtggtggaggaagacataaacagcaaaccaaccaacaaaactcgaatcaaatatataaaatatagaaattttttacaatacacacccttaaaataaatatattgatgtactcttatctattttagcattcgaaataattttttagtcaatttttttctcatggtcatgtacgttatagttatttaagaaatcctgcaaaattttaagaaatttggaaaaatttaacacgccgaaaactatgttcaaatagtgtgttgcacgcgtgactattttattttatacgcgtataaaatagactgtttgaacattgttttctacattgtaaattattccgatcttttcaaaattttgtaggatatcttaaatagctataacgtacatgaatatgaaaaaaaattagactaaaaaattcttctggataccgaaacaagctaagggtgcatcagtacatccattttaagaaagtgcattctagaatcaccctaaaatatatacataataagaatccatttattggttggagagtttgacaaaaagtaaactgtacgtaatgaaaactaatacatacaataattttttgacagttggacccctctctctctcagtctctaaattcttgtattcagttctctattcaacaaaattaaaaacacatgccttaaaacttacaaccggcaaaacctttttcaactttgtcagttgtctattgtcacacctcaaagcctcaatgacctcattatatgtatttattaaaatttacccaaaaaataataatttctcaaaaagaaaacatttcattctcatccatacaaaaaccaagagagtccacccacttgttcttctcattacccaaccctacataagtgtccttgtgcgcccacgtgatttttgtgttatactttcggaattattgatatttttttaaaaaaattattacattaaatttagaattattaaaagtaaggtcggctctaagtataagtgggttaagtttgtgtttagattcacacttttcgaaaacttaaaataaaaaataaaaa

SEQ ID NO: 195109 - DNA, 1199 bp, Cannabis indica
gcggctggtaacaagtaaatgaacggaggagattgaattaatctttttttttattatttttaatcttcaaccttaattagtcgttaagaattaatgagaatgttttatatttaaatattttcctttaaaatatatttttatatctatctccttccgaaaaaaatctatctttttgcactaaaaaatataaaaatacttaaattaaaaacttcaattaattaaattatattgtttacttattatcccattaggaataggttctttttaattcttttatataaacatccatactccctattatacaatacacaatttcattaattaactctttttccacaacacaaaaactactcgatcaattatcaatcatcatgactacttattatacgatgcatatttattcttattgtgaaaataatcctccaccacaatttgaagccaaagaagttaatggagacgaaggaaatcaatatttgatttttaaacctaatatttattatttgcgttttcattcagaatcgaattattctgaaatgacttttaatgactatattgaaactactcctagtaactacttttttgaacattcctccaatcttcaggggcattttagctatggctgaatgctatggtttcgacttgaacctcatctctgaatattgctctaggacaccagctcatgttatcaacactcttaataatcctacctttgccacttctaagactattattttttctattgatattattgccattcgttttccacaacaataataggagcaagaataagtactaggactagggttggtgtgtgggtgttggttagttttatttttttattttttttaaggatgtgtacttaattaatgtattttttttcttttcaattttatgttttagttaaaagggctttataaatgtaatttttctttttattttaatgggtttaattctaaattttcataaagttttagacaaattaatcataaactcaacaataataatcattgatgtttacaatctaatattttgacagttgaagaaaaaatacctataattacataacaacaaatgtctctattattttctcaaaatttataataaataaataatttaagccatttcttttttttattttgtcattcgtacgtacattccaataaaatgttaatcttaacataagcatataatacctaact

SEQ ID NO: 195110 - DNA, 2610 bp, Cannabis indica
gatttgtaattctctctcattctttttttcattctctacacaaaatgtcatgatatgagccatattggcttgattacagctggcaaattgattgcaacagaaaagaaatattgtggaattaggaaaacgatgctccatctgctaccacataaacataatcctctgtagctaataccacaataattatgctgacctcacttcatttcttcacaccattcttttgcttaattaaacaaatattatataacattttattctcctatatatatatatcaaatttgtattcacaagcaaactacttgtatattaattatttttcttaaattattactttactacaagtataaaccaagagtatttatatatatattacaagcagggccagtcttacggtacgtggggtttagtcaaaatcaaattttgaagtcttatatatagtttaattattatcaaaaaaaaaaattttagtgctttggtgtctaatggtaagactttaagagtttaaagattcaatcctttataactacacattaaatatatatatatttttaaaaaatagaaaagtaaaataagttctttaccgtgtttgttatatttttttattatttaatattttattaatatactaataattttttcacaatttcgggactcttagcgttcgagagctcaagaaatacacctggctcgcctattcataggaccgccctaattacacgtatgttttagtaatagctagctaggttaggattataaacaataaagatcgttttactttggtgaagtaattaataatttaatcaaggtaaactataatattctaacaataattaatgaggttgaatatgtacgtaaaggaatttatatatatatatatatatatatatatatgtaaacattgaatccgcaccataattgtcttgttgtagttattatgagaaaaataaataataccttattacttagtaaacaattgatcacataataaaagtgaatacatatatatatatttgctcaatgggtctataaatattaaaaatattataattaaaaaatggtggttgcaatatgcatatacatgcatgtatatatatgatcaatatattagctctttaaatataaataattgtatatctcttactcaatataactgtatattgttatctatctgtgtccagacattttacctacactttaaatttttacttaattaaataagtttacttagaataaccttacttttttcttgaatagattaaatggatatattacttattacacaagatatgtgtctggttgaaaatgatggaattagatataactttatatagaacaataatatttagtaataaaaaaaagagtttctacaatattaaaacaaaataatatatacaaattaataattaaaatgaatgaaggaatgttttttctaatgataactcataaagaacaagaggataaattgctaattaatagttaagctttttagaatatatatacccaaacacatgattaattaagtactaattaatatcttataattactagctaacaaattttatatatagctagattggatcatttaagtggtttgacttatgaattactactttaattagttaattaattaattaattgcatgcatgcatgttattgtgaggaggaaaaagaaaaattattacgtacgaaattatcaatgaggatataaagcaaagctatattatatatatacacgtaaaaactaacgtaaattatttcatgcaattttattaaatataatattaaaacaactctctctctctctctctctctagagagctatataaacatcctccatacctagtatatttctcacaactcaattatatatacatacaaacataattatatatatatatattttgtgtctaaatattaatatggttcgatactctaatttgcttttgcttcttattataagcctctcaatcttgttagccctaacccaagcagagccaaacaaaccaaaaaagccaaagaaaattaagtgtaaagacaaatggtatccagattgttacaaaaaggatctttattgccccgaatcatgccctcgcacgtgcttcgtcgattgtcgcacgtgccaacccttatgcactcaaccaccaccttcacctccaccacccccaaagcgtaagcctcgctctcctcctcctcctccggccaccacctattctccaccaccgccacaagcctcctcatggcctcctcctccggctactaatgcttatcctccaccaccaccaacacaaacaccaacaccaactcccgcaactcctcaatctcctccaccccgtctgaggaggcggccggaggtaaaagagtgagatgtaggaataagaattatccgagtttgttatggcatggaacatacttgccctagcgtcttgtcctgatcaatgcgaggtggattgtgttacatgtagtcctgtttgcagtagttaatttgcttaagctaactctaaattattttaattaccatttttttttaacgagcgttgttattaagtatttatagtgccaacaatactatatcaatttaacgtgttatatattctatagtcaaactgtgtg

SEQ ID NO: 195111 - DNA, 1501 bp, Cannabis indica
acactcacaaaatgagagacatgacaaaacacttaaaaattagagacatatgatatattgtttttatgtgtttatttattttgtttttagaaattcatgttaggattttagattagtttaatctaacatacttgatttgtaaagtaaggtcttggttaaataagctttccaacacctcttaggcctaaagacgatagtaccccaagtggtttgggtttggctcatgctttcattagttaggacaaattttttgacatttcatcaataacgcctcctctgatggtggcagtgttggtggtatcccagccattttctgtccaacagtgacaatttggctagttgtccaattaccaacagcagtctgggcgatggctttcccaattgttccatggctagtggtggcctgagtagtagttgtaccaccgttaccaggatgcaggggtcattctccattaaagctgacaagatttctcggtaattgaacttcatgggcattgttcacctcttcatcgagtctttcttgagatgatcttctggtaaacactatttttttggaaaaaaacttcaagatttttgttaaagctctcaatgaaagtaccaaaatattgagtgaatttttagccaaccgacacggagtcgtaataaataagaaattaactaaaatcgtaataaatgctaataaagtacaccaaaaattaaagagggttatacccagatgccggtaatatcctactccctttgtattttattaattggagttgtaaaatcaagaacgggctcttgaatgcaagaatgaaatttggcagagtttttgctctataagttatgaattttcggatcccttcccaggtcatgtgtgaccccttatataggggaatggtcattgcttatctctttaggagacgtgaccgctacgaaaatatctcaaccatctcatttattcttggaggtggttgaagttcgattcttatggtaatatcttgctatttttgtgggtttgcgaccactgttgagattttgtaggatttgaatgttgaatgagttggttacggtgagggtacctcttgggatgtgacccccttaaatgattaatcggtttgggtcacatcctttaattcttattttgtgtttaatacttagcagtatgtagccttgataatgggaagatgtattgtatcaattatcttatatgtagctatattgcgatacttgacccataggagcgtagggggtaaggggtacatccttagaccaatccatcaccattggatagtaagtttcctttggggtaggactagaaatgtatacccccaaactaattcgacaccctcgaggtgtagtgattgtttaacccgttgtgagaatacttatcaatcctctctggggatagtcaccttattcacattagggggagggttgatcatcaaatttaacggttgttagtttacatgttcttcattaactcagttctaatatactcgtgccacgtatcatcatcctt

SEQ ID NO: 195112 - DNA, 1059 bp, Cannabis indica
aatatataaataattaatattatgtagatcaataaaaatcagtcatgtatacactgtgtacacaacaaatagtacaagttggcatttaaaaacaacacactaacaaaatagtgaatacctaaataaattgtgagtttggagagttttatcatcaaaaaattagtttgagaaattaagtaacacaaatcgtattaaatagtattctcgtcaatattcctaaaaaaaatatattaatgtccaatgtaagattaacatgatctttaacatgtattaaatatcatattattgtgtgtatcatgaatttatctatttataactatattaattaatattcttgtttacattttataacattgatgttgaatcagtgttaaagataatcataacgtgtcaaaaaaacataaaaattgccagccttatatctttgtatgtatatattcttatttattaatttattataaacaatatttacgttagtattagtagtatttgcaattctctcacacaactaacacaattgttttaactaattattcaaaaacaatttcttggttagttagtttgtttttactcacaactatagttattagatgttgagtttatgttttgtctgttacaacttcacttgtacttttggtagttgttacttattttgtatttgcaaactatttaactagagtttcatgtcttttttgtaagagcatctccaacttaaatttttataaggtggtgtatagatatatttttagtctaaattggtcatatgctaaaaattacattaaatttgacacaataaaaaataatataagtcaaatttatagtacaaaaatattattattttttatttattcttttgtcacttgttaatgtacttaataactttttatattttatttatttatatacttttaaaatttttgttgagtttataagttaatttttgcacataacatataataaagcataattataaaatttggatcaaatataatataaactcaatttttgagccaaaattaacttaaaatttacaacatgaattgaagatggtttaacatg

SEQ ID NO: 195113 - DNA, 1179 bp, Cannabis indica
gttactcttaattagtaataacatatgtggtgttggatttggattttgtaattagtataatgacatgaattcaatgcacacagaatacatataagcatttatttctttaatatgtagagaaaacttatatcaatatatcatatatatatatatataggaaaatttaattttttttatgcatacattagattaaaaaaaaattcctaaacttataatacctaatatttgtgggatatgccaacaattatgttaaccccaaatttttcttccttatttcaactttctctttttccctctcgctcgttctctctctctctctcacctcctatatcaccgaactgtcccaatccccataaactatcgcaaactcggacccacgaccaactctcagcaacccacgaccacccaacgacgagcaaaccactgttggacaaggttaccaacccacgaccaccctcggaaatgtctaaggtaagtttttcggtacattatctattaatttaatttttgcatgatttaaggttaaaatgtaagagattattgagatttagtcttaaacctctgtgatctgtgagtttgggttagatttaggttcgattggtcagatctctattttagagaagaatctagtttttcaagccaggtttgatgccacccgatgaaggtctaatggactctatgaatttgttaagtttcgaggttgaagacatggtggtctgatgggtttctgatagtttgtttaactttcatgctttttttcatggcccgattggaccaatatatggtctgatggggcccaatatatcttatatatttgtgctattgttgtaggcctgataagtctgatatatggcccgattgggacccggtatatcttatatatataatattggtgtaggcccgataagtctgatatgtggcctgatggggcccgatgtatctatgtgctatttctatttagtgtatgggacgatagggccccatggtggatgatgcttggtctgatattattcatgcaaagtaagtatgattattgacgatagtgggtcgatagttagtccgattgtttttgcatttcttcatttttgtatgtctgatacgggtctaatggaggtccgattttgtgtctgatgctttgctacagaattgttaacattcattttcttgtctttttttttt

SEQ ID NO: 195114 - DNA, 1135 bp, Cannabis indica
gggtggggtgggagggggcaaagagtcactaacttataaatataaacattaacttttaaattcaatagaaatttccaagaagagattacgttagttcattggtgtgctccagtttacgacttccttcaatggcagagtttttatcttgtgtttcaaataggagagtactgtctttaggtacctccaaagtccattttcggaaagatgcaaccataacttggcacatccttgtaatagggctcccccccggtttttggaacctgtagataggtgtgcctgcaaagaaactagcaatggcaattcccatgaacaatgcaggaatgccaaatcctagaccccacccagcattgtcttgaatatacaccagtagactacttgatataagagcaccaatattaatcgaaaagtaaaaccaattgaagaaagatcctttctttaccctctccttcgaatcagtatcatcaaactgatctgccccgaaagaggatacacatggtttgatcccaccagtccctagcgcaatcatataaagtccaacaaagaatactccatattgtgctggactagccactggacaaacagaaccaacgcattcgggaggctttagtgctggaactgatgctgagatagtcaaaacacacattccctgaaaaaaaaaataagtaactaattatcattatgattgtatggcttttctttccttaactttccaaaccttattcaaaacaggacagtaagtcatttatcatacaactactcgaaaactgttatatgattcagaaatgattccccagaagctcccttggcattaatggtattcccatttacaggtttcaagttccaatctatacttagcgaaaagaggctaaaaattaccttttaaatagaatgctaaagaactagaataaacacttactggacaaaaaagaataaaggctggtttccaataggacttacaataaagtaaattgtggagaaaacaccaatagtccaatatcttccccagtaagcatcagccatgatggccccgataaggggcgtaagatagcaagttcctccccaagtggtaacatttcttgctgctgagacatttccttcgtgcaactttttcgtaagataagtaacaagattagtc

SEQ ID NO: 195115 - DNA, 826 bp, Cannabis indica
tccggcgacaactcgtccccagttggtgttactgatcctcagcctcaagcggaccttcctcctgctcctgctactgctactccgtcttcttcctctgttcactggaacccattctccaattctttaacatcttcactcaccatcaagcttgatcgatccaattatcttgcttggaaatcacaagtcgttcccacggtcattggtcatgaccttgatgagatactcttcaccagtatcactcctcctcacactcttgttaatggagattccaacccgatgtacctgcaatggcgcaaaaaggaccaactccttctatcttggcttagatcttccatgacagaagccattcttggcactgtctccaactacaatacctcaaatgctgtctggttagcccttgagcaaaagttttcaagccaatccaaagctcgtttgcttcagctcaagggacaattatccaacattcataaaggtactctcaccatctctgactatgtcgataagattaagtcaatttgtgattctttagccattgttggtcattcgatatctgatcttgatctcattcttcatttgctcaatggtctgggaccggagttcgatcccgtggtttctggtatcacttctcgcagggattctctcacacttgaggaagtccaagcactcctcatgtctcatgaaacgcgccttgaacgacacacttcaatgatggacctctccaccaaaatggctgccaatttgaccttcggctcaagaagtggtccttatcgtcatccctttgcctctggcagaatcaacaatggtgatattcaatcaagattgcccc

SEQ ID NO: 195116 - DNA, 772 bp, Cannabis indica
ctactctctctctctctctctctctctctctctctctctctctctctctatatatatatatatatatataatatcataaacacaccaaaataggagaaaagaggtgacaagaaaaaagtacttgtgttgtgtttttaaaggtgtgacgagaaaagggtgttgcgtttgctagtttcgtcgacctcggtctcgacttagtgatgcactcatcataaaacaccctatggccgcaccacataatgtgtatgtgggcatttttgcacgcgtagcggtgcggccatggagtattttagggtgtttggtagctttgtctatcttccacatttaaatttggtgaaaaaaatgtgtgatttttattctaaaacttgtttattttgtattttagtcttttactctttaatggagtttattgcgtagacactgcaaataaattggaaaatgaagcactttaaattggattgaatttgtaacaatgtttatttattatcaataaaaataacaacattacttttttaaatagtacttaattgtctttgaaatgagaacaagaaaacgacaagtaactaatttaggcctatcttgaggaattaatatactatttttgggtccattttttgaataatttaaaattagttatttctaaattaaaaaatacgtgtattctatttgatttagccaaatgaatgggcaaaatgaaattacatttattgtattaactattgcttcgagcttatatactctaaattgatttgttttctatttatttatttat

SEQ ID NO: 195117 - DNA, 1789 bp, Cannabis indica
gggcaaaaatcttaattagctttattattattgtgttcaacaccttttaatagataacactttaaaattaattagcgatatttcttaaaagctattttttttttaaattatatgagacctgatttaattacactaatagtagtatgacacagagaatgatactaggcaccagtaatatcttttaccatttctctcatgagacattcgtgatgtctaacaccacaataaagtgtcgttatataattggttagcaatttttaataatatttattaaattaaaataagtaggactcaatattaagttatactaattatagcactattacaactcacaaaaatactagacaccaatatatgtgtaactatactatacgcatatattatgatatatgaaaaaataagtatatatatgaggagtgttactaaccttttatcacaaccttatagttaatttataggtctgaaaatatatggtagaataattttttttattattttttcatatgggtgttccttataatattatttttgtaaaattttaaaaattttcgaatagtttacaatatcgaaaataggtttaaaaatttttaaacatgcgtgataaattattttcggtaatgtaaattattcaaaattttaagagataacattataattataacataaacagtttcaatcttaatttcagcatattaattttttttaaaaatttttttacataatattttaaataaccataatatggacgatcattaaaaaaaattagactaaaattatttttcagatatgaaaacattttagagaaatgttaaaagacattaatattgttttgcaccttcttatgtgttaatattgttattggtagaactattttagaattttctatttctttattaaaaataaataaaattacatggggagacacgaagcaaatgtctgagcataatgtgtcagacgttggcaggcacgtgacatacgcgtggtgtgtgtgatcaaccgtcgttgctgagctgtccattttatgtgatcttttctccttatatttttaatataataaatgttgatgaaaaaaacaataataataaattaaatttattaattctatgatcattgatcaaccttatattaattgttttttatttcacctgctttgggataaatcttcacgtttttttgtctcattataaaaactctataaatatacatagtttaagttactagattaggctcactcaaccataaaagtaataagttaaataattaattaataagttggatgttacatagtgtttataaagtttataattttaaatagggtaaatactattttagactgtgttttgtaaaaattattaattgaattttctgttttgttaaatgataaaatagaattatatattttttaaaatagtaaaaataggactatgtgcttaatttttaacaattttattttttaatatgactaactaagataatttctaacatgaatagatacaaaaaatataattaattttgtcacaacatctctaaattagattatcaattattgagttttattttgataaaaaaaatagtccagagtcttatttgtacaattttaaaaaatataagatttattttatcatttaacaaaatatatagtccaattaataacttttacaaaatacatagtctaaaatagtatttacctttttaaagaattaaaaattatgtacgaaaagtacatatactaacatttatatttaattaccaagccttaattcaatgataagtttttttgttttttttt

SEQ ID NO: 195118 - DNA, 1395 bp, Cannabis indica
ccaaccttaattgtaacagttcctctgtccttcttgtcttttactttcagagtgtcaagtgatggcaacaatctcagctcaaactctttcaaagtttctgcttctagctcaatcaaaggtacttttgcaattcctaagcgcttatcttgcccaatatcctgatcaaaaacctgtgttcacaaggagtaactttactgagacaacaaattataaaacccataacagaaagtaatcagttactaggaaaatttcaaccagcatatcagatcaagcatctaaaatgtaatttaaactagataaagacacaagattccacaaccatttgagcatcctacttcagataatacaatgcttgtgcacttaatctgtgtttgtattgcgcatcacaatactttctccaaattttgaattcattcaaataaccataatactgttttagctcatagagaaaaaaatggaatttttttggctcagagtaaaatacttttagctcatacggaaaaaaaatggaatttcttggcacagagtagaatatataatctcttcatgaaaaagatacaaactgcaccctacaatgatttcactacaggttttttaaaataggcaacttctttttgaaaaggaaacccttaactagtttttcaggtttgcctcaaatgacggatgtgctctctttcacaccagttctctaagatgagcaataatttaagacattacaaataactaatgagtagacatgtttggaaaggatgcatttggatgacagaagggtagaacagtgtgaataaaggatgagaaagagcacaagattagtaatatataacctcaacaataagtgactgagtctccttgtcttctgcaatcatctcgaatgtttgattccaaacaggattcaagttgttatcgataacctttgttttaaccttaaacagaggtcgtatatgcacgaccacatatggatcagattttccaatcatttccatgtttttcaaattattagcttttactactgttaagctaagttttccctgcggtttcagctccaaatcgctgcataaaacaagacacattgcatagattagaaaagagtaaatgtgtaatcatgcacaaataagtcaaaccaaaaaatataaaagtgtatatatatgatctaacgtgcactaaatttacaaacgtacaccaagggttctttgaagataaattattcgtgcaatttttttttactacaagcaactaaatgtttaatattatttaataaaataaaatcctccaacaaacaagacaaaatattcttactgagaacaaaaaacacctgatctatttctgtggtattttactaatgtttccttattgtccgtaatctaggtctttccatacacctacgtgaaagtatga

SEQ ID NO: 195119 - DNA, 1552 bp, Cannabis indica
tttgaggtggtgtttgcaagtcttttcactggaagagatgtcgatatttggggagcaccaatggatttgtgtgatatgagataatagtgactctgctgccccataaacgccttgtagtcttctgggatacttaggtacacaaggaatgttctttatcgactctctaatattacatgcaaccttttccaacatttaaagaagagaattctgctgcaaaccaatttgctaaccatggctcaaaatcttaatataatttcttaatgggcccatccattctcccacctctattagtggtgacacgggacaagtagatatagtattaatcagtaatgttgttatccctcccaattatttcctttttcttattttaatttaaatattatttacctcttatatttggaggtccactaaaattcaatgccacaaaaacaaacaaacatatataggataaatacatatcaaagcaagaaacaacaaactcaattatgtatgtctccagacaaagaattacaaacctcataaatttcagctagaccctttttgctcttattttcatcctgcgtgtcataaaaagaggggaaaagttgaaaacattacttcttccttcaagggaactaaaagaaagtcaagaatccaaatgtctacaccaaataataatatgcttaccagctcctttcgttctcttggtgctttagagggtaaagcctgtggcttttcaacatcatcaaaatgcccctaggaaaataccataagatttttggtgagaaataaaattagaaatgtttacaataaattgatatacaataaggtagaaatacagtttgaaaaaaattattgcagaaacttgaattttatacaggttaacaacttaaaggtaaaggttaaaatagataaataaataaaaaaccctcaaatgcttaatattgaacctttaagtccagaaaagtgggatgaacaaagaaaataacaccaacagaaatatagattacaatatctgcagtgtaaacatactttggataattataagttaaagatgtatcttacttcaagaattctcttcttgatcatctcttcaagtgaagctgtaacttcctctgtaattacgggaggaggtctcacattatgctcaaaatctaggtcagcttctaaagcgctattctttggtctttttgcagcagtgacctgtagtccaaatttgacaattaggggggagagagagagagagagagacaaatgtgtaggtaaggagaacgttaaaaaacaaggatcacctctccctgcatggtccaagtttttggttccaagttcgctttttccatgagctctattttcgatttaagcttctcaagctccttttcatgtgtagaaagagttttctatgggagaatgaacaaaacagacaagacatatatatataagagacaataaatacttggtaaaaatacaactcaaattcaaattacaattgtttttgtaagaccatgaacacaattttttattaataaataaaattaaaaaagttaaaaaaaatctctctacctcattttccaat

SEQ ID NO: 195120 - DNA, 1363 bp, Cannabis indica
ggtaaaatatttccaacagatttgtccatggcagcaagggttgatcattaggattcactgggttaacagaattagcaggattaaaggtattggcagaatttgtagggtttgaaaggttaggattggccagattgacttagaatttggttaactaacagcggagccttatttattgctgataatcaccacatgtaaataatagtaataaatgataaaagtaacacatagatttatagcagtttgacccccttgattagcgagtaatgaactactcccgttttagttggattgattcttgagataataccaagaaaattacaggcttaaacctcgtaatttctagctttggttctcaatattatagtagtgagaactgagtgttgcagattcagaacaagtgagattttgtgaaaaaatagacaaagtgcctagtgagagagaggagatatagggcgtgtgagacttagagttcgggtcccctttcatcttgcctaattccctttatatgatgtagggcttacaaaataccataattaaaataggtaaatatccctccaaaatagggaaaataacttttcctatcttttgtttaaatttcaaaacggataattaaatccctaaagtattagactaatatcttaagggaatatccttgtctttatgggttgttggatctgtcccataactaaaattaagcttgagaatcattcagaatgttcattgtggaccccaccattcatttaaactcattttgatgttgtttgcacgtgctggctggccaacgctactttaagggcctggccgacacatggaacttcattggtcggccaggtttggtttggccaaggacccctggctagccattttctcctgctcgaccatgcttgactaccttagtgccctcaacaattgatatgacgtgcaaggtaactttgttcacttattggcaggttgtattccacgtggcctcagttttgtcttcgtggacatgccacatcaagtcggtaaaaattgggataatatttgcccctcaagtccctatgtggacatctgtacatatagagacttttcacctcttgccttgactatgaaagccttcaccgggcaatgttgcctagttggatattggactctttagatgactcatctttatgacaaaaaatgactctattgccaatcattatggggatttgtgtaatggttacacattccctatttttgaacttttggtcttcgatcttctcttctacatggctatttttgtggaaaaataactacccatttagtttttttgggggaaaaaaacctcgaaacctgtataaggttcaattttcttaatttaacctttatcctctctctctct

SEQ ID NO: 195121 - DNA, 3071 bp, Cannabis indica
ggtatgttgttggaatgtgtattagaataagtgatagattggcgaaattgtgtttattttatttttaaaatttatataatagaaagtattagaatcattttcactttattttgtttagtctaatgtaatcctcttaggtttttcaatgtaataaaatttttcttatatgatgtaattatcattatattacaattccattacatcatttttaaaaacaaactaaatattataattgtaattataatttcattactattatcattacaacaaactaatgatgtaaaatgctaaaattctcaggggtaaagtgaaaaattcttacccttgccgtaaaaatttagggggaaagttctatattagattcttagcatgatgtcctactattttttgattatatattatttgggttgccaaaattgccaaaataaaataggagaaatgactgattatatgatttaaaaaaagaaaaaaaaaaaaagaattacaattccaaaactggggtaataataatgtggtagggtgtcccaatcagtcttctaatgtgtctctcatagtttagtttaaccttttcaagatcttatcatgtctttatgtttttgtcaccacagatgatatatttatataaaattgtatcaagttttaatgattttttttttcctttccaatttctctttttgaggggaagttttgatgtgacaaatttattaatatgctgtctacaacaaattaagtaatattatatagagaacttaagaataatattgtataagaacattaatacagaaaaatattaaagaaaaagtacaatcagtatttcgtaattgcaagtttacaagtactattaatattatgaaatgactaggtgtaatttaaatatagtcaattgaaggatttctttagaaacaataatgtaaaatttgagtcatgataataaaaccgatagaagaattaacattagaatcaactaattcatttacatttattgaaatacaactaatttttaataaggatcaactaataaaatttacatttaattgaaatacaattataattttcaaactacacgttagactgtatttttttttttttttttaaaaaaattaaaaaccttagacttttgtgctaaagaaaaaaaaatgattataactttatgttttgttgaattttttgttttttaaaaatgataaaatagactttatatgttttaatatagtatcttaagtttaaatgttgataatttaggatataatataattaatttgaaagtaatttttagtacgaatatatgtaaaaaaaaaagatttactctatatattgttttttaaattttttttttaaatttatggtttgagtttctaaagttgtttttctggtggtttctatgtgagttgttatacgattttttgttgcgatttaagttgcagcgctagttgcaataaggatttttgtatagaattccgtaaatatataaatatatataataaaaaaaaaactattttgaagtgtaaaaatgaaaaagttacctaaaaaaaatatacttaattttgtcataataattatagatcgggttgttattaatttttattttatattaaaatatatagtgtctaataatttttgcaaaattcatgttttaaaatagtatttatctttaaaaatcaataaataatatattccgcataacttttataattatgctctaaaataaaatgaaaaattaactatttaatattgacgtaattatgtttatatgtttttagaaaaaaaaaaaaaaatcaattatgtttatattcctattattgttaaatttgacacattcatttgacaatcatcatcaaagcaactattttacaaactgtatttatattgtaaatgtataaaaaatgggatgtatttatattgtaaatgtataaaaagtaggataagatattttataatgagtattgctattaggtatcaatatttaatattttttataagtagtgtattggttagtaatattctttaaaatttattttctcttaaattatatgatactcaatatttaattacattcatcacaatatgacacgaaaaaaaatactaagcaccaataatatttttctagcaattctcttttataattaattgtcctaaaaaaactacatatctacactcatggagagtataatgagtataataaattgtgaagtgaagaaaactaaaattttctgctgtggctattttgttgggtccaaattttgtgatgactacccatattttggataataggaaaaaataataggaaaagagaaaggtgtgttgtaaatcaaagtaagtagctgtattttaaaaatattataagtataaaaaaggtccaacatttgttttttgaggagaaaaagggtcaattttattacattaatttcctcaatgagacgttcactctttttggagctttccctttttctttctttacacctatttttgtttttgtattctttcttttgtgtagacatggagaaggaccatagaaggagcgtccaaggtctttatggagaagcattacaatcgtcacaagcgtctcataaacgacatcgtttaaatcatattatatagtccttaagtgagtaggccttttactcaatttgtataccatcttaacatcaactttatattttagtcattctttattatttttgtaattttttctacttaataagaaattaatttcctgagtatcatattctacattacatgccaatttctacatcttttccttattctacatcttctattattttaaaaccaattacttttccaaataacattattttttttccagttaacataattacaattaacaactttttttagtgatgataatttttttttgggagtacgtaataaaaacatagcttttaaagtagaaaaataaaattttatagaaataaaatgatactataaattaaaactgaacataaattaaaaaaaaaaaatttatgaaaattcttgttcaatcaataaaatatattgaacaagacccaacacgctccaacctccctccaccccttatcacaacccaattaagc

SEQ ID NO: 195122 - DNA, 1155 bp, Cannabis indica
tatatatatatataaaaagttttccaaagtactaaagagagacaacttggttctcaaagagtggaatagagaaaaagaaataaagaaaaagagagagaggtaagaagaataagttcacatttggttgtaacaaagctgagaatggtattgttaccctaatgagtatgtttgttatcaatcccaacaggcttaccacttaagttaaaaaaaaaaaaaatccttattagtgtagtggaccctaataagctgacgcattccctttccttaacagataattaaccttagttagaaatgctaaaaggtattaattgtgcctaatatcttcttatatattattattgctattgatttaattaagtatcgaattttatatagtttaatgtaataatttttaagaagtatgttagctaatcgcaaagtgacacatttaaaaagtactagttaccactaatattcaatagcaatattctaaaatatggtttattaatttggtccttctgttttcactgggctcagcttttaatggcccacttctaagtttccttatttgtttaattactttatctccgtgagagaggagagagatagattatgattgattggacagtgatcaaaagactaataataattcaagatcagcttaatttactttaatttcttcagtgatttgcattttcttgttgtcatgcactcttaaccctaatttgttatttatattaataaattaagagttttgtcacgtgtgtgacttaatttttttttcttttttgtaacaagtgcgttactaatttgttaagaaaaagttgagctaagaaaaaaaaatgaaatttttttaatgatttgatcgagtggaaaagccacttccgagcctaaacaaacaaattacaatcttcaatatatgcttacaattaagatttactaaattaagtaacacattaattagaatttaccccaaagtccaacacaaactcacaacatatatattctcgaagtaatttgattgtttttgtctcgttctattgtccaatatggggtaccaaagttattcccaggtgatgaaattagtttaatttcctacgtcatccacatccatatgcattatgcaatgcatgctcttctcaaagttaccctctaaaaggagagagagagagagag

SEQ ID NO: 195123 - DNA, 1972 bp, Cannabis indica
atctctcttgtttttgttttttttttttttccatttttaagaatcgttttttttttttgaaaaatttaagaatcttttattaataaacttgagaaacaaacaaacctcccaaaagataacaaagccaaataccatttcagttcatataatctaatcttgcagatcaattaaattatatcaccaaaccaaaacatttaccaagataataaaatctttagcagaaattattagctcctctgagattcagacaggaaagagcaaaagcataaagggaatacaataatttattcaaagaaccatacatatatatatgtatatgcttagtggttggatatgattaggtggtcaaactgtattgatcgaggtgtttgaagccctggatagcaaattgtttgacgagtgttggatcaggaacatcctcactcaacttctcatactcacaattccatttcaacaaacttccttcatcatccttattagcaaacacttgaacacttgccttgaaacttttgtagtactttagtaaatctccacctatgctactaaatccatatattctctcttcatcatcaacaatttctatcttctcttttgcaatttctattggtgaaccttaaatataataatacaataacaataaccaaatcagaataaaaaccttatatatatatatgtatcaaatacaaaaacaaacagatcaaatacctggtccatattgaatgagtctaacagaacctggatgaacaccatcaccttccaaagcttgaacacttgtgtaagtaccaggaggaaaggcatcattgtaaactttgatgaaatctctaattgatggccaaatcttatctgcattagatttgcattcaatttcagcatcaagctttcctataatactactacttgccattttatatgtagtattgaaacttgaaaggaccaataataataatttgatgtatatgataatcaatcacacaaacaactatctctatttatagaagagagagagagttgaaagaaagaacctcctttttttttttttatatacaaaaactaagatgataaactagaagacaagccaatattatttacaaaacatataagagaaatgctaaccaatatatatttatttttatggcatattgttaactaatcgtaagacgtcatctttaagtgttgctagacaccaccgttaatgccttacaatgtcaaaagatatctgtggtgtctagcaccacctaaagtgtcgtattactattggtataattaagtatcgaatcttacgtaatttaattttatgactattacggaatatcactaaccatttacaaaatattattggtgcttattataatactactagattaattgtcacgtggttagttagttaaatataatgtttattttataaaagtattggattataaagtatgaagagagaacaatacaaaaaatttaaaggaaaattaaatgttataagctattggtaactaaacttggtagtgcttattcatggtaaagtttggtgaccggtgtgaaattcttttcttttctgcccccagaaatcttgtgagcagtttccacttcactttaaaagcttttcaaacaacttataaattctgccatcaaataaacatgacatattgaattagcaaaataacaaactcaaacaagcacgggaataagtgatttcaatgaaataaatcaccatttactttgtttgaaatcatagccctataaaaaaaataatatagtttcttcttatacctaaattttatgagcatttctatcatatcatggaaacagtagatatctgtgacatataaaagctaaaaacacggagaagaaaatgatgtaaggaaaaaataataaattccataaatttgatcacatataacatattaaagaaactttctagaactcaaacgaggtttctccaaaaagcccatttgcacaactgatgatcctcccacaa

SEQ ID NO: 195124 - DNA, 1599 bp, Cannabis indica
atctcttactttttttttttttgtttttttttttattttaaaaatagcacatttgtatctcccatttcacacaatcgattttaattaatgctttgattgtctttactttgttgatttggagttcaattctgacttaagtattagagtgtctttatgtaagaaattagactctatttttcgacaatattgtgattagagaatataagattggcatactaatctagcaaagagaaatgaatatatactagagcaactcaatctaacttgttcagagaattttactcaccaacaaaaacatagaattttaagttaatttctaaaaatctttcaaaaaattgtttagattaccaatctattaaaaaatttaaactaaaaaaataatatttaaaaaaggcattttaaagtaaattttctaacactaaatttaaatttttgttcgaaattaattttgagaaaatatagtgtttttttaaaagataaatgaaaatttccataagcaaatccgatataattgtccaaaattattacttttcaagctcaatcaacaaaaataagttaatcaaaccgttaggaataattaagaaaaaaaaatgttaataacacgtttaaataaatgaccaataatcttattaagttctgaagtatcaaaacaatctgagaattctaatttttcaatttaaataaacacgtgataaataatacttataattaatgtttattaaccaaatatctttcaataaaaaattacataaaaataaacaactactcatattaaaataaaaaaaataacaaaattaaccccgatgacatggttaagaacaatatgagaatcctccgtacaaagaccattaaatctaaagcaaatcatgccttaatatattgccacggatattctaaacatttatttatttatttgaaaaccataatctaaacatttattaaagaggtgaaagacaccttattatcgattatagtcacaaaaaccacatttgatataagaggttaacgtgactgcctcgtgataaaactaaattcacataacataattactttactgaatatttactattaacagccctaataattagtccatattaactaggagtcactaacgctaatcagtacttactaattactttttggtatgttgtcacgacttggggaaagtattatttgtgggagagcatcgttattgggcactagtggtgcctaacacctttaaaacgtgtcgacttacgattggctagcgatactccctaaaaattattatattatactatatgggcctcgatacttaattaaaccaataacgatattgacacgtaggagggtgctttggcaccactggtgccttttagcatttgtctttgtgggagtaacaaaccttacaaaagggtgcttagaaaatgaaattacacgtcctattactggaactaaagcgaagaaaattgccatattattcaacagatttattacatcatagtttcttaatagagacgctccacttatttttgctccataatcaattcagcttctcgttctatcatcaagtccgttaaaaagaaccaagaaaattaaccacttgagaaattggaataa

SEQ ID NO: 195125 - DNA, 1604 bp, Cannabis indica
ttatatttttgtaattttgaaacttttaaatagtatttaattattttataaataaatatttaggttgtaaaattataaatagaataaattaaaaaaaaggttatttacagcgaaacttcttttatgtttttgatttttttacacaattaaatcacttatttttttgtggtaaaattatttccttatgtttaaaattctttgtaaatttgaagtgtcaattagatatcactattaaatactaactgcattattactgtattggcttctaagttttactttcatatatacacatgtgtacatagtgggtcatcgaattggtatttaatgaaaatatttaactgacacctcatatttaacaaaaaaaaaaaaaattaaggtggttttagttagttggggttttgtgagaaatccaaacattatttcttcatgatatatcattttcatcagtcaatttcactataaaatttaaatttaaatttaaatacttaaatataaatatttttaatcatatttttatgtacaatgttatcaaatataacaacaataataatagacatcaattattatcgagtaaatataattgaaacactaatattattaaatgtaacacactaaaatatttaaatatctggtatataaatatatatatttggcctatatttattattactttaaaggattgtttttatttttctttctcttatttttgaagttaatattataatactcagtgctagttttcctatagcctttgcaaaactcatcgtgatccttaatattattaacttgagcgtgtctttgaaatatttatatgaatataattttatatggtgtagaaagagatttttttttttaattaagtagttaaattaagtatataaattcagattatcttttattattcattattatattacaatttgatggtttaatatttttaaaattaatatttatattagttaaatttatttagtaacaatcaatgtgtaatactcattaagaagtattccatatctatgtggcagactcgagagactaggagtggcatatgtctaccctagaattttaatattagtttttttttatttacaatttagtcatttttttatatgtttttatatttatactttaatttggaaatatttttatatttatactccctttctttgtattttttttttatattatttttttaaaaaaaaaatattttcattttgtttaattttatgtttactcccccactaattacaaagaataagattattacaagaatccttcgtgctcgaattcttccattttatgcatgttttaattactctttaatcaaactcataatatttattcaattaccaaaactaaattatgggttggtagctatatatatttattccctttttgtttgaatgaataatatatattgtattttttcaaattaagagattgcatttaattggattttttgtcccacatcttttaaactaatatctatttactattgcaccttaaaaaaatctatttacaattgaaaaaaaaaaaatctatatctacaatcaaattcgtgtatttccatttcagttcgcgtctcatgtacgtgttcttaattt

SEQ ID NO: 195126 - DNA, 1243 bp, Cannabis indica
aagaaaaaaaaaaccttccaaagttccgaagaagctctttcggtcctgactttgctcattttcaggcatattaatattccttgaaaaaagaaaaggaccaaaaaatattaaagcatacacaaattaatggtaaaaagaaaagaaaacatgtgtaaaacaatctatgtagtgacttcattgagagttcattagtaatataaacatttttgactttataatgaaatatacaaacgactttataaggaagcatcggtgttgaattggaaaggccggttctttcgagtgttttacatttacattacttcattcaacaaaaaacaaatcaatagcatcttgtaaagtgtaacaagtttcgagaccataaaatcggataaacttgaacgaaagattactcaccataacaagctagtgctccggctaataaaagcattgctcctgcgaaaacttctacatatacctgcataaatcgataaagttatcgtaacaactctaatatatgttaatctaagaaaagggaaaatatagaaagcattctataacaatgccaaggaaagaaaatacaaaatgtatcaatgtgtgcgtagtgcatacccgagccaccactgtcgaatcaatagggtttttccccatcccaatccagattataacggcaaatgcgaacattattacaatagctagaagagttgcctgataaataagtactgagttatgcatctcgggaaaacgtagtaacatataacacttaattatgagctattgtacatattatttccgtaccaaaataacaattttctggcggcttcgaacatgaaccaaccggaaaggtaaacatcttcggtgattgtgattatctgcgtttaatgaattccgttcattaaatgtcttctctaacaaagattcctcagcactgctttcttcatcctcatcatcttcatcatctgactgatgacagagatcaaccctataggaaagtttattaaggcgaacaaaaaaagaaaagaccgagaagcaagaagacaccacttatagtttataatacgctgatagcaatacgatcgatttgagaacaacaattagatctaactaaagcaaaaattaattatacctccaaaccacttgagaagaaaggatatttaagatttgtaaaactacattcaaaaatgtatcttaagtaaatttggaacctttgaaacaccaaaaagaaaacaataccagaacgataaagaagaagaaacgctagcag

SEQ ID NO: 195127 - DNA, 2619 bp, Cannabis indica
aaaaaacagtggtagttatccttaggtaggtatgaatttgcatccgtgaggaagttcatagaataacatacaaatacattggaaactaatggagaagctaagcttaatgctaggtaagcgccagaaaattccaacgcttataaggaagactatacaatttctcattctcgtcactcaacctgacctaacagtctatcttaaatttcaacccaaagcctctcaattattttaaagttaattagcatatcagtcaattgtcttccaagtaataatgaatgttaacttttaatctatataaatttgttcattagcttaaatgcttcaccaaagtctactccataaagtgtttagactgaccacatacaaactcactgaggaataacaagtaaagaagttacgagcagcagctgagagctagtaaagggtcctagcaaagcataatttacctaaagcggatcctgggaccaggggggcagaaactcccagcttgtgaccccgaagcagactcttcattttggccagtggaagtccttcgaataaggtcagcaacacccttgacaatattcatacttctccgttgcaaagattatacaatatcagagctgcatggtcagatgagtaacatgaaatttcccattctttcccaccatattcaccaacctctttcttttatacacgccctagaaaagaaatttaagacttagagccaccatctcgattcactctggtgaattgataacaaaaattagattactgattcaacaaggccaacgacgcaacgtcagtacagctactcattgcacacataaaaataaacgaataaaaaaaatccctgttttgtttttttatccatttcacgctaacaacttaactagaaactgatcaatctgctaatagattgaacaaaaaaatcaaacataaatatattccgaagagaaaaaaaattcgagaaaaataagcgaaaaattaaatactataacagcacatgaacgtgtgtgtaatcatgtttaatacaccaaaattggcattttagttcaacgctttgaacaatgtaaacatataaatatacttaactaatttgaggatcgaattgccacttacctaatcagatcgcacagtttgaatttgatgtatattctagagttatttgttttttttttcttttttcttttttcttttttgaagatctgagctttaatttctaagcttcttcaatggcgcagtgtagaatcaaataaaaagcgaacgtgagggagagatgtgacttttagagaaagagatttagaaatattatatttacaaaataatcccgtagcttgttatatttgcatatttactcctgatcttgtatttcaatttttttccattcttattttatttttatattttttgaaaaaagagaggagggaccattcattaagattggcccccacctataaataaaaaccctcgcttatggcggaggaaaaccgtggttacaaagtgcaccaacctctaagagttaaacaaggtctcaaagatatgattacagcgagcactcccctaggatacaactaaagaactggaaacttaacagaggaagagactataatgcataagcgaaaatcttacaacaacactctccattctctcattaaatctgtgaaagaaatattttcaaagagcttagtcttgtacacccaagaagcagtccaaaatttaattttatcccatagggcctttgttgagctctccggaccttcaaaaattctattattacgttctaaccaaaccacccatagaactgccaagactgtcgttctcaataaacatgtgcttcttttactgcccccaccttgctcactatcatttgagaaaccacacaaggcataacccattgagtctcaaattcgttaaacagctttgtccagagattacacgcaaggcgacaccttaaaaacaaatgtgccacatcttccccacttgacttacaacaaacacaccaccccggtgacaagcatacaaatgggcgctttttttgcaatctgtcatgtacgtataatttatctagagacaccaaccacccgaacaccttaactttagaaaggtcctctgcttttccatagagtctttgtccaaaacacctcgccagactgcatggacgaataaaaccagtagaacgctgatttagaggagaagatcccactgggatccgaaatccacagacggctatcatcaaggatgttgagtactctaacatgttccaacctttgtaacagttgtgtcagactcgggatttccctgtccataaagttttttctgaatttgaagtcccagcttgccacacagtttcccacctcgccctcatcggcaataatctcctaaatacttgcattcttagccttagagatcactacaacgtccaggaattgctccttcaatgaggatcccccaatccatacatcctcccagaaacgtatatttgctccgtttcctactttgaacttcaccaatcggttgtattccccataataatctgaaatatctttccacgaccctcttggagatgcttgaaccccccatttagtatcccagaagttatatgctttaccatagtgacttttgattactttgtgccac

SEQ ID NO: 195128 - DNA, 1916 bp, Cannabis indica
ttttggtgatgcctagatcttgaaataacttgtacaaatgttgaaattctttgcctaagtcgagttgtatacttttgattttagttttaaacatacgttcaacataaccattgaattgttcaaagatagtagttgccttagatttggtttgcataggaaaaatccatacatatcttgtaaaatcatcaagaaaactaatatagtattagtatccatcaagagaaacatgaaaggagggatcccatacatcaaaatgcactaactgaaaagctgcagtagtcttattactaacagttttaaaggaaaactgatgtaatttttcatattgacaagaatcacaaaaatcaacattattacacttaaaattaggagaaactatggaaaagactttctttaaaacttttttggaggggtgaccaagatgatagtgccaagttgtgaaagttttggcgttgtcaaacatcgggttgcttgtagtagtgcaattgaaaagagtaggagtaccacttttattgggaggggtagattgaggtgggaatgaagtgactgttcttgaacaaggaagctgaaacttgtacaagtcctcactgagggtaccctgcagaagtacttggctggtcctcttgtccttgattaaccaagaaaaggaatcaaacataagaacaacattgtttctttggtgaattgagaaatgctcaatatatttttaaagatactagggacatgtaggatatcttttagaaacaatgaacgatttaaaaattttgtgtcaaaagagttagaaccaatatggagaataaggatagagtaaccattacccactatcacttcgacttttccttttagtcttctttgttttccagttgctgagcattaagggtcatatgatgggtggctcctgtatccaagtactaagtaatatgagaatcatcattttggcttgttgtggatatgagagcttaaggattattagtggtgtttgaagtagatgttccagaggattgaggaccagtaaatgttatgtcaaaacgatggtaacatttttgagcagtgtggccaacacatcctcacagttgacagcttggtctgttacctctgcctcctctattagtgtaaatggttcaacttcctcctctgtgagtccataattttctcaaccatagcattgacctccacgactagaacctccttgaactaacgtaccatcaaaatttgcttgaatattgtctaaaatagcacttatttgctgactaatttgcatttcttggctatacaacatgaattgaacttcttgaagagttaattggtcagttcttgaggtgagattgaccaccacagattcatactcggatccaagacctcccaagaagtaaagaattagatcctcatcagagatgggatgatctgcagcagcaagagagtcaccatacttcttcatcttgaggaagtattcatcaatgctcagagagcctttcttggtggattgtagaggccacaaacttgaagaagactagctctagattgagtggcaaacagttgattgaagacattccagatattagcagaattttgccaattgatgatgtaggccatcattggtttagatatagaattcattagccaatgcacgatgaattgatcaattctaatccaattttgataaacaggattaggaacattacttgcaagaaaatgatcaggagcttggatcgtaccaaggatgtatccacccaattcataagcacgaacaatagccagtactaaggatcgccagaaagggaaatttgttcgatcaagacaaaggtttagaggcaagagattgttatttagaagattggtcggtgctagattcagtgcagggacttgttgcttagctactggtggttgagttgcatcttgagcaggagcatgttgtt

SEQ ID NO: 195129 - DNA, 2870 bp, Cannabis indica
cctataaatataacatgacagaatcataacctgataactgttcataagtctatgatctgttagaaaatagaaaagagagactcctctctaattttcaagttctcttcttctctctctaaatttcgtccctatagtgataatagtaccttgcccactcatatcaagtcagtacccaatcatagtgtggaagattgtaaagaattccaacacttgaaggagattcaggttcacctcttgttattactcagcgacagaaaggaataggggttagagatttaaacggaaagagtcatattattccactaccaccaattaaggttttctacaactttatatgtgtttaatttattattttagaaaattcatatttagggtgttagattaatagaatataatcatacattcagattctggtaaaataacttccaacacaaggtagtgtcgcgacccacctgttttaaatgacgaaaattagggttttaaccctactgagaggctatatagtgaaccctcttgacacgttttaaaccaacaatcattagagacgaaaattgaagtagaaagtagctattgagacttttatcaatatttttcagcgagttcttttcttctacttctttcttatgttcttaattaattgttgtgagttatttacaatgattatgagtagctatactttttattaggttattaatggagattgtttgacactttattttggttttaatatgatttagttcttccccaattttctatgtgtatctatttcattcgtatttagttacttttaattgcttgatcaccaattaaatattttatggtttcaatgctaaatctgggaagtaagtattgattatgctatagtgaaatagacacaaattttgatatagcatgagagtacctataaggtttgtgtagcatttaagatttttatgcttaatgccacctatttgttaaatttatcacgagagtagaaagttagcatgtagattgagatttataagtcctagttcgaatataagtttctttagtaaatccactatcacatgaaaatcaaaatttgagaataaaattatattaaaccaaataaagtatattcaatcaaaattaatcaccttatgctttaatcatcattaattttaccttaattatttgttttctttatttttttagtcagatataaaatatcttttcttatttttaatgtcaccaaataaaataagaaatttaattgtttggtaattaattatagtccttctgggatcgacctcactcttgtgagtctattacttgtgaacgatacgtatacttacgtgctgaaaagttcacaaaaagtatacttagtttttatttttgattaagtatattttttgattttttttttttgaatgttattcaataaatatcatcattttcaattgaaatatatttaatttaagagctatcacaaaagaaaaatctttgaccatcaactttgtcaggaagattttctacacaggccacattagtatgatattgtttgctttgggcttaagttctcacagttttatttttggtacttttccaaaatgcctcatactaatggagttgttggaacatgtattaaaggaaactcgtgcctattattttgatgtaggacagattgataccccaacactcctctcctcaaaccaaggactacatactcgtgacctcccctccagcgaaaccacattgtgttgtcgctatcactaacgaaaaatcatgttctaaccataaactatttcaggaagattttcaacacaggccctaaacaccaatctccatcttgtaccgcgtcataatcatcaacgggacacgcttcctgattaccgcaatatcatgtagactttcaatacaagacaccatataaatagagaaattttcatggtatactaactttcgccatttttttacaaatactgccaggctttactttttactgtatttttttataagtttcgtactgcagtatactgtgttaagttttcactggtattctactggtgttttactggtgttctactgttgttttgagttgttctgctttatgttttactggtgttttataaaaacacagtatttttgaaaagattttcgtgtgacagtatttttgtaaaagttaatcccaattacagtatttttgtaagtttccctataaatatcacttgttgggtcctgtttttctactatattgggccgctacctcactttaattctcacattaatataatatttttgagcactttcctaaaaatctacatactaagagaattagtagagcatatataagataacttttgcctactcttcttatatgggacttaaattaatatcctaacaataattaaacaaaattttacatgtcatcatgtcaatttgtacatagttatatatgtcaatactcaaactcaatctcaattgacttttcttttaccttaccaaagtcgatgatgttatttagttttatcttactttcttcttcttcttaatcttctttatctttctttctagggaatttgagttttagacttgctaggactagtttgggacagttatattataaaaaattagttgtaattgtactgtgagaaaaaagtagatgcaacatgaactgtaaagagaaattgcactaaatatttgataaattatatatttgttgtgaattgttaagattctatttataatgataattatattataaattaatttattacaattacaaatatataaaaattatagaatttttatttttgtatcattatttattagtttttcttccaaaatataaatttttatgcatttgtattttcaaattattttttgtcacatttaagaaaaaaaaaatataa

SEQ ID NO: 195130 - DNA, 2196 bp, Cannabis indica
aaactaatttggtgtagaatcttctacgttttggtgtaacaactgtaatgattcacattaaatgtcacactaaatattccactaaataaatatatcttacttaaaagatattgattttatatcatttatattaataactaaaataactaattcatcatgtaatatcatgactactaataagaatttaagattttaaaataatttaatatcaaataaaatattaatatcaataatttaaacagcgaaattgttatgtgaggaaataattttgaaattagtttgttttaataataataataataataataataataataataataataaaactgagtaataggatggatattgatgatgactacaagaaatgatgataatacggtaatgacatcaactttaaatgtagtagcgactacaagaaatgatgataacacttattttaaaattataagatgagttttctataaatttattgtattctttatattttaaatctatattttaaatgtgagtattgtttaatttagttcgttattataatatacatttgaaaatattttttatgtgtttttattttatatatgaaaaattgtacgaagaattgttttatttagaattttttagagtagtctatataaatttatttattatttttaaataaatatatactttttataatattcaaacatataatttaaaatatttataaagagctgcacgcaaagtgcaacctatttactaattttgatacttttaagaaaaaatttaaataaaatcacactaaataatatattattggagatgctctgagtatttctttatttgtttaatgaggttcttccctataaaaaacaaataatataagttccatcaaaaattaaaatcgtagataatattttgcaacttgcccatggtaatgtttgtctcattcactctatttatttataactgaccattaattaaattacaagttaattatatatgttacatctaggaataattttctttttgtaaggaggtacatctagcaatttttaagtcttcgactattattattattattattattattattttgacaaaatatataaaagatatataatatatataggattatttaattactcattcaaagaaggaaaaaaaaatgcccccaaagaaacagaagagaggagaataagagtaatcctaattctatgtttaacagtaacaataagaagagaggaggatagagagagagaggagaaaggaaacaaatcataaaacatataaagaaaacaaaaagtgagagagaaaatggtgaccaataaaattgaatcgattactggagtgagccaagatgagaacagtagtaataattcaagctcagtgtcagggtcagtgttggttcaaaggattttgagaagaacagttttaattggagctgtggttttgggctgttatgttctattctcctccataagccctcatcaatttctcccttctttcttttatccattaacttccaattcctcttttccggttagtaattattactcaatactcttctcttcgttttatatatacatatcatcacaaaattaaaagttttgcttttgtttttttgtttttcttttcccatatttttcttcataaatttttcttctttattatgtacctatagtttgtacataaaaaggaatcttacatggtttcatttcattatatgatgaggtgttacatcgtttgatctccttcttcttcttttatataagttcaatacaagtgatttgtttgcctttaactttaaaattgatagaaatctcaatttcttggagaaatttcaatggctttagaaaccaaacaaattgagataataagatatttaataatatagtatatttaattaactctcttgttgtaacattttaaattatatattactttctaaataattagtgaatatcaaagaaattaatatgagagagaacagtagtgtatgtccacaatagaacgtttcatttagtggccgacctagcattaaaggttacacactagtcgtcaggtttctattgctgtctttttctggcaaaactgtcaattgaaaaaggaaagcttatatatatttttgccaaaaaatggcaacccactaggataagaattttcaactactcctctcaataagttctaaatgaaaaaaaaaaaaaaaaaaaagcc

SEQ ID NO: 195131 - DNA, 623 bp, Cannabis indica
aaaaaaagtaaaataataaaaattggtgggaagatcaaagtcaccttacgagtagataaataacgagtgaaaatgcgccacgtgtctacaagtggagtgtggggaccatgatgtatgacgtggcagtaacgtgattggtggtgacaaggtaagggcattggcgtttcttttactgtttttgttttaaaaatggccggaagagaagagtaaggactataaatataaaataatagtcgaaggtggacttctccgtctgcccaaagattctattattagtaatttatagtattttaattaggaaagtgacacgtgtccctcttttttttttttaaaaaaaaaaagttactgtatttaccagaatattaagtagaattaattagtaattaccaatagtactactaattgcactaaccaacacgctatactaaattcattggtctgtgtatgcatctaatataatgaatctacactctttatttatttatctaataaaaagatagtactatgatgtgactggccacaactagggtggcgtggaaatatatacccttgtcaactacatgtagtgaagtgacattttataattccatattaaattacattaatcctttaatatttctcta

SEQ ID NO: 195132 - DNA, 1846 bp, Cannabis indica
aagaggtgaaaactcacatcagctttcgaggactgttctttaacatgctcatacattgttctgcgtaaattacgacggtgatctttgtccccaacataccgtgaaactttaagttttggagcaaatctacccatctccgatacccaaccatccgttacacttagaggacataatatcactgcagattttttataaccgcagataaatataagtatgcatatgataaatctaaaatgatatcggacaatgaaaaatttcaagatttcagaaacttacaaaatggcccaggtgacatctgttgaaccttaatgtagctcatcaaacagatagcttgcaaagtcttccctagtcccatctgcattttattaaagccataagcatacgaaacaaatcttttatggcatttgttcttttacggcactacagactacagtaatgctttgatccttcatctcggttccctacagcttcttcagtaaacaaatatctatacaatacaatattatgacaaacaaaacatgttcattgctaaataatccagtaataaatacttggttgattctttccaagacggattagcagacatgcaatatgtttggtgacaatgaagaaagatagatataggaatgagagagatattacccatggaagaaaggagagtacttttttcccaagagtttggtatgagaggaatgaaggaaaccaaattcatcttccttaataggagggagaagtggaagagtaagttattatagttagtgaccattctaatatatgataggacaattctttcctaaaatctctccgatttagaggaattgaaaacttgctggaattgactattttgaaatcaatgactaatctccacactgcaaaatatcaatcctacaaaaatgcatcttccccaaacccaacccatcttcctccctcttaccagatacactataaaggctgagacatcaagattactacaactactcaacttgactaagccaattattagattaaaatcaattcataaacttcaaactggatttagacaatgaaaaaattcaaactgagacacaacgcttgctccaaaatagattcatgaaatgcagttgcgagttcatgaatatcataagcatagaggtttagcagaataaaaattaaacctaaattttaattaaaaaaattaaaatcaccgcttcagattttcagagagtgagagaagttgtacctcgtctcctgcaaaatcgacagcattccaaaaaataaactcagaaatccacaatcccacagtttaatctcctttttattagaactatacgcacattttaaaagagaaataaaacaactgaatcgaatttcccaacataatcaaacgacagataaatcggagtcctcaccgagaacaacgttgacgccgagaaaataacgccgtacgagccatgaaacaccttcgacttggtgaggcttcagagtggcagtcacgccaagttcttcaggaatcactagctcttcggcggcgcgtctgtcagcgttttcgatgaatttcgccgcagcctggagccttcgctggtaagccatctccctctccttctctctctactgtgtcagtgtgttcgaaccgtatgcaagagagggaaaaactgagtcaattgacgaaactaccccagcaaaataacacagcacgccgcgtttccgctcgttggaaatggggtatcccagtactttcgtaattctacgtggcgggtatttgctgctcttgcacatttaattagaagaatgcaaattatagaagtcaattcaaattttcgccgctcttcttttatggcacgttcactaaagcgtaatcgttatcgga

SEQ ID NO: 195133 - DNA, 1184 bp, Cannabis indica
atctttttccttgtagtaacgcagacagcatatagaaatgacaagacttaattttctttcacataatgctctttatgatcttaccgagcaaaaaggtgaatgaactctatctagtccatggtaaacagttaatccatcgacacaatttttcaagtacatattcagtcatactaggaatagtagccaacatcaaaattacgataatttatgtttacccaagatttagtacaacttcaatagcatgtactcctttagtcttgtcctccctgaagggaaaaataatcgattactaatacattaaattatgttcttaacataaagactcaaagttaacactatgttaaccactaactgcatctggaagacaattgactaagaggtgagttatcacattaaagtttaaactactgctaattcatcaaattaaattatattcatttattttcttagttatcccaatctcattttactaaaacttttagcacaatacgagaaaatggtttggtttgtttcaaactttcgggaaacagcccagaaaaaatcatgtaataatgtccaatcccggaccccaggtatgatgattcagcaatggtgagtgccatcaaataaaaatcaaactatagttaaactaaaaggggttaaaaaacgtttactgttttttaatttcaggaacaaataaaactgtccaattgaaaaaataatcaaatttaagtatattcattaattattagaaaactacttgtacctgagaagctggagtctcagcaaacttggaagcggccaactttgcaggcgatccaccaaataattgggaacattctgtgtatgcagatcctatgccaatcccagcaccaaaagctacagatgcccaacgagatacaggactccctataggacaacacaagacagattaattttaagaatactaatatgaaattttaacagcataaactagcttgcatgcagattccaggtctgcattatactccggacacaaaaatactaatatatctcatgatactcccgatacaagattccaggtctcacagatgaacattgaaaacagctagatctacatcagtttactaatgattacaggccttccaacttcaatcattgagaagccaagtatgggataaaacaaaatcctgatctcagcagaatcaagtaccaagtgaccatgc

SEQ ID NO: 195134 - DNA, 1310 bp, Cannabis indica
ttcatcaatattttggacctcaaaccccaacccttgaccttgggacacggatccggacccaaatccaaatcccaaacccagacatagatctcggagcccaacctcagaccttgttacttgaacccggacccaaacctcgatcttggacccagacctcgaccccgatcctgaccccagaccttggacatagatctcggaccctaaccttggacatagatcccgaacctcgacctcagaccctgttacttggacccaaacccaaaccccaacttcaaatccggaccctgacccaaaccttgacctcgaacccaaacctaaccccgacccaactggggtccaaaccctgacctcgacctagacatcagacactagacttggactcgaaattagacctcggacctcacagttagacctttagtccttggaccctggacctagaccccaaaccccgacccttgaccttggaccctggacccagatcccagaccccaaaccccgacccccatcttggactccgacctcgacctcgtaccttgaaccttagatggttagaccccgaacccttcatctgcatcccaaacccagagcaagaccctggaccccaaactcggaaccgaaccccaaatcaggacctcaaccctgacctttggctcggacctagtctcgggccccagtactggacctcagcctattttctctcacctcaatttcttatctctcaattaaataaaataaaataaaaaataaaaaataaaatttacaaaaaatatttttaattttaaaattaaaaataaattagttaccaaacacatttttattttttaaaaataaaatacaaaattattataaattgatttagcactttaaattacctacatttttcaaaaattgtaaaatattaaccgcacaattcatattagtaccgtacaacaaagctccaattttatgtagtgttaacataagtgcctcaattattttattttattttctttgaaatggtacaagtgccccatactactttttatggaatttttcttgttggtagtcctttttgtgtataaagttgtgttgagagaaggataacaatcacctaccacccctcaaatggagtaaatgttctgaaacacccaaacaaataattagaagaagaaagataattaagttgatcttaaagacaaccatatctacacataaacacaatcaattaatatacttaaatgatcaatacttctcagcagacacgtctaagaaaaattgctttgtcaccaatacagggttttttttttttttttttttttgataaatgatac

SEQ ID NO: 195135 - DNA, 1731 bp, Cannabis indica
atatcataactaaagttttgctatatgagttgttgagtattgactgcaatttcatcggctttggtattaaggtggttatagccattagtgcaattaaagttttgtaataattgttatcattctttgactttaatttgattggttttggtgatatgatgattagagccatgactacagagctcttggatatacaacctagtgaactcaagtttacatgtaagtgaaagttaaaagatctctctttcaattatttgtcattattttccttactaatttctcattttaagtcattgatcttgacatccatttcttttgccagttgagttgaagaaacaaagctcttgtgcaatcattcttggcaacaagtctaatcaatatcttgcttttaaggtataatgatttgtaatgttttctatattggaaagttcagcattgtttttctttataatgactgatatgtttccatctagaattcacatgaaattataggaaaatatggttggttgtggtgtttatatgaacttcaaaatgtatttgcaggtgaaaactacttctcccaagaaatattgtgtaagaccgaacacaggcatcataaagcccaatgcaacatgtgattttacaggtttttatggcactgcatatctttttcaatttacattcacaaaatcatattatacaaccaaaataagttttgctataaatatgtgtaattgtctaatatctctaagaaaaagagggacatagtttcactgttcatttggttggtgcagtgactatgcaagctcagcgtgtagctccgcctgatttgcagtgtaaagacaagtttctgattcagtgcacggatgtttcggctgaaactacagaagaggatattacatctgaactggtaggagtttgttgtgattatttgctttggaaatattgatcttatgtatgtacttttccatccaaaattgttcttatttgaacagttttcaaaagatgggggggaaatatgttgaagagaggaagctaagagtcgtgctcatcagccccgcaccttccccagtattgctaccgaaaaatggagaatcaaagcaagatcaatgttatgaaactttagtttaaaaagataaaagttcctagtggacttgaaaatgtaccaccacctcacaaggtaagataatttttttggtagtttattatgtagtcttgaacagttactaaaaatccattttgttaactaaccatgccggtattgattctgatcctccattgttctttttctttttggaagattgttaaagattttgaagaatttgaaccaacttcagatcagagtgagttaagagcagacaatgaaatggaggccagaaccactaaagaggatgtggaagaaccaaaaccagcaaaggatggttcattactgaacctaaacaaagatttgaaagagttgacatcaaagttgaacatagtggattcaaagctaaaagaggtcagctttctcctcctataaactcccatctgtttaccttattatctttttgtatacaactgtattgttggatgtcattttgagcaagttttgattgaatatgatcattctttctctcaggctgaacttactatcttgaagctaacagaagagaaaagcaagaacatcaaagagagagaaatgcttaagcatgaattggtaagaattatcttgagcgagtcaagtacttttaataataatgttacatttctcccatg

SEQ ID NO: 195136 - DNA, 846 bp, Cannabis indica
tatctctctgttatgattagaacaattttctacaactgtgtggcattttatgttcatagtagaaatttatgactttgagaccacctatcactatgggatttaatatatcacacagtgccaagaagaatattggaagattactataggatttatattccgatatttgctttctgttgtaatctatattcatggtagaaactgtaacatttttaatttatgttttctttcagaggatcaccattaaagaaatcaagaaccacccatggtttttaaagaacttgcctagggaactaacagaagcagctcaagtcatgtactacaggagagaaaacccaagcttttcaatccaaacggtagaagacatcatgaagatagtggatgaagcaaaatctcctccaccgtcttcccgatcggttggaggtttcggctgggttggagaagaagatggcgatgcaaaggaagaagcagaggctgaggaagaggaagaggaggaagaagaggatgagtatgagaagagagtgaaagaggctcatgcaagtggtgaagtgaatatcagttgagtaccaaatctgttcattaataggaaatgaggaatttcggttttgcaagtctatttgtataaaagtcttatcttctgattagaacatgggattgaataaatgtttgtatatttatagtgttcttgtgaagaaattgtgtcaactgtatgtagagaaatgattagttttcttgctactcttacctttgcaagttttaggatttgatcagaagggttgcttttgtgagtttgagtcctattgctacattggccattatgaaggaattcatttgtgttgttaggttttg

SEQ ID NO: 195137 - DNA, 935 bp, Cannabis indica
taaccttgtactttcttccacatgcgcccttgtcgtcccatatggctttgcttgctgctgcgatcataactccttcctctttgtttccgtcgcaagcagacgctgtaattcatacccaatatttttattagtacgttttgtcaatcaatggcggcgttataatgaatattatttttgtaattaatgtaattttaattatagtactatacatcactataattaatgattatgtcaatatcgattttttttttggagagatttatggatttaattttttaatttcaaagaaaaaagtattacaacaaaattttgttattataatatttcctgcatgcactatatttcttacactacataaaatggatttttcaaattattcttttctcctatatattttttttagattaactaagtttttttttttcttttaggtaataactaagtttatttgtttttgtatgttgaaaattaaagctaatctgcatacatatagaaaacttcattgctagctacatattgttgctggtgtaattcaatatatatcggattttacacattttaatttaataaacatagcataagaaaactgctaaactataacatgctacgtacattaattaatataatattagacaccttaagtattgaaaataaaaaacacaaatagcaaaagtaataaccctacctataaaaacacactcatctaattaaatatatttgtatatatataaatatataaatatatatgtatacttacgagtataaggaggtgtgtagaaagttgcagttcctttttctgcaaatgagattaaggattggcatatcatgatcatgcctacaaatactatgattactctcattgttgccatattgatgatcaatttgatacccaaattaataattaatacgtactaaattaaacagttatatattat

SEQ ID NO: 195138 - DNA, 1677 bp, Cannabis indica
catatcatccacatatactttcatgtctttcctaggacgtctttgaacattttgttggccaatctttgatatgttgctccaaagttctttagccctaatggcatgacaatgtaacagtacactcttttatccgtctagaagctagtgtagtcttaatctactacgtgcatcttgattcgcaagtaatgatgcagatgatgacgtagtcaccttagacgtctcaggtcttagaatctcaaatgccacaaatgatgtcgacacaaaaaatgtcacagatgccgcaaactatttagatgatatcgacaccacaagggtagcaatatgggcagcagacatcacagatattacagacacaacatggacaacatacatctcaaataatgttgacacaacacggacaacatacatcttatatgatgccaacaccacatgggcagtagacatctcagatgatgacgagttcgcagatgctgccagactatccacagatgtcagatattcgtagagagtgatgatgacgacactacaacaaatttcttttaattttttttattttagttttataaactatcgattttatatttattgatgttttatgaatactcactttactcttgtagtaagtagtcttaatttaataatatggtaatatttgtgactcttaatatttaatatgaaaatatttaattttttatttttaattaaatgactttatatattaattaattaaaatatgtaaataatataatctatttaatttttataaaaaaaaaatcaaaatagatttataatttttttcttttaaaaccgagtctaacgacaaatccaaaatcaaaaccaagaattgatatcaatggagagaaatactttaatattagttaatcataataacaataatatatgatattgaatacaacaaatcatacacatatatgtcaacctttacaagtgtactttgtcttttcttatgtgcatatatagctaccattatatagcagtctgtttagacagaattttcttctacctgatgatatgactaactaataatattgttatctaataggtaacaaaatggatatagaaattaattaattttcaaaagagcctcacacatcttacaatgaattaagatgaccaaaaaaataccataagcttagataaagtaattttaccatgtcctccaaagattatagcctcatgaatcatgatagcaactatatatatttttctcttctcaatccattagggataattttttttttcttgtaaggtccattagagataatattattgcttattaaaatattatatgttggaatataaattgataatgagaaccaaaaaaggtcaacaagaagatcccaaagagaaattgtgaaaggattttaaatccaactgtaaaagtctcttgtaccatacatacacgtcaagatcgtcctcattgaaaatctagctataccttacgctaagcgctgcaacaagtttgctgctacttgtccatattatattattattattattattttcaatttaaaataagtttgtagagaattggtaaatgtacattatattttctcacattatatattacacaatagtgaccgtttggcttttgttttcttcatgcatgcgtggatcaaatcaaaatgcatgacagttgctaaaacaacagtagca

SEQ ID NO: 195139 - DNA, 2144 bp, Cannabis indica
cctctgcttatttgtataatttgcttctcgaatcttctgttcgtgctagaaatgtggattttgtgttatggttgtataaggacatggtcgtttctggggtcgacccgcaaacttatacttttaatcttttgatcagtgccttgtgtgactttggtcatgtggatgatgcacgggagatgtttgacaaaatgcgtgacaagggttgttgtccgaatgagtttagtgttggacttttggttcgtgggtattgtagagctgggcttagtgaccaagccttggagattctggataggacaaatgatattttacctaatagggttgtgtataatactttaatatctagtttctgtaaagaaggtaggactgaagaagctgagaaattagtagagaggatgagagctagcaatatgtttccggatgttgttacttttaattctaggatttcggctctttgtgactctggcaaaattcttgaagcttctaggatatttagagatatgcaaatagatgaagtgttgggtctgcccaagccaaatatcataacatataatttaatgttagaaggattttgcaaagggggaatgttagaagaagcgaagtccttgtttgaatctataaagaggaaaagtgatgttatgcatttggaaagctacaacatatggttgtcggctctgatgaggagggggaagttgttggaagcaagattgcttcttaaagaaatggtagaccaaggaatagagttgagtgtatgtacatataacatcatgattgatggcttatgcaagggtggaatgatctctgatgcaaaaatggtgatgggattaatgataagcagcggtatctccccagatgcagtaacctatactactttactccatgggtactgtaggagagggaaagtttttgaagccaacagagttctgcaagatatgatgatgaataattgtgctccgaatactcatacttgcaacattttgctgcacagcctgtggaaggaggggagaacgtcagaggcggagaaattgctgcaaaagatgaacgagagaggttatggtatagatacggtgacctgcaatattgtgataaatggtctctgtaataatgggaaattggacaaagcaattgaaattgtgagtgggatgtggactcatgggagggcagctctaggccacttagggaattcttttattggcctggtcgatgatagtaataatggtaaaaactgcaggcctgatttaattacgtattcaatcataataagtggattgtgcaaggctgggaagcttgatgaagccaaaaaaaagtttgcggagatgatggggaaaaagttgcatcctgattcaatgatatatgatacattcatacatagtttctgcaaagaaggaaagataacatcggcatttcgagttttgaaagacatggaaaagaaaggttgcagcaagagcctgcaaacttacaactcgttgatccttggtctagggggtaaaaatcaaatatttgaaatatacgggctgctagatgatatgaaagaaaaaggagtttctcctgatgtttgtacttataataatatgattagttgtctctgtgaagtgggaagaatcaaagatgccacttctcttttagatgaaatgctgcaaacgggtatatctcctaacattccttcttttaaaatactaatcaaagctttttgcaaggcatgtgagtttgaggatgtacaggaggtatttgagatagcgttgagcatatgcggccataaggaagccttgtatagtgtgatgttcaatgaattttttcttggaggggaagtattaaaagctaaagaaatttttgaagctgcattggatagaaatctatatgtggggaatttcctttataaagatcttattgataaactttgcaaagatgaaaagttagaggaagcaagtggcttaatttactacatgattgaaaagggatatgggtttgatcctgcatcattcatgcctgtgattgatgggttgggtaagaaaggaaacaaacacgaggctgatctgcttgctgagagaatgatggaaatggcctctgaaggtagtgtaaaagataaaatttacagacgaggaaggattgctaaaaagtcacgcaagagtggtggaagtgattggcag

SEQ ID NO: 195140 - DNA, 822 bp, Cannabis indica
aaaaaaaagtgtaacaataatttttgaacacaacatttttgcaaaaatatccgctgaaataatatgcaatctccaacctgtgaagagtaaattcttatgttattaattataaaagaaactaacaatcacaatcgagacagggttacaatttatagtaattatcttgatagtttttttttcttctgtttctttttaggttggtgtattatataaagcatgtaagatagcttcaaaactgacccacattagcttctacaaaatgatcaacagaaaaaagttcaagagtataatttacaatgtgaaaaattaatgattgaaagctacaaaaattacaaaccgttacatcaaaggactcccaactgtgttttgagaacgacgcggttcattgttgatctgaggccaactgaactgtttttccaggcattattcgaacgaatttgaccctggtttcattcttcatcaccaagttgaaaatgatccttaggtattgcaattgaggtcaaaaatgggaagaggaagagcattttgagccctgtccttttttctttcccttgttaaactgtgattgtcaaaagttctgttcttgtatcaattgctgctgcatcagaattggcattatcatgatgatgactcttaacattactactgatagatgttcttgttccaggaagagggaaaccgttactcaaagtgattattttatggttcttggactcgtctgatgatgattctatgcttgcgagtgtttgtttaagctgagcccgctggcagacaattctacccttgttccatcccgggaaaccaaaggatgaagaaatgttt

SEQ ID NO: 195141 - DNA, 1211 bp, Cannabis indica
cccctagaaaaataatacatttatataaatataatgaaaccattaaaatgaagtgattatttagaaatataacaaaaacaacaaacaaaaaaaaaaattacaaaaatacaattttgtgcaaattatttttatattttatttacagaaaatacatccttttaatgttttcatatgttatactttgttaattagttgttggttttttattattttaaaattgtagatattttcttattacttttatatatatgatttttttttttattttcatgttatttatatagaatatatataaaaaaaaaaaattgaacaaatttttaccaaaaatgataatttgtataaatttcccaaaaatgaatttattgtaaattaactatatccccaatacattgttcagcaaaaaattgtaggaggcttttcctttattaacattatggtgaaaaccttcaagaacaacaagaataacactactttttgggttctaatctccttgtctaacacatggagaaaaatctatcagaaattagaaaatttgataattattagcctcagctataagccttgtcaatccgaggggccaatcatcttctctggcaccacaagattatcaaattcctcaatggatagtacgccaagttttagtgcagcttcctacaaaattgtgtagtagtaagttttagttatccattcaaagttgcacatgcaaagcccttaaaatttaataagtttcacaaatcatcacctttaaagtagttccctctttgtgggccgttttggcaacagcagcagcattgtcataaccgattttctgtagggaaggcagaaaaaaatgtgttaggaaataaacaaggtataacaaatcaaatgtaaatgttattgtaaagggaatagtggtcagagaacttacagggttcaatgatgtaacgagcatcaatgactgagaatatagcaaacagcataattcattagctatttgggagttaaaatatagcataagcataacacaagcagtgtagtgtatcattaacagaatccaatcaactgacctcatgaagtaatttcgcaattctctccttattagcttgaattcctctaatacagttcttttcaaaaagtaagcagatgcatccccaagcaatctcaatgactaagggaaaagcaataagaggaaaagccagtcaggcaagatgcaagagcggaagctgtgaaac

SEQ ID NO: 195142 - DNA, 494 bp, Cannabis indica
caaacacttttattaaatatttataatatgggatccagaaatctagttataaaatattttacttcataaagtacccaatagtatcgtcgaacaacatttacaaaagcatgacaacgatagtcccaaaaaatgtaaacccaacaagtctagacatccaatatatcttcaccaagcttccaactaactgatgcttagcttaggtttttcttttacctacacatgcaaataagtgtgagtcggcaaattcagtaagaaaaacatgtataattatcagacatttaactaagcgatcatacatgcatatactaagatctgaacatttgtatttagcattaatcaatattatccactaccctttagcatcactacatattagtatttaaatgcaaactctatatacacccatactattatttttagtatacttggtaaaggatattataagacatgaaaggcagattcacatgtaagtgaggtgaggcagtcgtcctcct

SEQ ID NO: 195143 - DNA, 1282 bp, Cannabis indica
agaaaagctagacaactttcctttcaagtttagatacaaaaaatatggtaaccaaattaaacactccagccgaaatatacaataaataataaaatatttttgtacaattaaatatgccaaaaaatggaattaatagggaactttgcctacaccgaattcgggcctccacattctctataaagtgttcttcggccatagcttaagacagagggaggaggttgaaattttatctgctgaaactaattaaaatccatcttttctttgacaaaattcttgatttggacaattttcttccaataccaactattatcttgtagagtctcataatttcactaatctttatctttaatgtaaacagattgaacacatttaacttaaagaattttttttcttaaaagctatatcacatacatatcttcccattgttcctatgttccaattcttcatattctaaaaacataactatttttcattttcttggcaaataaacatagttccaagtaacctgtcctgggtattagaatcatacatagtctaagtttgtaagcttttagttcagttagtggttaacaattgactctttagccagctaaccatgttagttagtggttagtgttggttagtcgttgttagttacaactctttttaattaagctactcatttttctaaatgcatatataaagccattgtattagacacaaaagagtaagcttgtacaaaaaacattcaccatatgaagacttgaaaacaatgactttatatgtgcatttggaaaaatgagtagtttatctttgatgactttaaatagattatcttttatcttgaaaacataaatgttaaagtagaaaatgaagatcaagcgatcatatttttgaattcacttccaatatatatatatgagcactttgtggacattgtgatgtatggaaggaaatctttggcattagatgagattcgcaatgctctaatatcaaatgatttaaagaagaaatgaaaacaaaaggatgaaatggcaagggaaggtccattgagaaaaatggataagagagataatagggttcaaaaaagtggaaagaatggaaaattttattcaaagtacaagaagaagtgtaatatctgtcataagactactcatttgaagagagattgttctaaattggaaaattcactgaattgggaaactcaaggaacaacaagaaatttggcaatgttgatattgcagatggaggtgagagtgagggttatgactgtgatggagttatggtggtatgaaatggatac

SEQ ID NO: 195144 - DNA, 1148 bp, Cannabis indica
aaggttgaccttaaaatttagtaggtataaaaaatattttagatctttatttagagaaaaatataatattttttaaaatcaataaaaaagaaacttataattttaaaaggaaacaaaatattttagactactaattaagtaggccctagacacaaacctaactcggtcatgcctaaaaccgagcttgattttatattacaacactttgaataattctgattgaaattatacaaatttaaaaataaataaaaacacaattttatagttaggaaacacaaatcaaaactttaattacaaagtcctacattattctattacattcgagaattatattgaattaacataaaataagtataattgtttttttttttaaaaaaatgtggtgaatcatattatattttcactttttgagtgtatgtgtcacaattatatatatatatagagttattaaaacacaatatgactagctataaatacatatattaaagatagagttcataagatttttgtagccgcttccaccaaatatatatataattttgtcttttatttcttcataccatgaatttatttatttattatttaattatttatagtaaacttagacttttggatgtatgtaataaatagaacaaaaactatttttggaattatttatgaatttatatttagtgatctcatgcatatacttctcgattcttcataaagtcaataactttacattagcaagttattaaataatatttaataatccaaaactttaattaattaaatgatagttttcttaaattcttgcttggatactaatcaagaaaaatactaccgttaacattttattacaatctattatttaatctttgtgcctaaaattacatgctaatttttttttaaaatttgtctctcctaaaacgattatttcaaaataattaatagataataattaggagaggtgtaccagtagcgagcagaagcaaaattattagatactttaggaaagtttgactagaatcacacgtgcaagttctcctgcatgtggctcgatcgtccgtgataacttcttcggattagtgtgaactagtagactgatcactaagtggggatgcttggtcgtgatatgttattcgttataatcacaacattatctttat

SEQ ID NO: 195145 - DNA, 1602 bp, Cannabis indica
gtaaagccaaatagtcaagatggaaacattttactctccaacttcattcaggttagtaattaattcttaattatttttcattgttttccctaatccaaatcgaatctaaaagaaaagccatgtagaaattgtgtaccctaagaattattttggtcgcaattttaatattgtgatccataaattagttaaactagaggatgattttttttttatgtatccacctaatttgtcaatcttgttaaaaatgatattcttgattagattaagttttgactaagtgtgactaattcaattgtcagtatttgaagagcttaaaacaagagattgtacaagaaataccttgtcttccagaattattgagtgacctagctactattacagaggtacaatattatttattcttgccaaatataaataattacttttctttatcatatagacatatttcattcttatattaaaaaaaaaattgctatacagtaatgctttgtaaaatgtacaaattatacttatatgatttgcacatcatatattttatttttaaatatttttaccaactatgattaactttttgtgtccataaaaatatttataaatataccctatgcattggtatttttgtaatactttatagattaattacgaaaaaaatcccaaaagaaaattgtaaaaattaccattgtagtggacaatatatctccattttaatagtttttccaaattaattaattagatatttgatatgattgtgctaaatgaggattaaattttataatttgcaggccacagacttgaatgaggatccacaaaatcaagaatctgtagatggaaatacaagggtaatagaagaaggtaataaagtctagatcgtttttttttttttttcagttaatgtattaaatattttgatagatttcataaatttttctgatataatttgcagatgtgggtggaaattgttgtccatggtgtaatgtgagagttattatccatggaaatagtcctaaccaaaatacaacaaaagggaaacttgtatatttacctcccaccattgaagatctttaccgtttggcaggtaaatataggctaaataatttttatttttatggatttttacttttggtaaaaattacaaaattatgattttttttaagagaaaaattaaaagaaaaaaaagttaaaaaataacgtgaaaaacaattttaggtagctagacctctttagtgtaattagttaccgtacaatgcatcccactaaaatgagtgtattgatataactcctaattgtttcgaaattttaactctaatttttttatagttgtgtacattatagttatttaagacattttgtgaaattttgagaaattcaaaataatttataatataaaatttaatgttcaaactatctatttcacacacgtataaaataaaaaagtcacacgtgcaataaattctttgaaccttgttttcgacatgttaaatttttctaaatttctcaaaattttacccgatgtcttaaataattataacgtatacgaccataaaaatattagactaattttttttagatgccgaaacaaataaggatgcatcgatgtaccta

SEQ ID NO: 195146 - DNA, 1958 bp, Cannabis indica
gcagacatttgcgtcgtaaatacataagtgattcaaatcaaatacatcaaaaagctaccaactataaccaaaaccaaaatatgaaaattttcaaaatcatttacataaatataagttgccaaagttaaaattatttttttttttgtaaaattttaaaatttttaggttcaaacattttttgtagtgaaaattactccacaaaatccctccattacttttgaagaggattcatatctcagttcttacccctcggccctcactgtgatttgaaggctggctggaccaccacacccgaattttcccaccttctccaccacctcgcttctgatggctccgcccctttcagcaacaacaaattggtgatggtgaagccttcactctgcctgttcgccaggtttgttctctcatctctggtctttcaagctcactctttttcaacttactttgtacttctttcaaattaagggcaattttgtttattttcttcggtttctgtatgtgggttttgaagattattgtgaaaataaataattgcgtttctttacttatgaaactctcaccgactctatatgatgtatgtacccatcacttttgtatttcttttgcgtaatagataattcatagacaaaggacattttggttgtcgagtctagtttattcttgattgctattaagaaataataataaaaagttgacatattgatgatattatcattattcttatgcgatttttctaattgctaagtgctacttgttagagttcattttcaattattattaccaaataagattgttgctacttgttagggattagtttgagttgttatcatattgaattgaaaaaatttcatgttattattagtttctgagaatcatcaaattgtggaaatcacactgttgattgtaggtgaagtctggctggttttaagtggtagattttacattctaatgaagcgactatagcaggtactagggagggaacactcccagttttggttggtataattttctcaagtggtttacaatgataacatattgttgtctattgaaattgacaggtcttttttcacaagatgggttacaaaattgctcaaatccgccttgttagttctcatcctgaggtttatgaaccttgtgatgattcatttgctcttgttgatgcactcttagccgatcgatctaatctaatacaacataaaccgaaactatgtatggaagtgggttgtggaagtggctatgttatcacttctctagcccttcttctaggacaggagtcttcatctggggttcagttttttgccactgatacaaacccttatgcaatttctgttaccagtgagacattgaaagcacatggagttcatgccgagttgatttccactgacattgcttcaggattggaaaaacgtcttgctggattagttgatgtaatagttgtgaacccaccttatgttccgacccctgaggatgaagtcggtcgtgaaggaattacctcttcttgggctggaggagaggatgggcgtagagttattgatagaatcctaccagttgctgaccttcttctatcagaaaaaggctggttatacatggtcactcttgcatcaaactttcccttgaagatatgtcttgaaatgaggcaaaaaggatatgcatctaggattgttttacaaagatcaacagatgaagagagcctgcacatcatcaagttctggcgggagtctgataaacattgagaactaaaccaaaagcattgttgagcctttgttttgaatcattttggaagcagtagcagatgagtgatataataatgtcttgaaaggttttttatgcctttttcgaatggaaacttcactattatgattgacttttacaagcaatgaatttattttcctgtacaaggggacttctatctttcccctttccttttcatttcatgcccaatatttagtgacagtgtt

SEQ ID NO: 195147 - DNA, 3448 bp, Cannabis indica
attagataatgggttggtttagaatgattctcttccttgtagtatgatgctttgtaatcttttcccttatcaatgaagcacaagtttctttaaaaaaaaatatatatgtaatgaatagtcctaccacaccacggtagatttgaaaacttagtgaaattatccacaaaagaaaggatgattcgaaaaaaaaaaaaaaatgagtcaccaaagttgaaagttcacttcacagttcacacgttgatttttgcaataatagtatttgcgttaggaatctgacaaataataaaattgagatttgagatttgcgtttggctaatgtcaaacagatctacaacaaccaaactaacctcatttcccctccattactcctctctcctcttttagtccaaatcgtcaacttccattctctctctttctctgcacaattgggtttggaacgagggagattctctctctctaacaaatctggagaaatactgaaactcccgaaatgggtaaagggtctttgatcatatacataaccatagcattggcggtgctcttgctggtttctcgagctccaaggaaatcctcctcccaccaccgccatcgccgcctcaaactccgctccaatttcacattcgctcctcccactcttccccaccaccaacaacagcattctgctgctgcccaccacgagcccgttccctttgatcccctcgtagccgacctcgagcgccgccgtgaggacagggagtgggagaagcagtacatcgagcatactcacccggaattagctcaccacgagcctgccccgggggaggagtacatgaacgccgaggactacttaaacgatgaggagaagttcaatgtgaccaatcggttgttggtcttgttccccaaggtggatgtggaccctgtggatgggttcgttaccctcgacgagttgactgagtggaacctcaagcagacccagactgaagtgttgcataggaccaagagggaaatggagcttcatgacaagaaccatgatgggcttgtttcttttgctgagtatgatccccccagctgggctcgcaatacaggtagctatatctcttttctcattcttatattgattacatttggtttttacatgtttcccatttttagattagcttagctggtattaacatccgtggaatgagaatatgatttctgtatattgggtttttctgatctatttctgcttgatcaaactactcaaactgacaagtttctgctctgatcttggattgaatttgcttaacatgatccaagaaagtggccattgttaaaaactagtctacattgttaggcaaatgtattgtgttgtagtctacaatttcggttagcaatgaattaatgattgatgatatggaggagatataatgatgatgtaaggattataatgatattcaaaactttgagaaaaatataggtggggcttaaaaccttaccaataaggttcctttgattcttaggataatttctgtcccagttgtgaagtttcggttacatttttttgaaaaaaacttgatttttctgttttaatgttaaaaggttgattacaaaattttttaggttggtcgacattgggagtgcattagaagctagtttggagatcatttttagtggttgaatttgaaaatctgcatgagctcctcctttcttttcttttcctcttagtggttataaatagtagtggaagggaaggtgcagctggttttgttaaagaggttacttggctttgaatcataggacttgtactaatccaccaaaagggagaatgcatttttagttctcatatatttgcaaggttcctgttcctttacaatgaactgatcatccatagtgtgccctggatggtaaaattgagaatataatctagggactggctagtgtgtttgatggctaattggaggacgcgtgattaaaatcttctattcaatgcaataattcatatactttagcagtagctatggtacttatatcattgctaatgtgaagatgtcttaatttggattcttcaaagaaacaaatgctgaatccgtgaaatgcaacaacgctcaatgaaattaaagaaatgtggaaactacagatttgcatctattatataacattttatctagtctgtgaaatccactaccaggcagagagatgtgctgctttatgatggcaaagtttacaataatatggtgcttcaggctttcattttaattaattttaaagccgtcatatctatatggattggtgagtagtatgtacagaacttgatattagccatgaagtgatgcaatttattactttgattggacagtcacttctacaataataatatatctgcaaacttggattgtgtccctaaaattgtccttggtttcatctctgcacacttaaatcgacctcagttattcattgtttatcatcctctattcaaaggtgaaaaatttgtcagtcattactgatagtgtttcatacaccttggagctttccaaaggaaatgatacatgtttttttgttgttcatctttttaatccctttacattaatttatgtgtcctctcctcgctttgatcatgaggtttttaatgcacttggaacttttgtgttcctttttcctaaattttattgttgtttttcacctaattactttcaagctcattcatttgcatagagagtagcacatagcctattgtagataaaatctactttttatttttaattttttgctgggtgatgtgtttcatagatgctgttgcctatttttgtaaacagataatggctctttcggctatgaaatgggttggtggaaagaagagcattttaatgcatcagatgcagatggtgatggtcttttaaatattacagagttcaatgagtgagttaacttttggcttttttccgtttatagaaagtggttttcaattttgttcttcgtgacttatattttttatttcttccctaccttaataatacagctttctgcacccagctgacagcaagaattcaaagttacttcaatggttgtgcaaggaggaagtaaggtgatatgtgaatttcatttgcatttcttgtttacactttatggtaacttttacaaaaggaatttcatattcatttaatgaatcggactcatttataactaaaaggaatagaaaaaggaatgagtataactcacctactagtgtgtttcaacctaaaagtttttaaatttagatgaattctacttttataattatggtttgtcttgtgttcctatttccgttgttaaacccccatcttttattagatcatctaagctacaataaccgataactttataatatgtggaggaggttacatttattgtccatgcgcttggatctcatgtgtatatattgcttatgttgtgatatagtatccggatagagggtagatttgaaaataaccttgagtggtaagacttgaaa

SEQ ID NO: 195148 - DNA, 3305 bp, Cannabis indica
cattaagcaccagtattatttagtagtacgtaccatggtgcaattcgcaacaattgttgtgaagtttctggtaaaaactttctagcaaaaagaaaacataaggaagtactcttcatattaccaccactatcaatatatgtacaatttgtaccaaatcttatcttatccaaaatttcttctgaaacattcttttttccaaatgttcctggatgggctttcccacctttggaccaatcaacccatgtaatacttcgatttgagtttgcctctggaaaaagaatgttgataagtgtggggatataatgctcatctgcgtaacaaggaggattacaatacttttgaaaaattggatagtattttgagtctgacactatctctacagaaagctttcgattggaggcaaaccattgcgatccttttcgccagttggataaggatatttgaggggacatttcagaagagtatcttccttgaccttcccttccaggatcatcaaatagttggacaaagttgagttttgtgttgattaaatagttgtatgtgttggtgaagttgaagagaggaatgcatgcctcagatagcaaaacaaatctctcatttgacaagtctaagagtgcactagctataagtcttctttctgcatcggtcattgtcgattttccccagtgcacttgctgcatgttaaacaatctttttacgttatctttatattatcaaaaaactctattatacattatactttatactacaattactttttccttttacattgtttactctatttttttttatatatatgaaaaaattattagattgagtacccgactagttgcttgattatttaccttttacatatttataatatttttttagtcaagaaaatatattacaatctatagggtaaccatttaccacttactaatattataggtaattatatttaccattacggtatcttgttactatcgtagtaataaacatttactcatattatatcatattatataccatcaggagaatttgttagaatcttattagtaactagtttcctattacatgtagcccaattaagtgtaactagttagtatccttagtactaacaagttatcgattgtgtgaatctaaatgtcaatgtatagatacttttttaatatcaattactggttacctataaatttaacaatagtaaaatttagtttttttttaattaattgcatggtagccatttattatattttggtaaataattaactatatttatattaatatatctagcgtgatatttttggctaacatgtaaccctttccaaggtaactacttacctatcacagggtaactacttacctatcactagttatcttcaaaaggtaattggtttgccctcacatggtaactgcttatctttcctagagtaactacttacccctccgagggttaccagttaataaatgattgaaactaattactataacttgttaaatataattaaaataaaataaaatctaaaaatatgaaaggtaattgattgcgcctactctaaccttaaaagtacaaaagtgacaataaaaatactaaaagtatatttatactactcgaaggcttatgtaataactacaagattagacatgaaaattaacagattattagcaatttagtaataattaattagtaaattatattatacgtgcatataattctcaattatagaaattttattctaagtgcactaattgtaatatgaaatttaatatttttcacgttttatgcccgacaatagtgaaaacttgatggaatgaccaatagtatcacggtattgcaatttagtattttggaataaacgcagaaagatttatggatagttaaaattttgaaattatgtggggaactgagttatgaccattatactcttaattttgtcagtaatttcgtatgtttgttaaggcacaattggtcctttttccaaataaactaatttaattagttatttaaacctttttggtagattagtgtgtaaagattgaggatatattctgaaaacattaaaataatcaagagaaaattatattaatcaaaaaccaaaacgaaatttctctctcttccctagactaaaccaaggaagactaaccattttttagacaaattctactaattggtgcaagttttcaagttgtaattgaagagtaattagtaaaaattgcaaggtaaaaccctagtctctttatcttggtagttttgaagagaaaaagtttttaggttctctagtttgtgttgagtttagacatgtttaattgcttgtttttaattgagaattatatttgaattgtggaaatattgcagttgtagttgactgaaaccaagtttgagttttaaaaactcaaaatttggagcttcaattgtattttttaattatgggtttaatgtttgttactaagttgtagtttagattttgaacttattataggaatgtcctgaaaattttggtagagtttaaacaggtgtagggtagattttagttgcaaaactcgagttcgggaaactctaatacaaaaagggtaccaatttgggggaaacaaataaatgtgtcttgcccagaattttgggcaactgtttagggatccggtcgtccatttaggagaatttttgggtaccatagtttttatattttctcagtatttagcatactgcaacgatatttatcaatatggaaacttcaaattatgagtttaagctcctgaaagtattttagtgagacacttattagttttacgttaatgtgacataaggtcttcgctcattaagcaattttccactcaggttaactactacacttgattatggaattaagataagattaatattcagatacacatatgtacatgtttagtgtatatgtacttgattatgggctttttgtagaaaccctagatgagtcatgggcatgaccatgcttgtattttagcctataaatgcccatttatttatacgtaaagggggaatcaaaaaaagtaatagccgaagctctgtgaaaatatctctaagctttcttctccctcaagagaaaccaagagagcagagttagagttatactgtaaataccattgtaatatattaaacacgacttataaggccaatataatgattcgtggacttgggattatcaacatccaaaccacataaaactctttatctattttatttaatgtttttactatttcttaagctctaacttaattagtttccaaaaatctcagtaaacactagagtactgagtgtaatttgaagttatggttaattgtacttatag

SEQ ID NO: 195149 - DNA, 1420 bp, Cannabis indica
tctcgcttaagactatacagccaccgagttacaaacatactctatttattttatatttaatgagttattcttctttgcatttaatgatataaatatcattatattacttgattcatatccctgagactgccacgtgtcactttctgaagtaaaactaaatttcagataacaattaccccttaaaaagtccttatatataaaaagttctttttaaatgattactgtgtgtattttcgtcataatccaatttgaaaatatgcatgcatttgattttggcaattttatggtttcaaggcacatcattagcactaatgagccatcttttccactcctctaccattttcatctgttggattttcttttccttaatctaacagatatcgaactcaaagtataaaatcaaaaaaggaaccacctttccaccatttttgccattttaaaaaaaacttcaagcttttccttgtgaaaacaccattctgatttctcaaagtcttgcatgtcctctttttcattgatgtatttcctgtgaatttcctttgatttaaccttcaatctcagtcgtccccaaaacttacacaatcgttcgtctcgaatctaaatacagaattccccactacacaggtacacttctttaatcagtaagtattcatccccttacttacctagtgttattatttttattcttctaaaatttcatatagtttttgtgttaagtttattacggaaataggctcataatcgttaaaaaaaaaaatctgtgttaataggataaaatcgtccaagaaaccgagcttgtttttgacaaatatggcgagttgcatagccctgctctacgttgcataattatcctggccagttaggggttgggacactaaaatattccctagataattcccatgatgaagataataagggtcagaaggatcttcgagagggtttcttcaacgtcgtacttgcaaactttgatcacttagattgattgaactttgaccgttgtctacagctaccagagaactaaagacactatctcccattcttgtagctttatctttagttgacattcttgactaaaatctgaatcaggggcaagaaacacaaagactccaaataggggaaaattgaattgttgatgaagatctaaagtcttcactacagacacgaatatcgccggagaagacacaacgatggtggaagagagaagacagtttaggttcgaggagcattactttcccattctgataccatattgcaaaaataaatgaaaagagattgtagagtgtcaattgaataaatgagctgaaaatacaagaactactccatatatatggaaaggaagagtttaacctactaaagaaaataactagagtcagtaactagctgacttaactaactcttaatgtcaaggccggcccaagcattg

SEQ ID NO: 195150 - DNA, 1965 bp, Cannabis indica
acacttaattttagagagtagaaacatagtttccctaaattaattatagtactattttattattatctatatttaatttctcgtaattatttgagttgtatgtttaatttatttttttcataagttcattttttagctttaattataaatttaatagaatgggaatataatattatattttttttattcaagtaataattagtattattatagtagaaaagtaattatataataaacttattttatgttgttaaaaaaattaaatatgttttatgtattttttataaatagattatttagaaattttttttgatatataatatatatggatgagagagaaagacactaactttctcaaaatatttaaggaattttttgtaaattaataattggaggactaaagctgttgggacttttattatagttataaaaaaaattctttaaatatataatacatatgtgacgagcgagaaagacactaattctctcaaaatatttaagggaccattttgtaaataatggttggaggactaaagcttttgacacttttattatagatataatacatataaattaaatgaactcaatgcctttaagtattatttgatgacagcaagaaaccatgaaattaaaaagaaaaattataagaatgaataacacatgtgaatgtgatgagcttttgttttttctttctctgttttcacacctatgctaacttttcttaatttgtgttaaaatggaaaaagctaacattagtggcagtacatttataattgtcaactatggaaattaactttaattaattaataagtcgttaaatattatcaagaatagttgctactttccaactttactctaattcattaggtggtttgagtttctcacttatttcatcaaacattcattgtaatttaatttgtaatattgtctattaattgagtttaattaattaatttcatccattcttctttccatcttccaattaatcttttttcattattccattctctttctttgaacaaaatcatcaacaataacctctcttcacttgagttgagtttcagccaatcttctttctgttaaaaaaaatagtaaaaatccagtgtattgtagtattagtgtttgtctcagcaatctctagtctctatacataacataccaaggtacgtacttactgtatctatttataagtgctcttattaatctatattaaactttgttagtgatatgtatatagtgttacttttattaatcctggattcagttcagccattattatatatctaagttgtttccctttcaattatttgcatttcagcttttacttctctcacagtctctgtctcactctcacacacacacacacacatcacatatatatataaggcaattgtttctctatcattatcaggtaagtgccttttgccctgtttttatgatcattttctttttaatatcatattatattatttcaataatattaatacttagatgttgtgtgttgttgttatgttgaattagttgagtaataacagaaaggaagaaagaaagaaggaaattgtgtctgcttaccatggaaattgtaatttcagttgtagccaaaatagctgagtatacacttaaacctgtgggacgccagttgggctatctgttttactacacaagaaatgtagagaaactcaatactcaactccaacaattgaatgatgcccaaaacagattgcaacgccgtgttcaggatgcccaaaataactgtcaagtaatcgaagctgatgttaccacatggctggccacctttggtcaaatctctcaagaggctaacacatttctcaaccatccagaccacgcaacggtcgtgtgctcttgtggatcccctcctcatttgctgatgcgacaccgtttaagtaggaaagcaacgaagatgtcgatccaggtacacgagctcaaagaggaatgcaaattcga

SEQ ID NO: 195151 - DNA, 913 bp, Cannabis indica
tacaacaagtttctctcatagtactaatgctaatgcagttcaaaaagttgttcatttcactatgtttcctactattctgttctgacctgttttttcaacaaatatttttgtttctagagtggcaaagcgtgtttaggagatatgatttatcggtacatgtactcagcagacaagttctctccagaacatctccttgactgcctcaatcttgcatcagaacatgaagcgcttgagttagcagatagggtcgaagcttcaatgtacacatggagacgtaaggcgtgcatgagccattcaaaatcatcatggaacatggttaaggatcttatgtcggacactgataggagtgacaaaaatcatgttttggcggagagggctgacagtttgttgttctgtttgaagcagaaatatcctgagctttctcagacaaccttggacaccagcaagattcaatacaataaggtaaagattataatgatatttcagacttcaaagtaatatttgagatgaaatatattcttatataagtataataacccaagtaaaagttttttcaaaaccataattgattatatctatgtgggaaatattatactcattatgaatttgtctgattatgcaggatgtgggacaagcaatattggagagctactcaagagtgttggaaggtttagcattcaacatagttgcttggattgaagatgttatatttgtagatagatctgttaggaaccaaaataattagagattgcaaatgagtttattgttaaatagggattatcttaatcttagtcccataactatttttcttctctaaccgtttataacaggaaagtgcagatgttatagctaatggctaatcaccatgcatatatgttaatgcagcttaattctctttttcttattttttttt

SEQ ID NO: 195152 - DNA, 2130 bp, Cannabis indica
atttttggaaagtctattttctctcgtttttttttttttttttttttgatgaaaagcgtttatattataaaataaaaactcagttagacctcacggtcgttacaaaatagagcttccagtatagaagagaccggtagagacccatacatctgatgagagaaggcccatctagccacattatgagcggcaaaattacatgttctactgacataagagaaattacaactattaaatgaaggagaagatttagtacaaaatgagatatagttctctaaagcccaacgagatcccttcccattgatggcgtcgataactactctcgaatcattctccacaataacaaacttgtagccggaatccaaagcgattgacacagccaaacaacattacctatttatatattctttgcagctctctcatttggaaaagatcaaaattataatccgggaaacacagaaaaagggccgtcgaaaaaagtgaatttttgacttgatttgtgtattcaagattgatagtgtgacaattcttgtagtgacttttgttttagagcttttgttcacttgctaggttgtaacatatcagatttttaagtagaaccccatgatgaaactgggtatatatagatcaatctttatgctggtcaaaccagtataaaatctattttgtgttctcgttttcaacttttactttacattacttagtttgtgctgtttgttacaacaaacagtgaaatagcaaccaactaaaatattgatgcagcaaagttcaaaccaggaaaatcagtctagactttagaaaataaagaaattttacagctcaaaattaatatagcaaaatatagagtagttgtataagtacattgttcttccatagttaagagtctcaacagttcagtgaagcaatattgcattcttgacaaaataatttccatgaaggaattacagactcgtactattactaacagcaaaacactcatcaaccagaccaatattaagtgcgacaattgatcaaatagagcaatctatgaagggtgtgtcaaagggagcccatgatttcattggctcctataaagtatttttgagttttccaattctcataatatataatgtcttccaaagttggtaaagttcagcagatgaaatggtctataaccaaaataaaataaagttaaacttccatcctcaaaattctccatactaaccaaaggatctatcagattatataacaaatagtagtctaggggaatttaagctatggcaccagagaaaaactccttttgagtaattcgaatttcagactgactgataagaataagagttatgtatatttatgtctttatctgaaaacactgagttttactagtactgggttgttctccagttctagaatcaaacagtaaaaactgcaaactcaaatatctttccatttgatccttttaagtaaactccactaagtacagaaagtattagtctttaattgaacaaaattaagtatgtttcatacaaccatttgatcagtcttcacaatgaattcaaatcgtagtgaaaatgacaagtttcataacaaaatcatctataaaaaatttctccttttattttcttgtacaattatttcctatcaagtataaaatcaaaaaccaaaaatattagggaaaatttgctcaaatcgaagaacctgacattttgaatgttgcaactaatcttgatcctcgtccttcttcttgggcttgcggtacttctcctcgacgtgcttggccatgaagagagccgtgttggcgacctttttgatgttgggaacgttgtagttttgggcgatgtaaactccgcaacatgtccccattatgaaggagaagctactccttactatccccatccaaatcgtatcgtctacgataaggcctgagagcgagaattaaggagatgaagaagaaattagggtttatgatcggatgattctggaagactcttgtctgtcgttgttgagaatttgaaatagcgtttgtttttttttttttttttttttttttttaaaggaaatagcgttgttgttatgcttgtattttgtttaattgaatatttaaaaataagggtgttcatcaaactgctagcaacacacttcactgtaaaaaaa

SEQ ID NO: 195153 - DNA, 2440 bp, Cannabis indica
tttttttttttttttccaaactaccttgttgcccagcaattcatggcaataatgcagaccatatctgctgcaacattcttaaagataaaataaaattgagatgaatactttcagtatatatggatgaaaagttccctaaaaattttagaatcaaatttgatatgagacttaaacacatactcccaaatgttaccccaaatgtaaagaatgcaaataattatttacactaagaaatgaaacctcctccatccatggaaagtcttaagaagactttttctgtttgaacttgatggctaagaatgtgaacaccaatgcatttaacaagctaagggctcccaaaagccaaaagaaataatcaagatgaccttcattcagattgtctggtatccatccactcttgccatcttttgttgtgaagtaagttacaatagtcaaaagaaaggagctcaaatagtaacctaatgaaagtgaaaaaagagctaatgcacagcatagactcctcatactatctggagcctgttcatagaagaactgaagttgaccaatataggtgaatatctctgcagttcccataaaaaggtattggggtatttgccataggatacttaatggtacagcctctttttcgtgaactaaatcgaggtccttggctagctgcaaccgaagagtttctaacactgcagcagctaacatgcataagactgaaatgaagaggccaattcccattcgctgcaactcgttgaaacctttctcttcacctgtgaatttcctcacaattgggacgattaatctgtcataaatgggaagcaaagaaagaactgcaatgacatcaaaaatgtatagagaggctggaggaatggtgaaagaataaactgttgtgttcatcatcatcccttgttccacaaatgttgtggatatttgggcataaacggaagaaaagactattccagttgccaagagtggaatcaaatgtatcatcgtcttgaattcttcgacctgagatacactgcaaagcctccaaggattggttaagtccccgctacttctctcagcgtcggaaatcacagcagctttatcaaggcacctgccacaaaatccaaagttcattggaaattcaatgcagcaagatgtttttggaagacactaatgaaattatgaaagagcacaaaaaatcctaccactttaggaacatattcttgattcttatcaaatgtgtttttgttagcgcacgaatcgtgcccaccaccaccttgtatgctcccgatactaaattataccaatcaacataagatggtgttgggcaccatgtgtgagctataggcaatgtttgatatttaaacaaggaaaaagtaatagactgtcagtttagaaatgatgagggaattactgcaatgtatcggtatgttccaatttgaggtttccttcaatagcagagattctgtcatgtatttcatacagaagagtactgtcttcaggcacctcgagattccacttacgacacgatgcaaccaaagtttggcacattcttgtgaaagggctccccactggtttctgaaatctgtagaggtgagtaccagaaacaaaaccaacaagagcaatgcccataaacaatgcagcaataccaaatcctaaaccccatccagcattgtcttgaatccacacaagaaaggtagttgaaacaagaataccaatgtaaattgcgaaataaaaccagttaaagaaagacccctttttgactctttcctttgagtcagtatcatcaaattgatctgcaccaaaaggtgaaacacatgatttgatcccaccagtcccaaatgcaaccagataaagtccaaatagtaatactgcatattgtgctggacctaaagccggaactgatgccgagagagtcaaagcacacattccctattcactcaacaattacacaatcaaattacattattattaatatgtcatatgaagaaatgattatgagtttcgagattacgatgaagtagattatcgaaaatgaggtgattgtccaatatcttccacagtaggaatctgctacaatggctccaataaggggagtgaaatagcatgttccctgccaaatggtgacatttctagctgctgacacattttcttggtgaagttcgtgagtaaaataagtgactagattagtggaaataccaaagtaggccaagcgttcacaacattcagtacctgtattccaattcatacaataataaattatacatttttgaaagaaatttgcccatttgaaaatgaaataaaataaatatataaaaatagaataccaagaataaagatgcaagctttccaatttccagtattttgtttcagcacagaattgccctttatatcagtggagccatcaccagtgtaaaggtcacaactttccccctaaatgcaagacatttggaccatataacattta

SEQ ID NO: 195154 - DNA, 1142 bp, Cannabis indica
ttttttttaaaaaaaattaactttttcacttttttgattattaatcattaacttatccacttaatcattattaattattttcagtatccacaatttggtgaggatgacctgcacaccattgttcagatgggttttggacaaaatcagacaacagatggatctttgcagccacagagccttaatggtaaaagaataaatcacatttttattaaattaattatgtcattaattttaatgttgttaattaaaattgttttttttaaatttaatacaggtccaaatcaagtgtctcatatgaaagttgagctgtgatcaacaacatcaaactgtaaatagaagagttaatctggaccgtccgatgaacaactaaagccccttttttttttgtacttatattattttcttggcattaagccacatttatcttttagctctataaaagagcaccatttttttgttgtatccttatgttattatctttcttgatgtaattttttttctattatttttaagggaattttattattattattattattaccaagatgtaaaatctcattatgtaatttttggtgcattattatagagcaccagttgtaagatagactactaaattgctaattaattagaagaagaagaaaagaagagttatttttctaatcaaaagatttgttgttgaatttatttgtctttacataatttgatgaaatctttttgtcaattcaatgagaattgtttgtgcccaattttacttttaataaaatttctaatggagtcatatcaatttggcattgctaaatgctaatcttctggatttgattcctacttgtgttgtaaacagctgtattaatttttaaagtggggtctcttctctcttaaaaaaaaaaaaaaagtctaatttgaatgattaagacattaggttatcttttcttgggctggggtcaaccaagatttttttttgaattttttttttttgtaattttttttcttctgccatatttttttgggcctctgtaattttcagagattaccccaaaaacagaagcttctgttcctcatttttttaatttttactataacagagcagaaaatcaatttagcagaggttataataactaactaacactttaaaatattttact

SEQ ID NO: 195155 - DNA, 1635 bp, Cannabis indica
ctattttattgtatataaattttttggtatgtattcatattttaatggtgatatatataattttgttagcatgatatatatattttttgagtattaatttagtattgttataatttctttgtgatatataattttattactacggtatatcaattttctgtactacgatatatctaatactgctgtatatatttaaatgatctaatatatttatttttgttacaatgtaataatatgcaatactaaaaaaattatgtaacttaattttgttattatatatatttttttaaaaaaaatatgtgataaatctatttttataatttttattagctaatttattaaatttggtcattttcttaatttttttaaaaagtggacatttactaatttagttaccaaatttagggtcattttgcatctcaaccctatttttttttttgaaaatcatgcaaaaagaatgaggtgacaaggtgtccactcagcaaaagaatttttttttctataaatacaaacataatattttctttttgagagataaaaacaaacataattttctctcattagtttccacttcaaaagcttttctcctctctcaaacataatagaagcattctgaagtagtgatcatcaagaaatggaaaccttatcaagaaatatcactaagggcaagaataatgtagttgtggctgcaaagggtgatgatgatgatcttgatgaggttgaagaaataatgaaaagggttcaaaagaaagaacatcctaccattgaaggtaactcttattgtttctacaatggattttggatctcaaataatttattcaaaggagttatctcatttcaaaaacactatgtagcaaatgatgatgatatagtcttggcttcatgtccaaaatcaggtactacatggctaaaagctcttacctttacaatcataaatcgatctcatttcacactctctaatacccctttattagtttctaatccacatgatcttgttcctgaaataagcctcattgatcttcatactattgatgattatcatcataaaaattcaccaagactctttagcacacacaatgcatactcacttttgccactttcccttaaaaataacaactcgaaatgcaaaattgtctacatttgtagaaaccctttggatctctttgtgtccctttggtatttttcacaaaagttttcaggaggcgaaaaaatcaaaccccatagcttggatttgtacttcgacaacttttgtcaaggaatccatgcgttcgggccattttggaaccatgttttggagttctggaaagcaagtcaagagatgcctcacaaaatactgtttctgaaatacgaagatcttaagaaagataatgtatttttcgttaagagattagctgactttttggggttcccgttttctttggaggaagagcaacaagggatgattgaagaaatttcaaaattttgtagcattgaagaatgaaaagttttgagataacaaggttggtaagcatgattctttgagtataccaatagtctttcttagtaaaaggtaaggtgggagattggaggaacattctcacgtccccaaatggttgactatgggaaaaaagctcatccaagaaaaactttaagagt

SEQ ID NO: 195156 - DNA, 1980 bp, Cannabis indica
aaattatttggtaaaaattaataggggaactcaattttaataaatgatatattattatagattgatagtgaaatttctcttcaaaaacttgatgaagaaaatagtcaattttttttttatctaatccaatataaatggaatattcaaaattttcgtgttctaaattataataaagatgatcatttaatccgtgttcgaaaaaaaatgatcatttaatccgtttgggtaaaattttgagcactcattatattatttacaccagaatatttggatgggagagtgatagagaagatgcgaattaggtaggacttagtatttgagtgcattgactatatggatgacatacaatacatggcatcagtgttcattctttctatatttcaatcaagcctatcgacaaaatgaacattttaaataaacatagttgcgatcttggattaaacttgggctaaaccttgacagatagtgacaagttggttttataaagtcttcatttttattttaatctttattcttgtacataagcatatattatattaaattaaaagtaaatgtaaatataggcttgagtcagtcaatgcctttgcctttatctaaaacacatcccatttggtttggccatttccaagttttgtaaaattgggcaaagtctaaaaagttctctctgtccttgtttcaaagcataatcccttccttcggtgttaccaatgaaacatcaacttaacaaaggaaacagaaaccgaaacagtcgtcttcacttttcttcctctaagctccttagcaggccaatcatgatcacggctcaatctcatatgacaccgtcgtcgtcgtcggacatggatcccggtatctggagcaagctgccagaggaactcatggagctaatcctttcatttctacctctgaaaaacttctttaacattagatcaacttgcaagacattcaggtctatggtattctcaccttgtttcatttccaaacacacttcctctttacaatctttttcttcttttctcttgctttctcacccttattctccccgtcgcttccctctttatgattccaacctaaacgcttggcgaaagcgagctctttattcctctgtttcgttaccttcttccgcttctctgctctcttcttcttacaatggcctcctttgtttctctctccctacctcctcttccttcgttgtctcaaacctcttggcaagtactgagagagaaatcaaattcccaaaataccctttcccattcgagcttctcactctagtttccaccccatttggctacagcatctttgctctctgttctcaatcgtcctcaaaatccacctacctttacgattcaaggagtcattcctggactgaatcagacggcttcgagccaattctcaacgacaggcaccaccaggaaggtgtttactataaaggggcactgtatttcaccacggcggagccattttccatagttagcttcgatttggagaaaagggtttggcggagatcagaagcagaggttccaggggagctcactttagctcgattggtaagtgaaaatggtggagaaggaggagggaatgaaaggctatacttgatcggaggtataggagtgagtgggattacgaagatgttgaaagtgtgggaattgggattggggaatgagtggttggagtatgatagagtacctgaaatgatgtgtagaaaattcacgtccgtgtgttaccataattatcagcatgtttattgcttttggcatcagggaatgatatgcatttgttgttatacatggcctgagattctctacttcaaatcaagtaggaggacttggcattggcttcccaaatctccttcattacctgataaatggagttgtggtttcagatggttttcttttattcctaacttatatgcttcagtttgacttgtaaaatttctttttcattggtgatggtgctacattgtttattacgcttatgcttgtt

SEQ ID NO: 195157 - DNA, 1850 bp, Cannabis indica
tcgagattcagatgcaagaagtagaccctcaatctcaccaatagtgtaacctttaacgcgagtgttggtagagatgatgaaagtgtcgtactcactaggcatgcctttaaagattgcagcaatgtggtctcgatcagaaagaacttctccaacagatgctagtaaatccacatgttgttttactttgagaagatagtcattgagacttagtgtgcctttctttaatttttgaagcttagttttgaacttgagaatcttggaagaaaccttttgagtgaaatgttgctcaagagctttccagatctgacgagttgagttgcaaccaaccatacgagttagtaaactctctgtcatggaggaaaggagccaagatacaagaagctgatcatgaacttcccaattaacaaactcaggattgaacttgtgagcaactcaattggcattactaagaaattgaggaggtggaacatcttgaattaacttctgtaaacaattaccacggatggctgcaagaatctattgcttccacaggagaaaattgtgatcattaagtttgatcgagacagtatgattgaagtgaactagagcaacatcatcttgaattctggttcaatttctcggggctgcaaattgtgttccttgaggtgcaagttgataatttgagttgtcatgatcgattgaagccatgttcgtcgttaatggcagaaaaggctatgataccatgttataggtattcaacctcttggacactattggagaaagaaacatagaagaaagaaagtaaagagagagaaaagaaaagagaaaaaaaatctcttattgattaatccaagctttacaaagtatatatacacatgattaaagagttgaacctttaaccgaatgtaacaaacaagtaacagttaggaaggtaacagaattatctactatcctaagtaactaagctaactaaatgtcctagcaatacaaaattaaattaattaattttgtacaatattaaaaatattctaatgaccaattcaaggtgaaaaatggggttgctccctcagcaaaactgggataaagttgagccaaaagatcacgattcaagataaattcatgaggaagtggaatttcattaggatctactccagcatttagaaattgattaatcggtaaagatacatgtacttgatgtcccgcccaagaaagagacccaagtccaagtagtcacacaaattaattggttctgttaggttagttatatgatgtgtattatcaacaatttccaccgaagatggtaagatatcttgagcagttacatattcaggacccttaccacaaattgatgtctcgcgcgttccatacagatttcttctcaatacaatttctttcaaattcattaaaatttcatgtacagattcttgaatacctactaggttagaatattcatgggatattttatcaaattttgcgcgtgtgatacatgttccttctatttctccaagttcaatgtcaaaaaaatctcatattaaatatatataatagtttattcaactcttaaatttgctaggttattctcttgtgtgataaccaaagagattttgaaatcgtatattaatgctgtatatttttttagataaatttggatttgttcataaaagtaatttattaattataaaatttgtagttttataaattaatatatatttatatatatgtatgggagtattgaagaacatacttttcgtgattagtttaatttaatgatttattgagtttattttagtggtaccctaaatactaaaagatgtgacatattattataagtataattttataatactgaatcttaaataatttaatttaat

SEQ ID NO: 195158 - DNA, 1603 bp, Cannabis indica
tgtggatgcatccaagagatgcgggacatgatttggctaaaggatacttataagtaaaggatgcgggggccgccttttgtccttttttgcttgtacgtaatatccagcaccattcatccgcctacttgctatttatagaaatattctacttatcctaattttggtggttaacacttgcccctagtctaaaaggttatttttaagtgatcttttttattatgagtgaactgccttccttgctcttgttgtgcgccttgcctgacattatatcttgaactgtgcactgccctattgatggactcttcaatagggtaggtgtgcacatgtgacccttcatgggcatgcgcattcgatctgtgttgttgatctcatttcaatcctatggtggtgaactacttctcctttctataaatagcctttacttcattcattcttttacattaccttcatttttccaacttagctccttcactctagtctctattcccttttgagttttactaacgtccttagtctattgacctccgtttcctcgcaacttttaacgtaacaggctcaccttgacttacgcctatttcgataggtatcttctcaatccgtaccacttatttcatttcttataaatttattttggctatattagcggttacttatctacttcatatagcttgcccctgagtctcctagcagctagttctccactagagcatttttctttctcccttctcatggcaaaccgcagaccatcctacattcttgaggaagcttcatttatcaaactttcgtccaattcagacattgaaggtcctgacccttggatgcaataccactgactgatgtttgagcacttgaagtgcttggaagcaatttgtgagacccaggaacgcttggctaagcttaaacaagagattaaacttttagagagtcaagggcatgcccacacgcatgcctgtctgtctcatcttaagtaactttacgctgagacaacgagctatcttgcttacttagagtgcatgcacctgcctgagccatcctcccccaactgctctcctgtacctttatgtggaaccatccatcatcaggcgagggaagccccctccaagccgagatctagtcgaaaggctctagcctgttgaatgaaagtaattaaaatgtactgcatcccgttctaacttcctttgcatttttacagatatcgataagccatgtccaccaagctagtccagcgcatccctccctactcgcgacccttcactccaatacgggatggccgatgtcacgagcatagtaactcaatctgacatttggagaataatcaatgagtacacagtggagaagggtttcgagcccttaccgaaggactgggccaacctgccactcgtagacatggtggcttttagtgaatccattctcaaggttggggtggcctatgactccaccccttcttcgttgaggtcttggactatttcggcatagctccgctccagctgatgcccaataggtggatcataatgacatgcttcttcatagcctttaaagaggctacaggcagggctcccacgaccaaataggtacattatgtgtaaagctttaagcataactc

SEQ ID NO: 195159 - DNA, 1325 bp, Cannabis indica
ttataaccactttcccaaacaaaaaatctcgttttctaaaagcatatccataaaagtatagtaatattttcaaagtcaaacgtgaagactgaagatatatggagtggtaaaaactataaagggttaattaaaggctctccattctaaacaagaatctataattatcacactaaaaataatgttttattttttaataataattaataatatgattacttaaactacaagctaaaagaagatgaaaaagaaatatgcgaatatatgcgatggtggataattagaaaagtatatattggtacacaagtgctttcgtaaatagttgaattgtttgacttttataaacatattcaacaaattttcttgccgaaagtaacaaaaccctaggcctttttttttttttttttttctatgtataaacaaatttttaggggtttaggaggatttatataattatgtatatatatatatatattatttcaagtatttattcatgtcatgtggtccttcattgacagcctaataagaaatgtaaaatattaaaaataataatatttttaataagagttgttcccacgtagctagctaccttatttaattttttttatgtaagagttttgagcatatacatttcttatttgtgagagagaaagagcatgagaaaaggtgggcattataaataaatataaatatatgtatatatatttggaatatatatcatcgtatagtactataattatatattcacatacataaatagacttaattaaaacatatattttttattttttgtatatacatttaaatttaagacttagttgcctagtccaactgctttcacgtgcatgcaaatggaaaatgtcttataattttatgataattcaattttttttagccaaaaatttagtgtaaactacactcaaggacaatgcatgaatgtaattacacattatatatatgattatactatcctcaaattaagttaattaattaattaatcaaatcaaaatattaatatctctgtatataattcatacttcatagatagatctagtcacgcgtttaaataattaaacacagttaattatataaatatgggaggattaattagaatattctaacaaaataaaagtctacatttaaagttctgatattgacatgcatgaaaaataaaaatcatccaatattattagagatcccggagttaatggatctgtgacatatatgtcatatataatataaatatatatttaatttattatatataaatcatatgtttattttgtataaaatgaattattggtctatgagaaattattaggtgattt

SEQ ID NO: 195160 - DNA, 2537 bp, Cannabis indica
tattcaaaactgagcaaatacaaagtaagctgaagtagcacgctacagcacaaaacaacaacaaactaatgcaaacgaaaccagcaactccccaacccaattaccaacccttaacttcattaagtaaatacaagcctttcttacatagtttataaggaccgatacttaaaattctacattgaacaaccttcctaacttcaagacttatacttttagctgaaacacaaatcaaatcaaaaatatatttatttcttgtttaccgagattttagaaaacagattcataagagcttaaaggaatgcaaaatattaaataatagataaacaaattttttatgtgattcagacattaatgatctgtccacgagtcaatagtattagccttctttggcaaatgtatgagtattacaagtgtttacagtggtaatctctatattccttttgtttctctttaagaagaaaatctctaggaatttcagcagagttttagtaagtaaaaattgtacactctctgtacatgaataattagggtatttataggcccgtaggggatcgagggcataccttctttccccactagagttccttactcaacatgcaaatgaggctgtaaaacactacaagaccatttgaccgttggtttggtaggtagctcttccatcgtgtggtgcttaattgatgcaggctatcacgtgaggacatggacacgtgtcgttcaaaggtttctcctttaaaagaaatatcccagataagccattggacaataagcactatagaggcacgtacgctcacaactatggtctggcacaggggacaagatctgacttggtgtcaggcgaggtgtaatcattgagtgtatctccaagttaggtcacaggaggcttcctggaagtacaactcgggaggttgcaacttctcagaacttgaaagtactgggagcttacaacctctccctggaggttcatttcgtatctttaactcacgtattggtcatcaagagactgaagggatgcattccgtgatgggcattcttggagacgtttctgaggactcaccgaagtataatgcttatttagcgaagttgtgaggctcacgctcttcactttaggcacgtctctcgagaggatgaatgacggctggttttgaaaagacagctatcctcaggtgtatttgggatgctattccaaaatgatgaataataaatactttattctcttttttcagatatattaaatatcaacctttcgtatccccaaccgttgaataatctagattttaatccatttgatcaggaccgtgcatttcgaactccttccagccattgccacccatataaatggggcttttgacgattgaagtcatttttttcacttcaaccatttttgaaacagagagaatcctttcctttcttgctcagacttcttgttgagaaaacctcaatcctttcatacatctttgccctaaaatcaaccttctttctccaattccttgccaatgtatcccattgacaaccactgttacctcgggctgccctgcagtcagagttaggaggagtaccatcgttgtcgtgcaaccagtagaatcgcaatgcatcaccacccgttaatagttattattcttgtctcgcatgtgcttaagtggcaatgagtttgaatatttctatcaaccataattcctgaaacgagtcatttaagtctcatttaataatgctatttaaggacataattattgagctaatttatattcctcttagagtacacatgttagcttctggttgatagctgatttttgggtataacatatgtaaattttaaaatttacatatacatgtattaatgatattttattttctaaaaactccttttaagataaaatatcaaaatatctatttaaaagatagatatcttatatttttttaatacttaaaaaaattaataaaatatcgctatttttaaaaatataaactttaattagcaatatcgtgtttcttaaaatacatattaagatttaatgatgaaatatcatatttttaggaaaacatatattcagtattttctaaatcttacaattttaaataagatattaagatttatagttacttattttaaaactagcaaaaagctacgtgcgaggcacgtatactaaattttatgctaatttttttttatgttatttgaaagttatacaattaaaaattaaagaaaaaatattattagttattaggtgagattattattatgtgtataggaagaaatcacaaattaattaatcttataatcttaactttaatcaaatagggttttagatatatgaacaataaataatcacgtaaaaataaaaaataattatttgaataaagaattcaatatacacagttatatatatgaatcccattattcaaaaataattattcaatatatgaacaataatttgtcacgctaacttcagttaccataatcggaaaaggtttaagtgaactaaataatgactaagaagatctaaattacaaaatgaaaataacatgtctatatgagtatg

SEQ ID NO: 195161 - DNA, 568 bp, Cannabis indica
tctaagctttacaattaactacaaacccttcttggacactttcgttatatacggctgttgattgggttgacaaattacctcatccaccaatatattttatccttgttgcaaattagtgcaacttactgtcaaagttacagagctatttgaataagtcaaatttatttgatgtctatttatttattttatgtttgagttggtctatgtattcagttgttagtgtccttatatttaggaaaataaaaagcaacgtaatgttagttgagattttttaggattcattttaagtatttatataatctgtaatagaacgtcatttttctcagatctttcaataaaaattctttgtattcttcagctcagttatttttattttttttttgtcttccctctattcattagttttattacatggtatcagagcttggtgcttatcaactgtttggattgagtactcagtgatcatgaatggtggaagcaatatctgtgtagacaaactttctggtgacaactatagttactggaagctgtgtatggaagcttttctacaagggcaagatttgtggga

SEQ ID NO: 195162 - DNA, 2004 bp, Cannabis indica
ataatactctgagacagaaaggaacaatagttaaagagctgagcaaaaggagatattatattccgttaaaatcaatgtaaggtttatttaacttgtgtttaatttatcgttttaggtttattcatatttaggatgttagattatagtttataatcaacatacatgaatagtaaactaagatcttggttaaataatttcaaacatatattaacacatatacacatatatatgagttattactatttaaattcaacattggtgattaacctttttaagataactccaacttaagtatttaaattgttattagtataatgtaatatatcgagtttcctataatttaactcgtaaaagagtaatattatatcatagtctgtattattgtttttttataaaaattttacttacctcaaaatatttagcataaaataaaaaactaaacgaaacaaaacaaaaatgtaatcataaaatgacatagaagcaccttttttaggagcaggaaatgagatactttctaatcttcttcaccaatctcagaatcaatacaacaaccataaaaattttgatttccatgatttttcatccactaaaaattcttttaaacctattttactatatgtgatgctaaaataaaatctaatttattaattcacatcatcaatttccccatcaaccaaacattacattgtaaatacacacacacaaatggaaatcaactaatagaaaataattgatagaaaaacctaaaaaaatgtaccttgattggggttttcttcctttgagctgagattagtgattgacagagtgagagacgaactgaagatgaagaggaatgatcacaccaagaaaacccagaaaatagtgagtttagagagaaagaggaatgaaaagatgaagaatagaaaaaaaaaattaccgtccaatgatgaatgaagagatgagacagagagagggtatcgccattgacaccgtcgagggggtgagagagtgagtcgtcgagggagagagagaagatgaagccctcctcgttgtccccgtctaggccatggaaggaggatgtcgttgtcgtcgaggattgtggttttaggatttggagtttggggtctttgataagcgaataaggaagaagagaaactgaaagctcctttgtctccttatttaaaaacgaagacaaaagtctttgtttttccgcaaacgatgaaagttatgaaacgtgtcttaaaatagttttatcttcggatttataattttttaatgaaaaaaataaagataaatgttatatttgtagtagtgtttaacgagtgaataaaaaaaactaataacataaactggagttcatgatcacttagaatttaggtcgatctactattgatcatcattgtgatgtgaattaggtctttatagtaaatgacatgtttgataaatacaatttaattacacatcagtcaatgtcatatataatctctattgtatacaacacttttattagatgtcatacaaaatcaacaatctgaatcaagattacttgcaccgaataacgggaatcagtgaacagtactagcaagtatcgttgattaaagattttataactttaatatgttgctaactattttgttcttggctaagtgatctcaattctccatataatacaagtcaaaatctcataaatgaataaagaattttttaatatttatatgtaaatgattcaatattatatattaataattcaacattcaagcatatatcaaaatgtttaactaatatttataatcagtaatgtctttacaggcttttcaggacataaatcctaacaccttgcctcacgaccccttaggaccgaccctgataccatacccagccccaaccttgccgctgtatctcggacttaaacccagttctagaccccaaaccttggaggttgacgtacccaactccaagtttatatcaagcaccaaccttaaccttaactttcaaccataatgcaatttgaactcatatatatag

SEQ ID NO: 195163 - DNA, 1631 bp, Cannabis indica
atatgctgagcttgtttatattcattcaaaaataaagcaaccaaacctagaacatcaaagaatgacaacattgactttccaaagtgctcttcatttctactattctatatttcccataaagtaccaaaaagatgctctttgtcatccttagtaagcttctcaaaaccattaaatataaaatattttatatccacatttcattgttgcaaataatcatcatttaagtatgattttttttcatataattttagctcttgaatagttaagtagggcatgagttaccgtttcattatgtgtcttacaatggtaacaccttggacttataccacctttcttataaagagattagaggctaacgacagaatatgatgataagctctccaaataaaatatttaattttggtggaatatctgtatgctagagagaagaccaccacctcctaatgaacttggagtctgaagatgaggaatgaatattagaagacttgtcaaaatgataagcaaatttaacagtaaaatatcctaataagtttgctccccatatcaaaaaatcatcaacttcaaagctaactattagaattgtaagtatttgattaacaacataaggatcaaaatagttatttaatttatcaacatgccaaaatttattttggttaataaaattagagatcgaatttgaaggggttgagaagaagctttatatgatttatacctataataagagatcaattgatcttagacaaaatgtatagaatttccattaccgacctttcaaataagccccttcctaagtaactcccttccccaaataagactttgccaagtaggtgagggcatatgcccattattagcatctaagaaataagtatgctaaaatatttagcttttaacaacctagcaagaagataagttgggttctgaaatagcctccaagtctgtttaactaacatggcttggttaaaatgcactaagaatatgaactaaaaccccccgaagtactaagagttacataaagtagaccaattcttctagtgaatcttagaatcttttcccaaggaatcccaccaaaaattagcaattttagactcaatatccctgcaaataataacaagaattctaaggtggagactagaaatcatacgcctgaaccttgtactccccaagatccctagaatctaagggacgaagaagcaacttcacgagtaaatgtggatatagaagaacaagatgaaacccatgacgaggagtatgaggaaaagcaagacaggtatgatacttacaatgatggtagttacaccgaactactagctctaatgcaaaaggcggccgcccatgaggccgaactagccgcccagaaagaacataataaaggatgtaagagattatgatcgccatgtagaaggctatggaaacagccagaatccacgtacatccaaaggtcctgtccagtttcaggagaaacaaggaagagtcctcgccaagtacccaaaagcataaaaataggaaaccaagcccgatacgatatccctcagaagggaaccctaagaaaaatcctacatctttccccaaaaagaataaaaaggctcaggatctacaaaaagactgctctaatttctcgaaagaaaaatgtc

SEQ ID NO: 195164 - DNA, 1420 bp, Cannabis indica
tatatataaatatatatattaacgcaattgggtttagtacgtgcgtggcaattttaacaactagagatgttttttgttgatgtgtgaacacatatcttctacgcgcatacttcttggaatgaccatccacgtatgggaggtctggaataagctttggaccaagcaaaattaagctcattggctaagatacttgatttgatggaaacaggatggaccaccatgcatatttattagttgacctgcctaaaacctagctggaccaccttcatcggcattgtttgtaatacatactttctagtgttcaagctgaacactgcttctacgtaccacatttattagtgagcactaaggatgtaatatatacgtaattaagtaccctatctagtcttcatatgtgattggcattgtgacaagatttaaagtttgtttttctttctttttgaactttaaatcaattaatgttaattaatcaacatttatttaaggaataataagacaaaaacgatatgaaaatactggaaaaattggtaagcattatcatgactgatgagttgggaaaatctaatgcatatcttttaggacagtggtgggaaccttagtcattaatatggtaacgtaaattgtcattttttttgtttgtttgtttgtttttttggtgggtaaggtaaaatatcacttgtttgttaataagcggctaccactacttcttctactacttatgttacggacgaaattgtttgcaaaaaactgtcgacatgctgttagttgatattgaatttatattattatactaagcttaatttagattggtaactcagaaattcatgataatcaatattttgaatgaatatttattctatataaaatgtagctatgtaataaaatattagcttaacgatattgtttttaggatttctatgttaactttaacaaatatcttattaattaaagaaatattctttattaattttataatattattatttttaatcgaatattctattaattaattattttaaataataatattataaaattaataaaaaaatattttattaattaataagatatgcataaccacatttttatataaagtagatatatatatgtgttaagtgggtatgcaacaatgtaacattttcctaaaccagtataaatgaaaatgtaacaatagtggttttgagttttgacagaaaatgaaagagagactatagcgatttaaaacataacgatacgaagagtttgctttgctttagctttcacagtgtctcaatcattcacactgcgctaatatgaacagttgtgaagaaaaatgtacgtataccaacttgaagcacatgcatattaatattgatgagacagtcaaatggattctaaaacacacattcaattggaaaaataacaaaagagagagagagag

SEQ ID NO: 195165 - DNA, 1122 bp, Cannabis indica
ttccacatagaaacccctattgcaactagagttacaacctaaattgcaacaaaaaatcgtacaaaaatccctattgcaactagcgctgcaaccagtttaaaaactcaaattgtaaatttgaaaagaaaaaaaaatagtatatgggtaattctccttaattttttttataaaatatctacataattttatttttaaatatatataataatattaaaaataaataaaaatattttttttaagtaattaagatattatattaatgttaactaaaaatttaaaaaattcaattaaaacaaaaattctgtaatataattatattttatatagaataaatatgtgagataatgaagatttgattatatgcagaaataattaagggatgggtctgctcttttttattttgtaagaaattatacataactatagaaccgttcttttgtttttttaagctggaagattatgtaatcaaacgtgacatttttatttctctaatcaattattgtacgattttaatatttataaaattgctatcaatataagaatgtcccagcttgagctgatccagttattaagtaattacaaaaataaaataataataataattaataataatatataatatataataacaaacaaattaaattgtacacttgagcattaaattaaatatatacagaaaatgatgttttatttataaaaatcatttgtatagttgcagtaatcactaaggtactaattaattaattaaactcgacctttaaagattatttttctttcagaaccggctgttaatagtagatatatggatatcatagcaatttcaatagaaaattagcacaacactattatatatctagtaaaaaaaagtatgaatgaatattaatagtagagtaatttgcagttaaatctttcaaacttttattttactaattaaacatctaacgattatttttaattttggtgacaaattaaagtgactaatttatacttttattggtaaatttaaaatgtgtcacaattatacagaaagggtctttaacttatcttcagtgtttagcatggttatagttgatcttcggttaaaaaaaaaagtacataaatagtacaattaaattcttataa

SEQ ID NO: 195166 - DNA, 993 bp, Cannabis indica
ttttaaaaaaaaaaaaattgcctttttacgccttagggaaaagaaagacttatgcttccctgttggaggcatcccttggcgcctcaaggctaatgcatcatatagtattgttattttgggcttgtttgaggtgctgtgctctacaaaactagcttaatagcaattacactattaagtttagcatagcaagtgtattatctttttttgaaaagagaaaaaggtcgcttgtcttagaccaacctcccccgttacagtttgaatgccctcacttgtggcggaagaaaaccgtggtaaacaaaataaaaacgacacaatgagtcaccctttacaatataagacttacaaaaaaaaaggaaactcttttcaagttttacaacatcagtgaatggtttcttacgcaaaagtgtattttctaattattgcgcataataatagtttcaagtaattagaaaataccacattattttgaagggcaaacatttaattgaagggtttcatatatatatatttatatatataaatatacatgaatttgccttacattttagtgctatgaattgctttaatttttgggtattactgtttagaagtttacacgatttaaaagacagaattttaatataagaggcttacacctcaatacaccttatttggctactttcttatgtttaatcattcagcaggtcatgttttcattatcatgggcattcacattcctcactaagatacacacaagatattcttccaagatctaaaatgatataccgatcaaaccaatcacagactgaccttgttgccgcaaaaacaaatacccctgtcaaaacttcaacaccatctaattcagtaagaaactgcaacaaggggatacaataatgagaaccaaatcaagtcaagaaagaagtgactgaaaaaagagagagagagagagagagagagagagagagagagagagagagagagagagagagagagagagagagagagagagagaga

SEQ ID NO: 195167 - DNA, 879 bp, Cannabis indica
aaaaagtattagcaaacgcacttttagttttgttgtaacttttaagagccagtaacaagacaccacgtggaaattgaaaaagttagttttatcctaaagattgtaaaaggtaacgataaatttctgcattttcagaatgtcccactgaaaatatctcttaagtaaatccaaacttggaactgggtctcctatcttcttcaattcatccatggatattctctcaaactcagttctgttctcagctttggctttggttttcactctcctcacagtacaatttctatggaagaacaaggcaaagaagaagtacgcaccagttgcaggaactatatttaatcagttgctcaacttcaaaagattgcatcattatatgactgaacttgcagctaagcacacaacatacaggcttctcagcccctttaggaatgagatttacacttcggatcctgtcaatgtagaatatattctcaaaaccaactttgagaattatggaaaggtacgagtagctcccctgttataacttgtgtttgacttatttttcttcactttcaataccttaaagaaaaaaaataacttttttggacattaggacatcaaagactgattgattgtgtaacaccaaaaatagcaatgaaaatgagctgaaattcagaacttatctggtttgctcttcttagaaggaaaattttcatcaatttctacaccctttcattcatccatgaaaagataattacagaactgtataagaaatttaaatctactgatatgttaatagtataagagtgtccatgttaataatagatacgagcaatattagtgcactttaaggctacattaattagtcattgtcaactaattttgagttagaatcttataaat

SEQ ID NO: 195168 - DNA, 1620 bp, Cannabis indica
tttttatttttatttctatttttacttaccgtatatatatacatattgatgaagaaactcccacaagtatctaacaattctctttttttttcttcatcatcgagttgctgctgcaatagttattactttctccttctttgatattgaggtgtaaacattgttcaatttttggtaagtagtttcatttttgttaatttttctatatattaattaataatgtcttcctttataattatacgtacattttctcatactttcattatcatttaacctattagttttaataatcgtttttctcccattaatgttgattttcagaaagattatctaattaatttaaaccataccatcaaataaaactactctttacaattgaatttgtcatttatatctctaataataattttatcgttcttttttcttcaaacgttaattcctgcaatatttctcattcttatttaatttggtaagaagtttagagataataattttttaattttgttaaattttctaaacacgagtaatttcttccacctaagttataaatctatcttctagttatacacatattcatggctgactttgtctcactctaggtcaaattcaatttaaatatagtaaattaaattttaataattaaggaatttgtgtttttaaatgagtttttctttttaagtttaatcaatagaaatattaaccccttcataacttatattgtagaataactctgatttcatttgatttgtagattaaagtcatgggtgcatttttatgttgctttggttgttttgatgatgatgatgatgatctggcaatcaatttggaggtttgcaaaattatgcttctttttattaatataaaattaatcctttattttcacatatcttaacctaaaaattatatgacaaagttaattttgagaaattgcttattattattattattaatgaaaaatatattaatttaaatctgtatataatctatagggctcacccttatttgacaaaaataaacatactactaatacaaatgaccaagattctgggaaaaatgagagcaagcctatgactgaagtagttgcagagaccaatatttatgaatatgaagtacaacaagaaaaaggagatgaagaatgtccaacatgtcttgaaggtaaaatttcatggaactcatttatttctacaataaatcacaatcacataaaaattgttgtgtaatgattgtttttagtcactatctacatacttttagtaaatgtataaattgcaatcatttttttttttatgatatcaaaattaaaatttagtaagtttgaatgtttattttaacatcttaaatttattcgaaattttttaaaaatttaatgaatatttcttgtaagtatgattaaaaataattactaacataataacatattcatatgttttaacaatactaaaaaaaagtgacaagcgatttttatttttacagaatacacagatgaaaatccacgaattacaacaaagtgttttcaccattttcatttgtcatgtatatatgaatgggagcaaagaagcgatcgatgcccaatttgtaatcgggtattgcttataatcaatttcttctttatattttcttttt

SEQ ID NO: 195169 - DNA, 890 bp, Cannabis indica
atatttaaaatttcagaacatgataattaagcacacgactcaaactcgaaagttataattttcatttagttttgtttcatcttttagtttcaaaattacaaagctcaataagttgctatataatattcaagtaaattacaaaaatttatggaacctagttaagaagatccaacagctacaggttaaaatttctttttatttatttgccatactcaaatctaaacaggttacatgctatcattttaagaagagcagcattacatgtgctttgcacgtgcatgctccatctaatattattaaaaaaaattaattatcatatttcaatattatatttatttctgtaaaataatccctttaataataaaaaaataaacttcagataacttatttaaattatattattagcttctgattcagaaagttttagcatttctaaataactataatctttattaagcctgaatcaacccattccacatattttgatacaaaatccacatttgtaagtaaagaaacaactagatgcatagagattcaaacagtattttaatgtgcaaaatgtgtgtgaatgagttgtgtttgccaggtcatatttccacatcatctgatgtggtaaactatcatccacataatctaataaataaaaaaactacgccttataatttttccaataagttccaaaataaaggaaaggtaaatgaaacagaaaaagatagatataatgatttaaagttcaaagcaaaatccatttcgatttattcgtaaaagactggataaaaataaaatagcaaatgaaacataaaaacaaagtctaaaagagaccaccacatctggtgtgccccttaagttccatagtcaaacacaactaaaaaaacactactaagctaagc

SEQ ID NO: 195170 - DNA, 1813 bp, Cannabis indica
tttttttttttttaatttttttttattttcacggatgcataaaaactcatatagtaactaatggatcgactttaatcgcaatcaaaatctacataacaacccacattaaaattattgtagcaactcaaaccgtaaatttaaacattagaattatgctacttacaaacttaaaatattgggattatgccacgtaaatataattttaattttcatatatacgtatatattttaagtatgacatcataagatttaattattcatctaaagattctaaattaaatgaaaatattggatgtttaactgaatttttggatttcccatctaacgtctgatccgatttaattggatattcaaaattagcgtcaatccaattacaattggatatttaatatttttcggtcaattataattggatgatcagtccgttataattagatcaaatagatttaagaaaggacgaattaatacttagtgctgtaataggcaggattgccctaaatatattatggcataaagtgatttaaactttggagccctaacacaaaattcatttttacctatattaaaaaaaaaaccaaagcagaagactatttttaagattttaaccaaacttttcaatcaaatcaaattaataatatttacagaaagtacaatatatgttgttatgaatatactttgatgattaaattaatgattttttttcccacaatactaaatatgtgtgattgtggagggtggaccatggaaaaaaaaaatatcgaaaagagcttacaaaatgaaaagttgttaaaaaaaaatagagtttaaattaataaaagtgaaaattttcaaaagaaaaagtagaatgaaaaattaatttaaataaatctttaagtatatatataattggattggctgtagcaaaacattaaaacaaattcaaaagggtactgccacacaagatttgaacccacatcacttataatgtgtcatatgccttaatcaatccaattgtagacaattttggttcaaagtacacttaagtttaattaaatgaaaacagaatgaagccttttcatttttattttgggaccttaaaaagtaacctctttatgcttaaagacgaccctaatatataataagatctcctctattgattgatccaacacttctaccttatttaaaatttcggttaatatattatctagttacaaaaccttagattaaatgtaacattagatcgttaatatatataaatatattaattatatgtaacgtgattttcatgatggagagataaatataatttttccttttggaacttggaactttttttattatattaatgaatagttattagttacacatataaattaccatcaataattaattggagtaggttaaccatgtttaactattttctgatggaaatgtttaattattatacttgcttaaaaaattattaacctataagtgaattagtgtattaaatcgtgaataatttttcgtattatatattatgatcattattttcacgtgtgatgcaattttatcatggatatatacatacattttaattggaggaactacgaaaatcacatacaatattgattttcaatttaataatacatagagattaccatcaataacccaaatggaataagttaaaccttatacgtataggttaaggaaacaagaaattattattactttaataataaataaacagttaaaaatcaattaattattattattctagaaactggcctgtggtattatattagttcaccttggctaggttgttgttgtcgaaggtctccaaagtcggaacaac

SEQ ID NO: 195171 - DNA, 981 bp, Cannabis indica
tcttatggtaacatgcagctgaagttggagttacgtgacagggtcgagaacctttttaaattcctacatcagttatccagtttgaagaggaaaaacaaacccttgcgagatggaacatttgcttctgaaagtaattttagtggagacccttacgcaagtaaaggcctactttacaaacttttaatgaaagttatgaataaaaccgatgttcctgcattggagtaccattcctctacggtggggcgacttttcaagagtggattcggaagatttggcctcgggcaggtaagattttcttccataatttgcttccaaatctaatgtattatattatcttgcttgctaaagatcgcagctaaacttttcaggcaaaaccaaatctaggggaccaaaatgtcatcatggttttcattgttggaggcattaacggccttgaggtctgattttctttaactattttgagttttcttttctcctttactcactgcgaaaatgctacattcatatgaaatcgaaacctgacttcattttaatgtggcgtgcaaaggtacgggaagctcaagaggcattatctgatagtggaagacccgacgtagaattgatattgggtggaacaacactcgtaactcctgatgacatgcttgatttactaatgggaaattctagttatatccgatgaaaaaaaaagtacagagaaaatctatcagctcatattgcaagtgatgcttttctgtagttggaaaaggtaacaatatttatgtgttactcactagcagtgtgatgaccaagaggagacacaaccttcatgtaatcatttgaagaagctattttgatacggtatattcattttggtatgagaatatatgtaactaacttcttttatttgggggaatatatgtaactaacttaactgcatgtatttattgtaaaaaaaaaaatacctttactgcatggtgcaattttcatgcccacaattacaca

SEQ ID NO: 195172 - DNA, 1032 bp, Cannabis indica
caagtgtcgcaaccttccctaaagagttgaggcacttaactatttctgacaattttctaacttcgataagataatgatgaattggggctaggtctgggggtttcatttgatttttctgagtcttgggggctaggagtggcaactgaaaaagaggaggagaccattagactcccactctatgttatatctcttttatcacaaccttttatgtgtttaattgaatctttggatgtttagaatgactattatgagctaatttcaattttaaggatgttatgcgactcacttgaacctttttttatgaattaatgtagttttcaatttcttcatcatcttctatttaattccatgcaatctatgttaatctaacaattatttattggcttttataattattgtttatgagttcgaattaaaatttgaaaagttcgatttgattatgcgctatggttgttatgaatgcaatttaatttagaataaaagtatctaggttgattttgtataatttttatcagttgttatatttattgttttctttgtgattaaatgctgtcatagaaatatacagaactttaaactagattgagtttataagtcttaattagattataaactaattttatcaacttgtcaattaatttagaagaagaagaatttaagtaaattgcattaaagtattaaaagagagggtacgtagttgatgaacataattgtcctagtcaatttgttatttctttattgtttttatgtttttttttctattatttttcttgctaaaatttttataaatttatttaatcaaatagaaattaaagattggttgattggtaaaaatctcatttaacgttggtatagaggggatgagttatattgctaccatctttttacgttgaagcaagtgtagttcacataccgtattgatataactcgaatagtaagatataaaggagtatctctctttggggacttagttccacttcactctctatccttgtggaacggggctatcccgttccccaggctagtatcatc

SEQ ID NO: 195173 - DNA, 1638 bp, Cannabis indica
taaccactacaccatagaaccaagtcgtacgaagcaaacccatactataaatgtaaacaaactaaaattgttaaaaatggctacagtcaaatcatttataaaaggtgctatatggacatcgagggcttgcttgaggacattttatatttgttgctattatagacaaatctaatatcaactacattctatagaccgttcttttcagctacatacattgtaatttgtaccctcaaatctaaaagactgaaatggcaccactgaataaagtcagtgatcattatgtctaatgatttaagaaacgaaattagagtttcatttctaaacaaacactacatagctaaagagtatttaagatacccaaattgttaggatatggcatttggttagtgagatctcagatctcatacttatttacattaacaagactatacaagaacttttaactgtataaataactcttttaaaattaataagatgtggacaaaagcagacatttcaaaatgagtaaaaagtagaggcaaaaaaatgacgtgtacatgatatttaatatgatttgaaaccaatacaaaataaatgtgtttatgagtttttcttaaatcagtttgagtctttttccaagttgacatggctaacttatttataaacatataccttttttgtaggatgtagattagtggagatgacgatgacttgaacaaaatataacacctttgttcaaaaacttatttcccctatctctaagcactaaaggaactcttatagaaatagctttgagaataatcaagctttagaattttctagcaatgtgcttttttgatagaaaatttctcttctcagtatgagcaccttagatctctttatatagtatttaggatatcaccatttgaaattctaattcacaagtcataacttctatggatgttatggactcaataaagagatgtaactcatgcacaccataactcttatagagatataactcatacacaccataactcttatagcattaagaatttcaaattaagatgtgtaacaccttttacactcttaatgttggtgataatggtagaaattactcatagtaacaagtaaccccccaaatattacaaaaagatgccaattgtcatatgttgcatattaatttgttacacatatttaatctatacattattttattggtaaataatataacattgcgccgtataagggtcgtattgtattaaataataattaacactgtgtttggataaagtgatgtattatattaagtattacgaccaaaattttcaatataatatatgttgtattatttaatacataacggtcggtattagcttgtattaaaatatttacaaaagattggggatcaacaccaatctctgacgcatgcgcatgagcacctgcatgcgcatgagcacgtgcatgcacgtgggctacaacacctttagatgttacgcacacgcgcacaagcacacataaaaactccagtcctagtaaggttggatgtaagctcacaaacacacgcgaattcacacatttatgcagattttttatgcaagaaagaaaatgatcttaactaaacatttccattaaaaatcattgatagctatagaactaaatatacttcaaatgttacat

SEQ ID NO: 195174 - DNA, 1816 bp, Cannabis indica
aaaaaactaaaaaaaaaacaattctcgtaaaaaacgtacttaaattttattttcgattttttgcttgaactttatttttttagttgtaattgtgttgttgttcaaaatggtttttatttctctttttcgaaataatatgagaaacccaagaaaaaactgtgggaagagaagggtaccgccattgacactgacagagtcgcgcacagcagagctcgaattcgtaaaggaaaaatataaagaacacagaacttaaaccctttgtctcctcttcaacatgggtatcaaaattgaggggaaaatagagaaggtgaatgggttagaactcagttacgatgacttcgtaaagagatacatggagaaaaatcagcctgtggtgctcacaggtctcaccgaccaatggagagcttgcactgattgggtcacttccaatggcaaacccaatctccaattcttcgctactcatttccccaaatcaacagttcaggtatgaactgacttttctttctttattcactatttttattttactactgtgaaggaattaagttttggtggcactgttttgaatatatatatatatatatatttttttttttctctcttagtttattttatatatcaattcatttgctaaatatttcatttttctcttcttttttatgtgtagtgaaattcggttcttgggttccttagaatgtttatcctggtttttactaatgaataaattactattgtattaagaagatatttaatttatggttggagtttgaatatttttacatttgagctgtgttgcatagtattgtcactgctcacacacttataggttgctgattgtggtaccagagaattcacagatcagaagagagtgcaaatgtctgtttcaaagtttgttgaccagtgggttcaagggtcagtacaggaggaggatagtaatgcttcaactaaggatgtaagagacaagcccttgctgtatttgaaggactggcatcttgtaaaggtatataaggctttttttttgttgcttttcagcccatggtttgctgctcccatgagctgggttcaattatttatgggaggaacctatctaggaattttttagttttttctgtcttctaaagattttaggctatgtctgcaagttaaattttggcgaggaaagaaaaaaggtatggaaaaatgtaggaaaagaaaagtgtggagataaaaaaaaaatcaattttttatatttggtatgaaatttttgttgaattaagttttttccccataccaaacataagagttattattattattatttatttattttttcttgctttatcaataagaattaaaaacctcaactttaatgcacgtttttatcacagaattgaaacctgttataattacatgaatcgttgtttgtgatttgagttttatgtgtatgcttcatgatcctatttttccttggaatatgaaatcaaagaagaaatagcacatagtaaacgtaagccacttgaggctagttcaagtggttgggtgtgtgtgtgtgtgtgttagagggtgaggggttatagtactcattgtatcaagaaaaatgtccacttaaagagtgaatttcttgcctagtttagttttttcaagtttccagctctcttattattttcaatttgatcctaggagtacccagaatatacagcatacacaactcccctgttcttttgtgatgattggctgaacttgtatctcgataactaccgtatgcataaggattctgatgtttactcagatagtaacgaaatatgctgctctgactatcgttttgtttacatgggag

SEQ ID NO: 195175 - DNA, 1965 bp, Cannabis indica
gtaattttttgctagtataggtgataattaaaaacgacatttattattattttactgtaaatgcacagttaaaattgcaataaaacatttagaaatgggtaggaaataataatatataattccacaaaacacgtcctttataattagttagtataatattatattttcttggaaagggaatataagcttcacagatgaaggcttgtacttctgctcatgtagaaatgtaacttaacaaaacttatagttgtactacaagtgaccagttttttttaatcaaaatatataatacaaacttttgaaattcgtgatcagtttgctgtacttgtacctaaaaacttgtaccaaaaccaaattaattatctttaattatattgtcaataattaataataatcaacagcagatgcaaatggttactattacttgcttcttcttcttggttttcatgttcatctgatcgaaggaagccaaacccattttaatgtaagttattctcttttaattaatttgcagaaaaataaaataataatatatcatggaatattaatcaagtaaagtgtcatttggtttatgacttatttatttattttaaaagaaaaacccttaataatgtatgttgcatccacttttaaaggtaaagcttatatagaaaaatagtaaatatagtatacacttgtagcattactcatttggagattattaactagtacttaaatatatggtaaaaagattataaggtgttatgttaattattttagattcgatattttcattgttaaattagaataacgcctcttcaaaaataaataaataatgcctcttcagaactgatgatatataattcgttgacttttagattagctagctaaatatttgatcatcgtgaaattatgaaatatgtctacgttattatgaatttgctattccttcaattttcgctactatattcctaaactattattctcttaaattaactccttgtgggtttaagatccagctttatgatatgggaggtatctcatcaataatctttgcttctgtctgtttcattaaataaatacatatatatataaacacacacaaatatgtatttatatcacagaccaagattttcttatatagacttattttcgcagtggaaattttttaatgtattgaattgatacatcaaaattatgctgtaagagaattaaagcttattttttgtgtttatattatggtttacttcgagttttgatcgtaaataattaatttgtataataataaaactattaacttaaaattatagctaggattgcaaattaatatattccattctaattatagactagctaaatatttgttgtatatatagtttcctctcttttatgtgtttaagggatcgttcttgaaaaatatatatataagaacagaaatgatatatatttataggtcatttttgacttgaaaaaaataaaatgatatatacatatatataatataatattctttgcttgttattactaacaatttcacttatctgttaattcatgtagataataatattgttattagttcgccctcaatcctagaagttttggatgatttatggctggtagagaatcagatcattgttaaccctagtacttatgatgatgagcaaggaatttcaccattattgagaattgagaatattaatggagtatccaaacatggctatagtcaccaaaaccatcacgacagccttattcttcaagcctcatcagaaaatggaaatgtgttcgatgttgctcatgatcaacaaggtaataataatagcattaacatatgtcccaataataatgtggagtactactcaaacatgtttgttgatcaacaagaaaactcatctatagtgaatactaataatttgagcactggaaaagaatttgatcattagctcaaaggtactgaagggaagaaaatcaagcaagtgtaataagaaa

SEQ ID NO: 195176 - DNA, 1132 bp, Cannabis indica
atctctaaaacctgtaataaatgaaaacagtaattaaaaaaatgaatttattttttttaaaataaaaagataaagaaagttgtaatagaatattacctttcgcccatgagtcaatcttaaacgagggtagtcctttagtatatcatggacacattgtgcaatcaaaggccaattctgataacaaattaaacacaaaaattgaactcaatataattagtatttaatatttagcttgtttatttgttttgtttaaccaaattaagataattatatattatatgatcaattagttaccgtttcttctacattgcgataatgtacagaagtacaaaacttgtgattttcaacttttgcaccttcaattgccttggtattctcgacaagggttctaaaaacctgaatttaattttagaaaaaaaaaaaattagaaaactctattatgaatttttaattaatagaaagaaaattctattcaattcataatcctctaataaataaataaaattttcaattacctcatcgatcatagataaaaactctttagcaggctggaagagctttacctccttatcctattattataaacaaaatgtttagttcatcaattaatgtatcatattaaaagagctgtaaaaggtgaaagggttaatggttaattaatcaatgaattacctgtttattatcaatagatttgacacagttagggcccataatgtccattccatggctaccggcataatagagctctgttagtcctattaaatcaaaaacctgaacacaataatgaaatttgctttagtaaattaattgaaatcttattaacaacaatttcgatataaaaaataaaaaatccatttatatacataccttatcacggcttcttccacttatgattgccgttggaaaatactttgccacatttttcacagcagagcgcatctaagacacaaaattttgtttattcattagtattaagtacaaatatttgttaaatttaacagacaatttttaattttatgagttttaaggtatggggaaatttaaaaatatgggaaaatacgataagtaactggttacccttttggttactccaagagtacgtacctaattactcttagttttctcatatttt

SEQ ID NO: 195177 - DNA, 609 bp, Cannabis indica
accaacctcaatcccctctctctatctctcgctcctttcactgtgtttcttggccggtgttggcctcttcccttggtggacgttggcctcctccccttggtcggcttaggcttcctccccttagtcggcgttggcgtcctcccctcattcccatatcttgcattcatagaggtgttgcaactgggtttatcaagaactttccaccattcgatgtctcctatgagatctggtgtaccaagaacaaatactccatttgggaatgaagcttttcttactctgactttagttgcatgagcaggttgggaaggcaaccatttcttcaattttttttataatagtttctactattttcctatggaaaatataaaaaatatatatgtattttttatatgggtttgtaagaatttttcttgatagtttgtgagttttatgtagataaatctggtttgacttttagttgtttaaatatgtattctaacaatttgatggttgatcgaatctgttttggaatattcatttgattttatattttctttttgcatagatgaatctgggtattgaagatgggtttggaaggttgaatatgaactttaagtttttttttttttt

SEQ ID NO: 195178 - DNA, 3135 bp, Cannabis indica
gatgctgttatgctatatttgaccaacagcgacctaaaaattaaaataaattggggcgtcactaatgtcgtaattttacccatctttctttttaaagctcgaaaagatattgatattattactaaggctgataattggctgtgaagggttacaattcacaatctagcccgtttggccaacatgtcagcaataccactggtagatattttaataacgaaataagaatacttaaacgaaaagtgagttcaataatagattaagaaaccctaataagaatgtttccagtccggtgggcaattgttgttgccaaaagagtaatacatacagatgttgccttaactcgttactccactcctggccaagtcagttcacactgcaaacacatacaatccctccaaaacacagccccactttgaccgaggcatttgtgcaagtgtcccgagaccaaaaatatctcttaagcaacttttattaatactctaataacacaacacactaataggtacacatgtattcgacatggctacctaatacatatgatataaaccaaatccttgtttggatgaagccattcgagagtctcaaccaggattcatagttttcaaattttgttgaaataattcatggattgacttttggctcccatgatgcaattatatatttccttgcagttttggttttcttgaatgatttccgtgagaacagcagctgcaaaaaataaaatcacgactaaattagtgaattaaagaaacatatagttatccattttgatacatacaatgtacgcatatgttatgattatgaacatgaagcatgtaagatacagaggaagtgtgtcacttcacaatagctatgttttatagaaattaagagtgatcacttgacagaagctaaacaaatctcaagattacagaataatggcagaactaatcatagaatgaaaaaaaaaaaacatcagattatacagtaatggattatggatcttagtcaccaggccatagtaaaggcgcaaagaataaactatatacacagacaacccacaaaacaacttgttcgaataatataaatatgtatatatttttatatatacatacaaatgaagttaaatgcacaagaactgcttaccttcttgtacttgaggacattagtcagctccgctgggacagtccacttcttgaaatattcaagagccacatctagatgaaacaattttggggccaaacttaaatctacagcagtaactttcttaccagcaacatatgggccctgattccattccaaaattaatcagttacatattcacaaatatcaaatgtgaagcacttatatgatatctgttttagtagtaaaatgcatacatgtgccttaagatgtttttcaagtgccttcagttctgtgaggagagcctgttctgacccatcacttgagttcttactcttcaagaaagtcacaaagttactaaatatatttgatcccctacacatcaaaaattataaattcatctcatttaattagaagaagaggagaaattgccttatccaaaaccaacattcccttcccaacaagtgaacagtggtcataaagtttaaatttttcacacactacatagaattactaaaaaaaacccaaaaaatagaaaagctgatctgattagctataaagttaaactcagaagaaaaaatatgaggtacatacacagaggtaaatgtggtggagtagtaagagaaggtttagggtatttcttctcaagaatcccaacaatgacatcagaatcaggtacccatttattaccaaacttcaccacaggcacctttccttgaggattcacttgcagaaaccatttgggtttgtgacttagattgattagatgcatctgataaggtacattcttctcctccaaagtcataagaaccctttggctaaatggacagtccccaagaacattaggagcaccaactgcagccttgacagcaacctcgagagccaaggcgccaaacgaggagaagaagaagaagaagaggataagtaggagtgagcaacaggagctatgattttgagaaaacattatatcaaacgattatgtttcttctgatctgagacttgttttgtcagtataagttgctgcactattaaaaagaatttggtttgaatctcggacaaaacacaccgacagctcgacttggctagactaacatggacttatctccacaccctcatccacaaaacttaaagtatttcttctttaataattcactttaaaaagtttggacattctcccacttcaaaataatttcatccagcaatatgagtagtgtgtgttgtgcatgaaacaaaataaaaagaaaaatcttttgacttagaaattttgcacatgtaatacaaattagaagagttataaatatgccatctttattatgacattttggggtgaagtgtattaattaatggtcatggaggtattcatgtagcttcgtacttcactctattttgattaactcatcatcagtctaattttagcaatattccaatgaggtaatcgttggcataacttagtggcattaattggacacttcctggtaatgtaatgtaatgtaattgagattcaaatgtggaagggcgaaaattggacactatacgattgggccttgggcctacttcctacaccacttgggcctacttcctacaccacttgggcctgttcttctgatagaaggaccgagagagtcatacaactcaactcaactcaagccgaggcgggaaaagcaaagagaaataaaatatataaaagctcaagcttttgcttccctgctcagcttctccaacaatctttatactctctctctatctctttctttctctctctctctagagtcatggctcgcaacaaggtaatcgatacaaattcatcttctcagattaatactgtttctttcttctttcgtcgcttgtttttttttttgtttaatttttttttcttcaagtaaatttctggtatcattttcgttaatacttgtgtaagctaggtagacagcaatcgagactagcttgttaataatttttcatatcattctcgctcgagtcaactactacttactctgctttgctttgcttagggttttctgtaaatttcatttt

SEQ ID NO: 195179 - DNA, 1467 bp, Cannabis indica
tgcaaagatgttaccattttgttgaagaacttgtgttctatgatgtggattgttttccatggacggtatgaacaaacaattctgtgtttcgatactaaaattcatatttgctttttgatgtgatgcagagagatactactgggttaactgctgagaataaggagctcaaactgcggttacaggccatggagcaacaagcacaactcagagaaggtatggttttatcaaaaagcctttaatggaaaatggattttttttttttgttggttctagctattaacaatttcagaccaaattctcctctatggtttcggcttttctaaggaataaatacatgttgctcttttctatttctcatttacagctctgaacgaaaaattgagggaagaggttcagcgcctcaagatagcaaccgggcaagttccttctgtcaacggcaatatgttcaaccgaggactcgctcctcaattctcctcacaccagcccagcatgcatcactttggtagccaccaaactcagcagcagcagcatcaacaacagcaacaacagcttcatatgcctcagtcatccaacaataaccagaatcacaataacgggcagcctcatcttagcttcttggactacaatcaaagggtgtagaactgatttttaacccgaaaaaaaaagaaacttttgtgttgcgccatcaaacaggataataacccatctcaggtagcttctgtacatatagttaaaatatgtatgtactctgcaggtatgtataagttgttgtgatggactggttttggtaagatcagtcttttatatcagttcttttataggtattatggctatataagctatcattattattttctaggaataggattttactcagaaaatgttgttgtaaagcaaaaaccttcattgttggaccaattatgggcaacaactgtttattgtcatttgcaatctttacctctggcttacacaaaataagaatctagtttatagaggttaatatccaaatggaagttattgaatgttttgagtcatattttggatggatattagtgggtttgttttgttttttttattattattatttattatatacatattttggtaatgagataacgtggaagttggaggtgatgatcaaggccatgtggtagtccattttattatcattattattgtagtaacaaagacccgaaattatgtttgtaacaattgattatattatatgccccaaaaagctgacatgtagcacaatatatataatcttgatatgttgaatgaaagtatcatcgtcactataatgatgggtttttttatttttttattctttgtattaacaaataattaagacagcaaacaacaagtggcataatcaaattcctgttctattagttaggtgtttaggctgtaagccttgttcttctatgcttaaaggaatataaataaggggattttacattaatatac

SEQ ID NO: 195180 - DNA, 1382 bp, Cannabis indica
cattcgccatatacatataacactattaattttcgtttgttcatatatatatatatattattaattatatataagtattatatttaataatgatatactaaagttttgcgcaagcagccttgaaataaaaataaaccaactcatgatcaatcatcataacttattatcccgacttcaattgttaattgtttattacatataagtttacagtattgtaattagatattagtgtctagtactatatcactaaatttagagcattgttattaaatattataatgtcagtacacttttatgagttagtcattttataaatagtttgttattttttataataattattaaattaaaataaattagactcaatattaaattgtcaataacaattatatgaaatttcacaaaagttataggcaccattagcatttctcttaagttaaattagcttggattgtgcatatcaaataccttacagtattagatactattataattctttgtgaaccttattagctagccttaaatttatatatatatatgtacattgcatggatatgtatatatgtgtgctttaaaaatgtatatttctggtttgttttagctagcccaatagctatgacttaagttgacacgcgcgtacgtaagaaaagcttaaacttccatggaaattagtgaaatgataaatattctcaatagacattaaaagtatttctacatcgcattgttgaatgtttttcctttcattttataacattagcttccgcataacggctggaattttatatatgtatacgctttgtatttgtttttcagcttcttcttttagggtataaacctatatattacaagaaaaacaaacctcacataaaaaacaagctagccaggaatatataatctattccacttatttatatctctttgtttgttaatcaatgtttttgatactcttagaattgtaattaacgtgcatgggttttatttcaaaattaattgagaatgagagtattagttcatgtattttctgtatggtatttagtttgccaatacaagactctctaataaatacaattaatagctatatattgtatataggccaaagatagagattagctagaggatatatatattaaacaaggagaaaattattacttgaagataatattaatttgttttagagtgattaatcaagtctttcattttacttatattatgttgttttattattttgcaggttgaatgaagaataagcaatgaaaggaatttaagatatatgttaatctgggtggccaatatcttgaagtttcattctggtgttgattttaattagtgctactttctgcttttctactcttacatgcatgaatggggtttgatagctatat

SEQ ID NO: 195181 - DNA, 1254 bp, Cannabis indica
ttgggtcacagtcagtcaccccagaagtctctttctctttctctctcctcaatggaagaagaagggaaatgtgaaggagaagaatgaagaacctcagtcatggctttacctttatttttttaacaaattaaaaaatgaaaaaagattagtttttattgaaagaaattgaaaaaagaaatgatttttattgttaaacagtggaagattaacaaaccctttgaaggagaaagaaggtttggattggatcaaatcaaagaatgagtctttttcttcaaagcttggtttttttttaatggtcgtgagaatcattaactctcttttctttaaagaaaataattaaagaaaaaaaaaaccatttttttattgttttggagggttgaagaagcaaactatatcaacaaacatatatatacaaataaagtgaaaaaattaacaaataaaaattgatttggtgggattcaatcaattgaagttctttaggaaatttaagaaaaaaaagtgagtggtcaatatacttatattatgaatttaatattcttagattaatccaattacatccaatcaatttaatttattcgattttaatttaattgaattggattaagttgatgatccatatcgaaatttaattaaatttaattatgtattatatattaaaataaaattatattttgctacaaaaaaaataaaattatatttctttatatataattaatattctattcttatactatttttttttaaaaaaaatacatattattattagttgttgcgttaaatattttgaggtattttaatctttattttatagtattttattaggtacactaagattttaattgtattaaaattgttaagttaatgattttatgaaatatttaacttaaatgattggtaaattttatgttattacctatgaatgtttaagttaatattaaaaattaatttatcaaataaaatctaaataagaaaactgaactaattcattatattgaattttgaagtttaattggattggattataccttcccctaatgagtagtgtccattattactacaaaatattatatgtgtaatactatatatattttgatttaataattatagtaaaaaaaaattagatattagtcactacttaaaggtagcgtctagccattaattaacaatattctataaaaattattatattaaattatataaaatttaatatttaattacactaataccgttagcacacgttagaagatgttaaac

SEQ ID NO: 195182 - DNA, 3190 bp, Cannabis indica
ccgacagaaattccgcactttctatagtaataaccttaaattatactgattaatatatgattgtggtcccagttttttcacaatgttttaaattcttatattaaactattacaactatcaaatagtgtttttcgattcaaaattcaaataatgcaaaaaagttacgtattaatttttaaacattatacctacctttttttttaagtaaagagataatataaaatatgattgttcataaatttgtaattaataatgatgcactcaaacgtaatgatatagattaatttaaaaggatgacttttaatcttcagtctttattttgaattaaaaaataaataatagatgtttcttggaaaatataagtattatgatcaaatagtaaaaagtatatattgtaaaagacttccttattacttcatttcatttcattttatttttttctcttttcttgttttgttaatacttctcttctcctagcatggatgcaaaaacaactaccttggttacaaccatttttgttggtttaatttcattgtccaaaagctcttatttcttgaccatcactacattaaatcctaaacatgatgatattacttcatcacgtttattatggagcttgatttctattctcctagggtttgttgtctttagggtaaggaatttaagcttgtctatttttttcaatggcattgttttggcgttgatcatcttgaacatgtttcctcattttatttttcatcataattataaacatataataaagtctagttgtgttcataatgatgaggaaataatattattacatgatcatcaatattattacaatctctattcatttggagcttttgcccttttggccttgcttttatcatcacatattcacaacaaaaaaatacaacttggtttgttttgtgctcttctaagcttgattattgatacttgtatggaattaacaattccaacaaatattgatatttatcatgatcatgtgccaaatttatggtactatatgtttggggcttgttttgggttgtttttcttattaattcaatccataattagttttattggccatgaaaacaaaggaagagtagaaaacatatttctaaacatctttgaagtgattttagcaagtgttggccttctttttcttttcttatctccttttgttgagcatcaattcaaagatgctcatgaggatttgaaaggtttcatctttattgccttagcttttctaataggacatttcttgtctaatgcacctaattacattaacaaagtggctgagagttgtgataggttggttttggttaataccatggtgacattttcctttttcttaattgtttcttgtgttactttcattatcaagtatccaaggtttagaatacattcaaagtacatagagtgttgtagtagtaataataatattaatcaagttatgaagaaagatgaagagatcattatttcccaacaacataacatatttgatgtgttcacttgtggatcattttctctacttggcttgatgatgatcattctacaaccatcttgtgtgaaacttcattgtttgttcaactttcttcttcaattgaccatggatacctcaatcgaaatattctcgagaaatgatgatcatcttatacatggtactccaaatcatttattgtttttgtacatgtttggtgcttgtgtgtactgttttatcttgatttttggaaagagttatattggtcatcatcaccaacaaccaattgttgaagagaagcaacaagaaagcattaatgaaggtcccctacaaaaaaagatgaagaaaaagaaaaagaaaaaagaaggcaaaaagatgaaacgatacacaacaccaacaaattcattggctgtggctctggttggggagccctctcggggtaaggaatccaaagatgataacaagacaatattgcacagtagatcatttcaattgttacgtcgatgttcttgatttaccccggccttttcctttgggaagaaaaataaatgaagaatttattttcttattataataaagtatttgtaccatgtatacgtagtaattaagatagtcaaacatgccttttagagtcttcattggagttaactttcagttttgcttctaaacttcaattaaatgatgctgaaattggtgttaaagaatatgtattgctctccattttctttttcttcccaatggaagttttttttagggattattagaaatttattatcttttattctagatgtaactctagcttatgtattatgttattataaaaatgttgtttatattctagctaaatttgtacttacaattaaatgaattttctgactgtttttaacatttggggtgatattattgtcagtctctataatcgatgcctattcgactgtcacaaaactgagtgaaatagacatcgattggtaaaaaaatcgtcaggtatgcttatgtcccgactgtttaaaactgtcggcaataactggtgctgtaacctacagtttagaatagacgacaaagagattgtcgactgttctaaatcgtcagcaatagttagccactattgccatcgattttgaaccgtcaccttaaacccccttaaattgtgaacatgaagtcttatttgtgtgcgtgtgtgtgtgagagagagagagagaatagccaacagtttataacattatagtatatccggttgttatatgttggctatatgttaactgtaacaccctattagtttagacgtgttatcgtgatttaaagttaactgtgtcattcgttgctagtcaacgaggttattagaagtcgtgtttaatcaaaaattttcttaattaataaaataaagttgacaaaagccgggatgatgtatttcaaaaattacaaccaaactataacatatttattacaaaacttgttgcctcacgactaatcaaaatacaacccgctgcccgaagatcgaacactctaggtctaactgctctgatatgtacaatctttacctgctcgacctcactactattcagccttagctttgcctttacctatacataaaaataataattgtgagtcgacatactcaataagaaaagcataatcaaattataacataaactggattataactaggttcccatacacccaatcataaccatattctgcatcccatgcgtactgagtctagaa

SEQ ID NO: 195183 - DNA, 2508 bp, Cannabis indica
tagcaacctatataaaaattaccaaagaaactacaaaagcaaaggacatcagtggtgcctagcatatttttatgtgttaatatcattattggtccaactaagtatgtggtctcatatagtttaatataataatatttagggagaatcgctagccaatcgaaacgcaacatgtcaagaagtgctaagcaccacttttgcctaatagtaatgactaaaaaaaaatatacaaagtgagtgaaaaaagcaagggaaatttggtttagtatgcttaatgtaaaatatattgttttaatataccacaaaattagaaatagtatatatatagtacttttaatatttttttctcgtaaaaatacctttacatttcagaaaaacttctctctctcactctctggcgttaaccccgacccagatcccctaccgtcgaacacacagacctagaacctcggtcgcaaggcgtcgacatcatcttctctaacggtctctctcgttttttgtatttgtttcttctgatcatttactagttttttgtgatatttaaggatgtatttgcaataatagaacaaatctgaggttagggatgaagtttagcgatgatttgcgatattttgtaatatttaacgataatttgtgatatatagcgatgatattagcgatgtgtttcacgatgttgtagattgaaaacatttagcatgtttcatgattcgcgatgtctcacgatatttagcgatgttttgcgacatcatcaaaaaccagaaaaaaaagatgcagtaaacaaacgagttgagaactcatagatttttagggctttggttttcatgatttctctttgtagtttcgcgatattctcttcaattttgttctatattttgtcttcgtagtgggttttgccgaaggtggttttgtggccgtgggtattgattggatttggtgagagttagagagagagaaggagagggccaagagaaaaagaaaatgtataagaagagtattttggaatttaattaattttataatattaaattcttatgtattttaatgtcacatagtaaaacatcattaacaatttttaaatatgaatggtaaaagtttccaaaagaaaaatgtaaactatgaagccacgtgggttttcattcattaatagtagtctttatagagacacgtgatgaaacagaaagcggcgtttatgaaccacgttaaaagtacatgtatttgaatttttccacgtttcttatcttaaataatatatgagccaaaaaaagcgatagtagcatgtggggtcaaattataacagcaacaatcataataataattagagcttatttttcttctatattaatagaccaccaatctcaatcttttccctgttctctgtaataatatctgaaaaaataaatatagtaaagtaatatattacagtactatagtcgccatgaataattttagtactactactgaagattatcatcattattctccatcttcatcttcctcctcctcagcctcatcctcatcctcatcttcaatccataaagattatgtcagtacaaaaaatctgaatatcaactcatcagtactactacctccaaataatagtaacaattttacgaagaaatcgttattacaggaaaagagaaagtcaggaagaaagaagttcaaggagacaaggcacccaatctacagaggtgtacggcagagaaaggggaagtgggtttgtgagttgaggcagccacatactaagaactctcgtttatggcttggaactttttcttctccggacatggcggctagggcttatgatgttgctgctctagccattaaaggtgagtctgcctccttgaatttcccacaagacaaaaccacatatcagcaaaatattgattattccaccacggcctcttctagtcgtgtggccgctgcaccggtggacgtggtggtcactgatcctacgattactattagtagtaatagtactcgtgagccactgtcctcgtcctctgtgacggtgacacaagctcagagtcagactcaggatcagggtccgggattagggttgttgacaaataataatagtagtagtaatgttgatgagtatttggatgaagaggaggtgtttaatatgcctggattgctggatagtttggctgaaggtttgatccttactcctccagccatgaaaaaaggttttagttgggatgattacaataataatggtttcaatgattattcttctaatgatcataatttttctctttggtctgaataatcatcatcatcatttatatatatatttattgatgatcgagttagttcttttggagttataaattcgttttattttaattagccagcctcatcaagttgtctccggcaaaagtcagcctttcatatggaccatcaatatcttgttgatcgagatcagcttgttgtttttgctttcgtaaaaatcacataccaaaaaaatctaaagcaacaaaagaaaatctctctctctctctctctctctct

SEQ ID NO: 195184 - DNA, 3073 bp, Cannabis indica
aaacatagaatcttgctcgcctcgagcaatgacaacataaaactaaaacacaacaaaaaatttttacacaaagactccacacacaagacaattgagagattacatagaaattcaagttggcctagcgaacattgatgatctcagaaaaatggaattaagtgtactagaaaaatgtttttgtcataacattatatgatgcccctttaaacttttctcattggataacattaatacctccccaaagtcacctaatcaacaatttatacaagtatatcccaccaaaactttgaagttctctacaactaccttaaaattttgacattcattaaagctccgtaagttggattagtgcactcctctctactaatgtagtctaaacttatccccttgatcaataggactttaataagcttatattattatgcttgggttacggtatgctaaacgatgtattttagctagctcacacctaaccacttcacttgtcaaaaaccgagcctctccctcatgattttttttctctgactcacttcccacactcattatactcacaagtactttgtattggaatagacttctcttgctatgtttattccgtttttttttttgaactaaaatggggggaacaccccaaacattgttgcaagcacactctttttttttatatacatatatgtactagacaagaaaaatatcactatagtacacttatataatagatagtaagagaatatatattggtagtacataattgtgtactttgtgagctaattcccccaccccaaacttacaacccaacatcgtccctaatgtggctaaaattataatcttgaattagctcgccacaagctacactcacctcaaacttaatgtgaaacttgactcttgacaagtgagcaattaagtttggacatgtgtggaaaatgcatgttaggattgatgtaatatgtatgatcgggttgcacaacaagattaggctaaacggctcaaacttgggtgactaaggaaaaatttattttatagggaaggttagaaaggttcaaacgtctaaagatggcctaaatcatttctaagggacaagtctagctaggatttcgcttcaaggaaatgcactaacaaattctagatgctaaggagaagcatccatgatatccaacaattcaacatgcaaaggaaacatacaaaattaggcagcaacataaatggaatgagcggaaaaatataatcatcgagtggaacattaggccacagaaaaactctcaaatctctcattgtcaacttaacaaacacataaatgacatgacataaaagttttaaaacataaaagagaacacacaattagcacaatacaaactaaaaatgacacataacaaaaaatataaaatagcttaggtattaggaaactccctctactcggagtcctcgtggggctcctcccaattcgtgttgatggccaagcccgcgggttaagaaaattgtacactaaacaaccacaacaaattcacctctcttcttttctctttttaagcgctgccccgcaacaacccctaattccaacaatacactactatatccttactccaatcttgctaaaaaattaccactctttccaaaaaacaccgactgaaattgaaaaaatttacaccaaaattctttcacactcggcagccacaacaattgctccatgcttgtaatctctttttttcagtttgaaactactcatacaacaacaataatgcttctaattttacactagaaaaagttgacagctacaccaaaaagttacaatcacaccactattaccacagtaatctttccaaaacctccaaaacttccaacattaccccaaatattctcataacattctaatctttatcaatttacaccaataaccatcactacaatgagccacggcacataactcccaacactttaccaaaaattttcaaaatatcaattcacccacatgaaatcaatcaatactcggtagccatgataaaatttgcataatacttactaaatcatttcaacaactccaattagcaatattatccaaattaacacacccacacactaccaattaccactcggcatccattataaaatccaaatcaacaaaagaagtattcttgacaaaccagaataatttggtcgaatggaggttcagttgagctagtggcattgacagtaaggttgctgattgtgattcggtgcttaaagtcaggcgtagatttgaatgaaggttgctaaagtgggttctggtgctaggtgaactgagatgaggggagtcaagttggtgatttgtggtgtgtccgttaaaaggagctggtgcagttgaggttgacgacgttagtggttcatggctgggttgagtcgaatggatgatggagtcgctggcttgtgctttgggtgaatgggagctgctatgtttgggtgagtcgaagatggttatgtcgtgagtggtttaagtgggaggtgatggtggttgggtatcgtatggaggctagggtcggtcgaatgggtaaaatggttggttcgaggtgaacgaaggcgaagggccgatgaagacaggtccggttgtagctgggatgaatcgaatgtgggttctagtttcgtgcaggtgcgatggtggtttgactgaatggggctgggattggttcgtggtaggggtcgaatggaagaagtgatggttgtagggttgtaaatatgtgggctgaaactcagtgggctgggtgaatagtgaagggggcctagttgactaaagactaaaagattaaagccccaatgattaacttatgtttactttatttggtatttttgagtacattggtcagctgaagtacttcagcccaaatgattggactgagtaaaaataattgtacccaatgattggtccattaaaacaagctttcaatcacatgttctttaccatttctttttgttcagactcagagtttcttttctaaaccatgatattagaacacttttgctgccaaataaaattgttgagcccttggtatagaaattgggtagcattcttccaccccaaccttaatttcttttgctcatcttg

SEQ ID NO: 195185 - DNA, 1725 bp, Cannabis indica
cggaagtggagttcaggtagtttagccgccaaaatttgagttttggtggttaactgtcacaaacccaaaagttgggggggtttagccggccaatatccctataattaatatatcatttatcttataattgtatttcatatattctctaatatattatcccaacaactcgacccaccaccggcactatcctttgcgacccatgactgacgacaagaagctcgaccaacgacccttgcgacccaagactggcactgaggagctgcaatagaagaaacgtcggagggttttttttttttgtacatttgcactgtcttgcattgcaaaaacttaatgtgaaaatgataatgagcgtgttaattttttttttttttttaagtctgctcgatggtgtaagatatttatgtctaatatgttgattgattggaactgtaatcttaagttgaagaggacaatatgttgcccgatagtgtgcataatattatatttttttcaattgttgagcatgttgcccgatatgtacacgatattaggtacgatggggtacaatatgtaagatttttgcatgttttcatctatttttctttcttgtccgattgggttggttccgatggtataaggtgaaataagtttaaaataattgtcgggcacaatcgggcaaccatcatacttaaatcaagaaatagtttggaccctaactatcaaactcgcaatcggactatcatctctaacattcaaacactatcatcgttgaactattatcgggcgcttatcgtgtagtattaggcaaattcaaaaaaaaactaggtaaccaaaaactcagattccaccataaacacgatttccaccacaaaaatcagccaaaaataataacaaacgacagatcgaacatctaaacaaaattcttaatcatcaaaaccatcaataacaacaagatttaagaaaaattaccacccatttattttcttcaaaatgaaccaaaatgcttggttttaatcttcaaactttctttaatcattcctcaactaatatcataagagagaaagaaagaaaaaggatgggagggatacagtggggagagagaaaaagagagaaagaacctaataatgtaagtatgaattaatcaaatttcccttgatcaactcacattttctagtactttcaaggcttagttaacaatcttcagtttgcaatgtttggtaataattggcaagaacaccccatccactaggggacataaaaccctctggtgggttctcaccattcttggcataactcctcatctttgttccagagataaactcaaattctttagcccttgaagggtcgaaaaaagccattttcttatgcacaatatcatatgctgccactctgaatggcaatatatgtagtttgtcaagtccaggagccatgcttaggagtttcttaccatgatcaggatcatacaagtctctgttttgtgttgggtgaggcataccagctggatctctgcccacaatgtaaaaattagctccaccatttattcttgcttttgcatgccattgaacttctgtgggacctgcataatgcatgggagatggaaatatagccactattgtcgttttgggatcaagaattccatcttccaatacctaatgatgatcaaggaaataaacattataccgatgtggcaattaattagcagtttcttatattatttattaaatcaaattgtgttagatctaatat

SEQ ID NO: 195186 - DNA, 2380 bp, Cannabis indica
cctcagcaaattcaggattaacaacacttggtttagatgattggaaggcctcaataaaatctccttcatgatctcgagcaatgcatctgaatccatatatgtttgattgactgaagatatcaccatctacattaatttcgatcatgtttaaacttgatttagtccactgctcatctttctctctgacagtgtgattgttaagagagaaattgtaaggtgagtgttgagcagaaatccattgatccaaagtgagtttagcaaatgagaccactttatcaatcgttggggaggattttttaaagatgagatcattctgggttctccatatactccagcaaagcatcacagcaacttccttattgtcactttgcccattgttaagtgctttatcaaaccagccagcaaaagttccttccacactagcacaagctgcaccaaaatatttcctccaacaatctttggcatattcttagagtggaatgacgtgaagattttatgctaaagcaaataatatcatattaatatgagatttaagatgaacttgcagctcaacaaattggataaatgggaccaataaaaaaagagagctcatatatatataaatgcataatatttgcatattgtcttatagtcattttcagtctataataaaattttagtaataaaataaatgttatatttaatgtaatttataaaataaaaaaaataatgtgcaatgtatttttgaagcctattttaaactacaaacaatagcacattattttccaataaaagaaaaagaaattagagttggaaaatatttttttttgttttgccataaaagaaggggggatttaaacttaagacattttctttgtcaagagaagtgtggaaccattaactatctctataacctcaattgagtagataaaatttattgattacttagaaggaaaagtaattttagtgcttcagaaagctttcaaaaactcaccaacgaagccaatgtgggttaagatattagtgcaaacatacacataactatagtgtgtaactgtcgtgtcgtgcttatttacattttgaaaagcttataatatgagtagtgtcgtgttggtccataaacaaataaaaatcgtgtcatatcgtgctaatatttgaaaggagaagctcgacatggctcataaatttaaattttcatgtcgtatttaaactcgtatcgtacttcatttgggctgatttgttttttataaataggtcaaccagtttttttatacgggttgaactcgggcttcacttttatactttttttttttataattaataagttacttactaaattataaattagatgtattttatatagttttaattgttttatatatatattgaaaggaaacgtataaattctactaaaatacaataagagactcaagatacaaaatggagttcaaaaaattacataagaaaatcaaagaaaaattaattagaatgattaaaatttgaatatttattagtaaatatattattattattattattattattattattattattaaataattaaatataatgtatttttaggttagtgtatttgtggttatatgtggtgtcttcaagtttgtaagccaatatttttttttgtatgagttcgtgctcgcggttctgaaactcgtgctaattttatattgtgtgaaaaaattaaatccatatttacaactctatatatatatagcacaaaatctaattggtacataaacatataacacaaattctaattaaggcgaagttaatgaacgggtcaatgtattgcaagcaagcaataattgctatctccctcactcgtcttcgtggacgcatcttctatagcatttcagtcggcacataaaattaaatgaaggggagaggttgggccatttggggttggttgcctgtcccatgggtgatgataaatgagaaatgttagttgcaataaataatttatttgaagtatatcattattgcttttaaagtaaaagaagataagatgagatatcctataaaaattcagaaatttttagaaggttatatattagggtaccatattttatctaaaaattatataaaattttatttctttaaaaggggtgtatagtgtactaatacattacaatttttattttggtatttaagagttatttttttaaattaatttttttttttttacaattgcttatgttatggttgtttgaagtatcttgtaaaattttaaaattttaaaaaaaattaacacgctaaaaatatgatttaaagaatcgattcacatatttataaaataaaagagttatgcattcaataaaattttatttttaacatattaaattttttttatatttcacaaaatattttaaatagctacaac

SEQ ID NO: 195187 - DNA, 1774 bp, Cannabis indica
aaaaaaaaaaacttaaaattttataaagtattaactataactacaatttatacaatataaaaaatcataattactctatagaagattgtgtttgttggtagagacaaatgtttaatgttttaatatgaaatagaaaccaagagtgtgttaggaacctaaagacaaaatcaatagtacatgaattacttaaagacaaaacaataatactttttttttaaatggaaaaatcaatagtacttaaattacttataatatattattgagtataatactagtcaattcaacattataattattgacccattattactttccaatcattttttatttgtttattttcacacacttcaatgtgcaatgatattaaagagggctagtgaattttgacaaaaaaaaatatatatatattaaaagatattagtggtatttagtactttctaatatattaatattgttattagtctaactaaatattaagtattatataatttaatgtaataatatttaggacgtatcgctagctaatcgtaaaacgatatatttagacgatactaaagattactaatactcaataacaatactcttttagtcgtacttgttttgttttagacttttaagagttattccaaatctaagaattccatgtgtccattagtagggacatttgatatagaaacaaaaacaatgatatggcatacatgcaaacaatttgaaactaatcttcaacatttgtcattacatgcatgcacaattatttttatatgcatacataaataataaattgcactcaaatattatgtaaaatattactaaaattaatctaaatagtcccattcataattaatgaataaaagtttaagctagctacaaaaataatgctattgaaataaaatgccaaaacaaaatataaaaacagacaaaactgttacttacattctcaggcgtggctaatcacttcaccattggatgaacttcaaaattagaacttaagcaagattgagtaaacaaccactatttatgataatagatacaaattttgaaatgattataactagtaaaatgggttcatattcatagacttaagtatgagtttaaatttcatttacaaacaatgtgggacttttatacaattactcataaaagagttaaaatctaacaaatttctaccttatcgatttcgtcaacaaattccttcaaattttaaatcaacgacgttatattcaaatcaaactagcaatattaatcaagttcaaacaatatttgaacttacgtttatcataaccttagttatcatattaatcaaagacagttgcagttaaatttagaatatttcttatgaatcaaatggttagttcattaattattaaatatatattaatttttaagattttttatttttggacaatgtgggattattttattatatatgttgtattacatataatttttttgtaatttttattttttaaaaaataatgaaatatcattaaatgtgtttgtctaattcaaagaaccaataagttgtgatcataggtatatttagtagtttcacacttcttttaatacaactagagtgccatgctaccggagaatatcaaacttgattatatatttaattataataattattttattaaattataaatataatattattaatactaaatatttattcatataatttatgtttttttatcaaactatatatttaattcttattttttttaatttcaattaataattaggaggattttatagtagggtatcaaaaaaa

SEQ ID NO: 195188 - DNA, 1952 bp, Cannabis indica
gacatcaacttattcgacgtgttgaaaataatctggtaagttagcctaaattctaaatttgccacaatatatgccggtcaaatgagtttcaatagagataaaatgtggttgcaaatgccactaatttgatgttaaagcaaggaggtatggcatgggagagaccacatatcaaattcctaggactcaactggaagtacttgggagaaaaattgcaagaaatggaattatttatgagagagatggaaatagccttctcatatggcaccaatttttccgttggcattgttgatgaagagttcaaacaattcttggaaaacttaaaagctcaaatatgccttaagctagagcatgccaaatgccttttggccacgactcctgtgggaaaggtagaaacttcagagaagtcgatttggatggtcaaaacaacctccatttctcaaagatgatctaccaattgcatcccacttagggaacactcccaaactcaagaatgaagaatcaaacgaaaggctgaatagtttccacggggccttaagaagcttgattataagaccactaagcagtgacaactttgtttttgcattaaagtgctcaatttcattgggtcaactgtgtggtttgggctgatttataacaaggaaaatggatattggtaaggactaaccatcacaattagtattgtaacaggatgccaggccacattaatagatgcaatgcgatcgatttatggaattctaagattatttctgttccaaagatttctagacgtcaaattcttagctctattaccttggattgtcttcactagttttttaatccacaacaagacttatggccaagccgtatcatattctgtagccactggggtattgttgttcttgggtaggaaagactatggccccccagttatgtttgaaattgcaagggtcacagaggcgactattcgaataatttgtctcattatagttgagcttctcttcagtccttcaagagcagaaactcttgcaaagcttgaaatactgaagatcattcaactatttggaagctacattgaaagaatagttaattttcctcaatggaaaaacccgttggcttcttcaagagtgctgaaagaaaggcagcatcagttgaaatgccatgtagaaaaactggagaagttcattgtagaacctaagatggtgcccgattttcggtttgtgccctttaatggggctacctatcataagctcttagggtcattttcaacattggtgaatattttacagttcgtgatctataagatataagatagagttcatctcagaaacatcactaagacttggaggtgatttagaagacaccctgaagaaaagttaacaatgatctagagcttttcaataacagtattgcctctgaacaaccttgaagaaataactttaactatcattaatacccaccacaagttgaaaaagaagttgcaaagaagacaaaagttaccaatccacattgagatgggacaatctaaatgcgaagaaaatcctcattcaacatttggaggaagttgttgacaagatttatagtagagaaggtacagaaaaagtaaatagacaaatttgtcttagtttcattggtcttggctttcgcatccatagtttgactaaagaagctaagaatatcgagaaagaagttagaaaacacaaatgggagcataaatttttaatcttgtgtaaacttttaagtaaaaattatgtgccattgtataaaatatgagtactacccacatagtcacctaataaataaaagggtgtgcttcacttgatactacctctattgtgataatctcaaaaaaaaaatctctcttacaaaaaatcaaagagttatgaaataattatgctaacattttattttccaataaaaaactaacatttttttgatgtaagaattttttaatcccttatgtattatgtattgca

SEQ ID NO: 195189 - DNA, 1905 bp, Cannabis indica
catttagtaccttgtgttttcgtgaaaaacatattttgtacctcgtgttttcaataatacttaattggtacctcatattttcaaattatacatatttagtaccctaaaatttaatcaatacaattttattaatttaaccaaacagatcttagttatatgtaatcaaataattaaatttgaattcagaattcataaaattttagacagtttgattgtattgataaagttttatcaaaaaaatttgaatttagggtaccaaacatgtatgattttaaaatacagggtaccaaataagcataattaaaaacatagggtacctaacttgtatttagataaaacatagggtaccaaatgtgtagacacccaagcaaacagagtgtagagtacacattccccaatatctccactctaccccatactccaaacagccctttaggagtattgcatgttgaggaagaataaaatcacaagcaatattgcaattaggatgattaatcacaatatcaataaacacaggaagaaactcaaagataaacaaaggagaagaatgaacgaaatcctagaagataaattggttcgagataaactaattttgaagaatgaagacttgacacaatgaagattgctgtccacaagctctattccaagccttctcctagagttgcttgaggtttcaaccaaatagaataagtttgggattaacaagccttgaaaatcatataggttaagcaatttgatgattttcttgaagaaaattactaatcttgagagctaagagagagaggtttagatagagtgttgaaaagtgtgatcaaagctttccaactgtaatgaattcttaaatagtgtaggaactaccattggtttcatgcattgttgggtgacatgtcgcccaaacatgtactatgtagggtgacatgccacccaaactcactgtccaaattgagaaatcacactttgacatctccaaatgctcccaaacttcttgggtagcccatatatgctccaaagcaacactcaaaagtcaaatttcacatccttattatgtgagattatttaaggtttatgcaccactttgtgcttagccttttcactaggtatttaaccaactctaacattggggtcaattgatggttttctcatccaccaaaacttttcaagacaaacattgaagttgatatttttttattttatattttgtattctttcgatttgttattgtttgaatgttgcttatctaaggcgaagactcatgttcttttcacctgtcatttcaaaacagggatttgggatatgggctcgatctatagcaatttggatgctgcttaatgttcatataattacccaggtaacaagtcgctagctatctttcgctcaagtgaggtagtggtttcccaatcaattaattgcagaataagagtttcccttttgattggaattcagaatatcatttctttcctggttttttattcttttgtggttggctattctgctggccttttgggtttctaatttgttttttcctggccttcttttgggggctggtctcgtaagagggagaaaaaaaaatagagttctcaatataattactatttgcagctgattgttttgatggtgttttctactttctagtaggttgttgttgtccactgtgtttggtttctgctgcaacttgcagtgatctaattctttttcccctcaagttcaattaaattgattattttttgttgttgctgaatagtttgtgtgcaccagaattttgatgcaacatatatatatatatatatatatatatatatatatatgtatattatatgagcccacgggtgggtttatttactctacttcaggttccaacttgattgcttttgggtggttattatttttgaaaaaagagaaggaggc

SEQ ID NO: 195190 - DNA, 1779 bp, Cannabis indica
tggtcagtcttgacatacttctaaaagtgcgagttattttcctaatgaggaatttaatttttcgtttcaaattattgcactcattagtatcatgaacatagtctacatggaagcgataatatttggtggtatccctcttgctcatatctttcttcatgggataaggtctcttgtatgacaccatggattgggttgtcataaagatggtttttatatcctcggtaaggatagtaaagacagtgaactttgaggcattctctcaaagatgctactcgaagttattgttgaacttgcctttcttcccattaccttgttggttgtcattacttgaccttttaccactctcacctgatctgctattgttatgagaattttgattctgctggacggatgtattggcagcagtggtgtgtgaatggttcttttctgaccaattgtatctacacaccaaactacttctttgagctttataaatccatgaactcaatctaagaactatcccattgaccctaaagtgagcattttaatgtcttttcataattctccaagaggtttaattcctcctaggatggtggccaacttcccttcctcggttagccctttcacctttgtggctttaatcaaaaatctgttgatgtaggctctcaaaggctctcccgatacttgctttactttgactaggtcttctaagtgagacaggagtttcctaaaaaaggagaactgtgcgtgaaattttcccatgaaggaatttcatgagttaaattttcctagagctaacttgaagtaccactgctgggcaacctccacaaaggttgctagaaagattttacaccatacatcaccctttactgcctgcaagtccatttgcatttcaaagtacttgatgtggggtagaggatcatccttgcccgtgtctattttccgtgttgacattttgaacttgggcggcagatcaagggtgttaaattctggtgaaaaaggtgattctctagtctagttaagttctaggtctgcgagttttgggtcggctaagctttgtacaaggctcttaagttgatctatttaggcttgcaccactggatcaacttgacatgcctgttgaccaacttgtgtcacttgtggacctcttagaacattgtcgggcacacagttatttagattgactgctgagcattaggagagatctgttgaccattctgtccccttctgcgatttagatcacctcttaaatcgtgtacggatcccaatctgttgatggctgaaacacctagtggccttcttgttcggttgttttaaaaaattgattagtttggtatattcgtcagaggacgaatgttatactgaccattcccccaagataatgcacttgcaagacctactcatctagtgtgtggcccaaagtttgatcttgtggcctcagattggacaacccattaccttgggtctgttgagtattactagtcggacattcttctagcatgtactgtgatccttcagggatatagatgtttgttttatttggatcctgaataactggactattccccactaattattgtccagctagttgataagctcgcctaatcaacacgtggcctgcctagagcgattatcgattgtcgcatgttaggctctcataattgccatttattgatccatccactcttggaattggagcttttattgttagaacgcaaaattcacagttgctcaagtgtcttactgatcgtggtgaagattgtcggtatgttctttcccctgccctagtgaagctcacaa

SEQ ID NO: 195191 - DNA, 2750 bp, Cannabis indica
ctatctggctcgaaaaacttaatgggtcgagttagtacacaaactaaaaactaagaggacgtttagtatgaggtgtttaaaataatttgattaattagaataataaataacgaatataattatttgtaaacttaaaattgtttttgattatgcattatctaattaaattactgttaattggattatattatttagctaaataaatgaatatgatgaagtgttgtaaaaagttatataaaaaatattaatatattaagttcatagtattaagattgaaaggaatagttatactagggtaatcttatttccaaactaataattttttaaaacttaaaaatagaaaaacctcatatcaaatatggtgtaatgtaaaacatattgtaatatataaacgcttaattcaaaaaaaaatatagtaatgtaaaaaattaccattcctataaaaagattatattataccaaacagccctaaatgcaatttcatatttatgtaagcattattattattattattagagaagaactaagtagagaagatgaagacagattcatttttataattaatatctgaactggagacaaaaaaaaatgtctttcgattgggtccgacccaacctgaaagaaaaagtagtgggccaggtcagtgcgaagacccgaatagcgatccgcttgttttgggtcgcggccacccgacccaacacacaaaaaaacccattttgccctcccctaaagaggtgcattgtagtttcacccatatccaagagagaataacaatattagaacttacagggccattgtaatccagaagacgggtacaatacacctctgcttcttcaaatctcttaacattcttgtagtgagtagcaagaaaaaacaaagcttcaaccatattgggtccttctctgtcttcatcttccatcctttccaaatccattttgtagtaaaacgccgcctcttcagaacgcccaagctcatgatgtagcttagctaactggcacaatgcaatagcttccctatcattgccattaactgcccttttgtaacacttaattgcttcatcaagcattcgaagctgatcggtttcataacaccgggccatggcgatccacaaccgagaatcattcggttgcaagaaaacagatttcttgaagtaatgaagagcatagtagtgcatacccatcatctcataagcttggcctaatccataccaagctcgataatcgcatgaatttatggcgataagcatcaacagcagcaggagtatttttcatttcaacatactcatgtcccatcagtgtccaagctgacaaataatttttatccaatttcaatgctctttcgaagtataaaaccgatttttcatgctgcccttttaagctgtaataattcccaattatgcaacacgattcgggtctgtatttatctgtcatgaacaccctatgggctaggaaactcagggcagcaaaacattcctttgcataaagcacattagaatacatatccatgtcctcaactcgatacggatcattttccttaaaagttcttcgaaaatcgcttcgactacttcaaattcccttaaactgtactgagctttagcaatttgagcctgaatgtagttactaaagctgaaggtaccctgcaaatactcatattttgctaaggactcattatgcattcttatttcttagtaggcactagcaagaaagaagtccttcatccaatggttattgagattaaggttgttcaacatgtcaatggtagtacataaggactgcaacttcgaccaagcatcccaattccacgggtagttattcaccgattcaacaagaaccgaacgagcaagattctcattgccttcctctttgagcacaattccatacaaatataaaccgaaaggatcaatcgtgccattctcgaagtgtcgatagctccctctccaaagaaactagttcgcggttcacagcactactcttacctaatggtccctcgagttctatcgtttcttcctctttgagcttttctccagcctccattaacaaaaaataaataataatgagaaaaatggtgagtaaatcatattactaagagtacaaatacatacaagggcattgcaatctcaagtctcaaccaataacaaacatcatataaatcatcatagtagatgccaacaattaaattcctaagagaattaagtgatcaaataaagttaacagcaaagataatgattttttgatgctcaatctagattttaatggcatcttctaccttttcaaaacctttaaatttaatcaacaaacaagcaccatacttgtctagtatattaaatgtgctattttactagctaatgaggatatgcaattatagaatcaacagccaggaaccaaatattatggcatagatgcttgaaatattgtgtgttaagacaaattagataagagattttctagacaaaggaaagatagaaagaatgtgggaaaaccagatattgccctaccatattctctacagtgaaaaaatgacttagccaataggtaaaaatcaccatccacaatctcatcttcctccattaaaggagtagatacataagacacaccagttggtggagttagggcaatatcatcggtgcagaatctgcgccgaatgctagagcttccacgttggaatctggtgtttgcaggcattaacttcgcctggtctaactcaatactcacaagttgttctaatgccctgcaaaaaaaaaaaaaaacaaa

SEQ ID NO: 195192 - DNA, 864 bp, Cannabis indica
aaaaaaaattttttaaaaaaaaaaaaaaaaaaaagaaaaaaaaaagcagaagaagtttgcgctattgactgggtccacaaatcccttgtcattttccaatgatgcattttcagtttatttctttacgtagcaaggaaagaattgatatataaagggaatcgtggttttggatggctgatatagtaacgaaactttttcatgcctcagttatttctaccaaagagaagaaagaaaccattatatacaataatgcaagtaagagcatatgaaggcggtgcttagttttggatgccattaaatttttccgcaagtcccaattgaccagttaacacttatagccagcttgagcttggagcagcatctctttctctctgtctcatataacagtctctctttagtcaaattgcaatattataacattggtcaatgataattgaaccacttggtcaagcagatgcaagctttttatgcagaaaataaataagaaagacttgacattgattggttgaattgcatcttaattgactaatataggacactctttgatcacatgtcagttaattattatatcggacgcttgggatatgaattcttaaaactattctaggccaaactccatattcaattcattgggaacaacctgcagatgactagttaaaaatatttccacacttcaaacttccagtgtcactaaagttgaaagtacataaattttcaattcgtattcttgttcaggaagaattcacaatcttggttcacttaaaagaaagttaagaatcgtgttttcaataacctacggcagtctggttagcaattggtaactgaaaagaagaaaataaataacccgagagagagagagagaga

SEQ ID NO: 195193 - DNA, 1337 bp, Cannabis indica
ctttctctctctctctatcttctatttttatcttcattttctcttaaacattttgtttgtttccttagaaaaattacagagaaactatttgtggaaggcaataataataaaacatggcttatgaatagttaataaattaatattcatccaattcatttgtgaggctcttatgcattcacatttataattcaagcttttcttattttaatattggaatgtaactgtagaaaaattgactttatgtttgatttgaaagaaattaaaatggaatgcttacaaaaattattcaatgtatctaaaattgaagtcaaattttgacaaattttttaggtagaaaaaatgaaagaaaattatcaaaatatatatacttgtgtatatatatatttaaagtaaatggaaatatttattaataggttaatcatataaaatttattatatgaaaaaggtttggtgttgcggaacataattaattgaaatgtgaaaatatgtctagtgttgctttggaaaaaaattatctcggggtcaagtggatgtgctggagggacctcttctttaagagcattaattgttgtgggcgagtatgaacaccaaaggagggtcaatactcgtgtaaagaggcatttggacgagtactggccgtaggaaagtgtcaatacttgtgtgacaagtttggtgaggctcctccttagacaaaacctaccatattagtattgaccatgggatagggttagtactcgtgtagcttgatgtgtggctagtgctgaccctatgttgttgtcagtactcgtgtactccttttataattggacatcttgagttatttttgacaagtccttgatggttggtaggtagacattctctaggattttgagcttcaaaactctaagatttccttaaccataagcttacaagtactgctgcaaagggatggtcaatactcgtgtatgaaacttgcacatctttgtcatttttgaagtgatcattgatgttggagataaccatttgaccactattctttttgtcttcaccttagggcgagtactgaccattcttgagtgtcagtgctcatgtgatatacgagtattgcctcttggggagtatcaatactcatgtagcaccatttacctccatttcttgtgcaactttgactttatagtagtattcttagatacatgtttgttgtgtattatgacaagtagttaatatatttagcagttagtagttagtttagcttctggttttactaaactacccctgcacattagttaagttcttcattaaatagtcttaattaattcctattaaaactaaccattttgatgtaatcattcttacat

SEQ ID NO: 195194 - DNA, 938 bp, Cannabis indica
cccaatacatcacatgaaagttttttattttattttcttgggtaagtaagtttagagctcatgaaatttttcagtatataaattatatataactagagtaaatttttttattaattaatgaaatatttactaatagagattcatatttcattgacaaattaataatatttgcatgtatattatatatatgtgaaaacaatatctcacaatatagtactattatgaaatttattgactacatagtagtaatcataagacttacaagtataattaattaaccacatattttttagtcataataatattattatgaaatcaaatagcattgcatggagaaggattttgtttgccaattgtctttggtttgatatttttgcacttggaagtgatagggccttctggtccattatattttaaatcaatgttttcaattgtaacattttggcatggatatccactactacaaattaagtttattgcaagtgctgatgtagaagtaccatgaatatttttgaatgtaacatctttcagcttaattttggatggaacctgaaaattataaataatatggttagaactataatacaataaatatataggggttttttaaaaaatatatatatttttttatattttatttacaattttatgacctaaagtttttatttataaaaatacgattttaaaattctaaaataactaaaaaaacaacgaaaaaaatcaaccctttaacaactataaataaattataaaacaaagatatttagcaatttattttgtttatactgaagtctgtatttttataaataaaaaagtttaaacatcaaaataaaattttatccatatcaacgtatttttgtattttttttagtttatgatctattatgtaaaattttcataatatgcatgcatttggatatagtaaccaataattgatt

SEQ ID NO: 195195 - DNA, 2732 bp, Cannabis indica
caaacaaggacgtgagggcaagtgctgtaattaattaacatcattaattttaagatattgcttaaccctacaattagaccagggattattatatattatttcctaattattattatatctgtatgaaatattcaccaaattgaaatgattaacagagacagctaactttttgttgtctttacgaggctgacaatatgaaatgcatgatttaaacacaatttgtgctgcactacaaagaataagttgcatggtttcccaattttgtcggttccaacgtaagaaattatttgttagattgatgagatatataatatttgttattaatgaaattatttctttctttttttttttttgtatcatatatatacgacataaattttataatattaatttcttctttccctctataatttaacaattatactgtcgtattaatattataatcattttaagaatcttatacgtactgatttgtatctaaaaaatgagctaactatttctaagcgaggaaacatttataaacataaaatatatatatttttttttatttatatatgatgatgacattaaatatatacatattgcccttagcatttgcttaaagtaatattttcacaacagtaaaaccaaatagaaatctaaatacttgatgccacaaatagaattattttggtttttgtcatcttcatcaaacaataaatcatcaaaatctcctctcatcatcttttttaacacgatatcaatttagttggtactggaactttataattgaccacatgcacataaaaaaaacatatatatatatatcatcattataatttagctcaagagctatttcattaaagatcagactaaaaaaataaattaactatgaccaaataagattttagagcatcaatttttgatagataaatatataaaggataattaaattcatataaagaatactatgcaaaaagcagaattttactttgggtaaacttcaagtgtggttccctcctatatatttagtcttcttctccaatgttataataaatatatataagataattaaattcatacaataaacttacacaaaaattactgggtttggtatttttcttctggatttgaaatgaattcgacaatttttagtgtagttgccatcttgtgtttgtcgaaggaaaatggcgaattgttttttcttacagataataataaaattattaatatttttttgaaaaaataaaattattaatattattattgacgttattttcaataaattattaaatagtatattaaattttacatcaatatttcataattgtgtattggggcacaaaaacaaaagctgatggaaaattgccactaaactatcttttttttcccaaaattgagctatattttccatttcgattaaagatagtcttagttagctaattgaaggtatcttcctgtgttcaatcagaccctaacgaatttaactacactacaagaaagcggttagcgaagacttcattaattaatattaacaattgaccattagttcttgcttttaccatgtttactctggcttagattttcataaaaattctcttttaatcacactagcatttatctaatataattacatttgaccattttaagtttgaacagaatctatatttgatcgaaccatgaccatgagtcattgccatttaggaatgggcctaaagatatcgatacaggggaagatcatttagccaaacgaactgcccattctgaccgttgataaggacagattgtacttttttttttcttttgacaaatacatatattgtacatttttctttttgtattttggcaaattcaaatttttggtttggaatctgaccatttaatgaaccaaatattatatacaaacccaaatccaccgttaagaggttcatatgtgtattatatgtatacaaaactaattaatatattaaatatcaatgagcaatattgagcacacccacccttgtgtggagcaagtgccaaaatatatattaggctattagccttttattcactcctgggcccttttgcccttcttaagtcaactcttttgaatttgaattgtcctgtctgtgctcttgagtcttgaccaactttgagtagacttgcaacttgcaagttgggtcaaccatgcatgtagtcaaacatagaaaactttcccaacccaaaggccaaagcccatttattcctaattgattttcgtttcttttttccccctttaattcttctttctctaagtttcttgtgttaaatttgttctcttttcagcttgactgtttcatggattatttagacttcagtagtaatccacattaaataaaataatccttcatgtgcccttgaaaaatatactagcatataaatatatatatatatatattattgagttcatggcttgtgtgattggtttagtggaagaatcaagaatttattaacttgaatgattgtgcatgaaaaggaaacttttaatttttagtgacataaaacttacgacttttcttctcatctatgagttttttaactatgtggacagcattcacgtagctactgggcccaaaaagatgaaattatttcttggagaccggagattttgtataccaaaacagcagagcatgtaaagaaatgagtcatgagggtgcattctttactctgcacctcaacagcagactcccctgcctcctggacgatatctgcctcgtgggaacttttgtggt

SEQ ID NO: 195196 - DNA, 1167 bp, Cannabis indica
taagaatgttatgaaattaataacttcacatgaatttatgcaagaatatgagtgattgaaaagaaaatgataaatgtaaaaagtcaatatgctacaactttcccttaaaacagaagaaagaaagcaataatttattcttcacacaacttttgtcttccaactgttacattaacgaaaacggcgtgtgacatatgaaacctttttatgacaccaccaaatccaattggccttctaaagaatataattaaagatcaatcatcttttcatgtcaactaacaccatttatggtagaaattataaaaacagtttaatttcaatgggtgtttacatatagttgtttttttttttcaattttattttctggctcatggtcattggtcactatcaagttggcattacgtacacgatattaaaatttaacctaaatcttctcttaactaacaccattccacctcgaaatcaatatatttaaaccaacttatcattttttgacaaaagaacaattagagtgtacacatcacatcaaaatatattcatgaaaacgagcatgtattagagtttataatcaggtgtaacttagcatatatattgtatgtatttttaaattattagaatacataaaatcctattagatattctaaagtgtccaacatgtaaactatattaatatgatatgttacattgtaattggttagtacggttccttacatattcattaaattaaaatatggaactcgatattaaaatacactaataaatattcaccaactcctgtagcttttagcttaattaggattttcctaattaaatacgttggatatctgagctatgaggtggaaaattaatatatatactatcaaataatataggtgtaatcattctaaggctataataattaaagaaaaaacaggatttcagtaatttgtatttccttaaataaaaaatatttaaaaagaataagagagttatgtacatatagtatatattatcaatgtatatattgtcgtacatatgacgtaccatgaaatgagaaaaggttccggtaagctgttgtgaacattgataatgagattatcgttggtgaccgagtaaatgtcaggtcccggaaattgaccatttatcagaattccctgcaccaaaaaatttattagaccaaatgcttaatta

SEQ ID NO: 195197 - DNA, 1306 bp, Cannabis indica
  modified_base (1178)..(1178): a, c, t, g, unknown or other
atatatatatatatatgcatgccttggtagaaccaagaatagtaagatcccatatgagaaaatgccaaatacagaaagaagtaaagaacaagtagtatatatagtgatttaaaatcataatttttgactattatgtatatatatgatctctaaagtgaggaccctaaacaatttgcaaattgctgattatgatttacaatcaccttatcacaaacttctatggttacttgggattttgagccttaatatataatactttttactttaaaaaaatcgattatatatgtgtaactatacaaatatatcccaccaaaagattatcttgtctactccaagggtgctaccatgtccaaatctctcaatatcaaatattaaatctcatatttgtcttccttaagacatgaattagagtatgaccaatttcattatttttcccctcaaatcaaatttgaaccacattctttttggtttgtatggactgtgatgactttgtacctacatatatatatatagctatagctagctagagattcccattataacgttgtttcaattggaaatctactaaggaaacagtagtactaaaagctggaaatttctatatgtttttatcttttttctcttgtttttttctttcctctgtatagttccctaactttcttcctttcctctcataatttggcctcacatacaaacgaagactcttaaaaatattgctttgctttcactttaaattatttgaacaaattaaaatgtgtattcaatactcaaacctataacaattcccacttggggtgcactttttgttggccttttccacaacattaatttttttcttcttcttcttttttttttttaaataaaactaatttatgggtcccttttaattctttcctcaatttcatctctatctttcttccacccactccaatgttatacataaatatatatataaatatttatatatataaatattttcttttcttaaaactgatttttttaataactcattttaggcttagggtatacatacataccctataactataatatcttactatcaaaataataattcattttaatgagtttaattaaatattattttttaatttaatttttaagggtagttgttgttttcaaaattggtttgggaccccatattgcttcacaaaaaaaanaaaaaaaaaaaaaaaaaatcaaaaaatacaaaaagaaaattgagacccccatttagttagagttttcaatcaatttcaggtccaaactgttggagtccactctcatgttcccaattgtaatgacatgt

SEQ ID NO: 195198 - DNA, 2577 bp, Cannabis indica
aatcttgtttcttttccgcattaaatttttaaaattttaattagtttcttttttttgcaatgaaaattttgaataatttttagtattaaaaataaactttaaatattttgttacatgcataattatattttcttatacatgtaataagaaattgtttgaacgataaattattcataatttgccaattatgtaaaacgtcaattggtatattatgagagatgcaaaaacacaaacatcttaggaattcatctttattgtactaccatctacattaaaataatcaattaaattggtaaagtgtttttttttttcaattaactagaataagaaggttggagtgcttataatggtacatttagagagttacagtgttatttgatttgtgtgtaattggaggtaattacacaatttaacatgtttgtctgactatgtaattacactttaaccgtgtaattgaaagtgattgaggaattccaatcacactcttataaaatattaaattggaagtgacatcactgttgataatcattactgacgaataaggcatcctccactgacgaaatatttgtcctcattaaaacatataattcttgtaatgtctccgttaatgagaaattatatattaaatgtacttatttttttaattaatacacatataattataaataataattatatattaccaataatctgctaattatatttgttaattttcatgtctttacgtatattctttcgtacatgtaatatgaatgattcataaataaagaaaagaaaatgaaggaattaatttattgaattgatcatcacaaggagagaacttgtttattatttatagaaataaattatcatattattgcttatttctctatgcatctacaaacaatataaatgacccaaatattgagttagctagcctataaactctcccacaataatgactacataagagtgaaacatatgagaatgatgatcacttgtaaacaatcctcatacccttctctctaaggccttatattattaatttggccaatatagctaggtcaatctctcaactgatcgattgcatattaacaattgaaaataataaattaacaacaaataataattataaaaaatataattaagcgatctccatgcatttattgaggctctaatcgtacgtaattaattaatcaaatgaaatcgcagggaaacataggctgcatgaatgagttgagctcactgaatatgctatcatccccattcacaaagcttatgctcgaagaatcttggcattgttgatcctcataatatgcttgcatctcgtcagaaaatgcgcaagagagttgtacatgatcgtgacgatcatcagactcaggcagcaaaacagacgacgttggaggagatgaagacaaaggcgggcaattatcattacccgttgaagtcatctccatcatctccttaaacttagatgattgaagcaagaggcctagggctgacgtggcagtggcagccggacgaggctgaatcatctgttcggacgagattagggtttccccaataacattgcatgaaatgttttggaaatcatggaagaaactactacttaaccctagttgatgatcatcttgttgttgttggctaatgagaacattttgatcatgggttaataaagtggtagcctcgtgattaataatattagggtttggtaagctactattaattaagtttccattgatattattattattattaatatgagtggtagtggtagcattagtggtggtagtagtagtagtagtagaagtagtgttaggtttcaaccatttgatgtatcggctaaggtcaaagttagtgactgcattaagccctcggtactctattgctgccatgtcgtatgccgttgcagcttcttcttgtgtagctgaaaatataaaataattaaattataatttaattaatgttaattaaaatgtaatttttttatatatatatagtcatgattatgttaatatataatggggttggctaaacaaatacagtataaggtttggtgggactttggccaactaactataaatatatactgaccgatattctcttgatatctatctataaaatataagtaaagctatatatataggtttatagatactatatataaattgtttatatataataactttcctgtgcaacacgtaactaataattaatataattaatttaataataatatttaaaaagtattatatagctggtttttggttgagcaataatattagataatctccaattacgttattagttgcatggcattgttgagacatgttagttgttacattaatttacatattggcaaatctagctattatttaaatcgaaccatatatggatatgacatagttaaatataatttatttatagaattaatatttttttatcaaatttataaatatgtatttgttatatataattaaatacacatttcacattattcttagcctacgtacataaatatatatatatatatatttataatatgataattatttgaatgtaattagagaggatgtaaatgtaataaataattaccat

SEQ ID NO: 195199 - DNA, 1850 bp, Cannabis indica
atattgaaactgatgcttctcgggtctcacatgctttaaatagattaaattccgatttatcatgcttttctgatcttattatggatattcgttgtcttttgtcctctttccctcaagttttagttactcatgtgaaacgaactgctaaccaagcagcacatggcttagctaaatatgctttggggttggatgaagactctgtttggataggagaaattccctatcctgttttctctgatgttgtaactgattccaatttataatatcagtgaaatttctcaaaaaaaaaaaaaaaaaaactaaatcactatattaccttttttgaatggacgttataaaaatgactaaaatggtatttttgtaaattagttgagaatagtgtctagagataaaactctctaaagtaaaactggcacacaatatatataagttcaattaatgttttattattgaaagaagatgaaaattaatgacactttataattaatagggtaaatagcgacataagtacccaaagttttatgtttgtaagcggcataaacctaatatttatttttagcagcaaaagtacccaatgtttgtaaaactgtaatttttcttctaattttgtcagtacagactctgatattgtcttaaacagggcacgtataaggcttaaattttttatcatcgagtctagatagaaatatatagtatcagttacgtccaaatgttcttttaataaattcaaaacaaagtctgtactgataaaactggaagaaaattacagttttacaaatattaggtacttatgctgctaaaaatagacattgagtttatgccgcttacaaacataaaactttgagtacttatgtcgctataataattatggtggtgttgttgtagcaatggtagctggaattgtcaatttctttgatttgatccataaattaattacatcactctacctattgttttagagtattattattggatattagtcttgtctaacattttttataagtagcgttgattagttattgatattcttaaaaagttattttttaaagttatataggactaatacttaattagggatatgattttgtcccgttattgtacttttacggattgtaatccgtgatgtacaacagccgtcaaatgagggaattatttgatctgacgactgagattgatttaggggtaattagggttaaaaagtaaaaacgtactctaacactcatttaatgtaccttgagacccatctaatgtaccacggaatacattccgtaaaagtacattacgggacaaaatcgtatccctacttaattatacaaatagtattatgatgccgaaaaaaatttttaaccaacaataatactttttaacaattttctggaattcctagataacattttcggccagcctagctaagccgcccctgcctcctaattaaatataaataatttcaccaaagttttgaatgttaataataaaaatttagggaaaaattatatcgttatattattttatataataaaatatagttagagacaatagtatttttgtcaagtagtaacatacaataggagtttatattttaatacaatcataaaaacgagttgtaaattcttaagtaatgatatcataaacttgttttacttttctctccacatttttactttttaaattagtaaaaagtgttactaatattatatttgaatgtgttacaatttgataggataataaggtccttatttttatatccttgactatattattatatataatacccttaggaatactcaattaaaaatttagtttcatatatacatagaatgagttaatattataattagtttttttttttt

SEQ ID NO: 195200 - DNA, 968 bp, Cannabis indica
atttttcttcttcgtcatctcgtttttttctctctatcttactctctgccagaaacctcccccaccaaaaaccctccaccccaataatctgaaaccaccatatccacatcgatcttttctttctctctacaacatactcaaactatcaccaccaagatcatatatgtctatctgtttccacgaaactaaggaaaaaaaaacttcatttgctacaagtttggacaacaaagagggtcgagatggatgacgatgaaggaggagtctaggcatggagatcgcactcttcttttgctatagatctaagttcttcacatttcttgatagaatatggagttttttggctgggcaattgattcttgactatagatttgagttattattgatttttattgtattttgggatagaaaatagagggtagttgtttgagtgttgaatttgggagcctctcaaacggagtttgaaattcggggcttaaaactcaaatttgggaaggaaaagaagagtttgaactcagatttgaggcttcgtatgtcgtagtagtgtaattagatgaaaaatatctcacaaatgagatgaggaacaatgaagaaaaaattttgtagggaaaaatctaaaagaaaaaaaatcatctggtataaagaaaaaaagaataaaaggaaaaaagataataaaaaacagcaaaaaagaagataaaaaatattaattgatttttaagataatttgtttggttttttatttaattttaattttttttaaattaaaattatgagttggaccaataagatattaacatgtggcactattaggatgaaacaaatcagttgaattgaggactaagaccatctccaataggaaatgcaaaaaattgatctatagttggcacaaaatatagttttgtgatatttttgcattaacttttaatattatgattcaatgcataattctaaatcttgatgtaaaatttaat

SEQ ID NO: 195201 - DNA, 1386 bp, Cannabis indica
ataattatctaactatatttagttggtcaaacttattatatattaacaatattgtttgtatatatatgtatacagaatacatttggagcaggtagaaaagcagtttcagtaagagtatcaggggacaaagctgcattttacaattgtagaattctctcatatcaagacactctcttggatgattctggaagacattacttcagtaattgttatatagaaggagctgttgatttcatttttggaagtgctgcttctctatttgaagtaataatcaaaagttttaattatttatttatatattataagttatatatatatattttctcttgttaatcatgtatgtgtgtatatttatagaaatgtcatgtgcactcattatctgaaagagatggagccataactgctcatcgaagagattcatcagcagagaaaacagggttcacatttttggggggcaaaatcagtggtgatggaggttgttttctgggtaggccttggggctctttctctcgagttgtgtttgcttacacttacatgtctaatcttataattccacaaggatggaatgactggggagaccagtccacccacaggtatattaattatattcatatatatgtaattaaaaatataaatctagttatatatgtttatattcgatagtgaaattaccgaatttactatgatagtgcataaaatgggtgagactcgtatcaaattgtaacaataataattacccactcaatttccatctaggtatttaacaatgccccttaaacatgtctctctctatataacataatcgttttattgtccattagtttcgatatcctcactcgtctgtcttactttgaaaaaaacaattacacattcttaataacattatggtacgtatgtgtcctataattaatttatttgattaatttgtttggtgatgatatgatcagtacggtgtactatggtgagtacaaatgttatggtcccggtgcgaataggtcgaagagagtagggtggtcacgtagcctaacaagtgatgaagctgcctcatatttgaccaaagacatgattggagggagagattggctcaggccttcaccaactcgattcaagacaccctctgctattatatctgccaaggatttaaacaatgaataattaaaaaaagaaaaacactattatacaacttacaagattattgttccctcaaattctaatttagcacacctgttattgcttcattcaatatgtataactattatatatctatttatatgtatatatatatgttatttatgtataactattattattagggaacgaatctacacttcacgggatcatttattgtaattttaatttttaagttgctaatctttttgtttgaat

SEQ ID NO: 195202 - DNA, 659 bp, Cannabis indica
aatgtgatacatggttatcatgatcttatatatccaataatatatacatcaattattgaatttattagtatgattattttgacggtggtaattgatagcattatattaagtcctctaattatatgtcaatataagtagccaacatattaattagtcaaatatgtttcgtacgtagatgttgatcgatccgtcaaggcctcaagcgccatcctctaatattcgataccctcttcttcgtatatattaattaatctcttcggcgcttttcaaatgagtattcaacacaccagtattactcaataccatctacaaataatactttatagttagttagttaatatatgatgcagataagtcttcttcaacttaaaaaaattgaccgtataattcttaaattcgctatttttataactctgctcttctttcctatattttacaattgttatctactttttcttgttgttatgttgttttcactagtagagattgtctcacttttgttgatgatttggccaagactatccgtacgcatggtttcattaggcataactctaaaggtgggggatttcccaatgtgaatgggggttgggtgaaggttggagagggtgggtggctgggtgaggattggaagacggccagagaagaaacatagaaaaaaa

SEQ ID NO: 195203 - DNA, 1481 bp, Cannabis indica
ttatttatttattcaaccttggttttgcaatatactaagaacatccaatctttgatcatcactaaggtgagtaggaaaatcaaccatgaaaacaactctcaaatcacctctactttttccttgatctttagccaaaggcataccttggtttggaacaatcttgacaaagccagggtaaataacatcatcaacaacactcaatttcatcttctcaccaccaaactagaggaatggagatttttacaaccagttagagctttcactaaaggattctaatggcgaattctaaatcgtcttcttctcttttgaacaattgatggcgtttctcggcgattatgaagatttatgtctgctgggaagagcctggcttctcattccccattccttcaaatgtgatctttgttccctttttccatcctggtttgacttttatggtcaacaattcttcttcttgtactattcttctatttaaatcaaaaaacaattgtatttagaaacttattatgtatcataaacaattcaaactgtatttccaatccaagcatatatgagtgattttttttaactttttcaaattcatatagatttgtatattataaaaaaaaaatagtagcacttatattattacgtaaacattattttttttttttccagaaaaaatatttattttttgagaaatttaatggaagtgttatttttgataaaatttttatacttttcatttaaatatatatccatttacattttttacagtattatataaaaattacaagaataccacatgaaaataacatgaaaacaatataaaaataatatacaaaaaataaaaaatcaacatctaaacaacaacaatataacaaaagtacaacataaaaataatgtgaaaacatcaaaatactaaataaatcataaaaactataaaaatatttaatattctatatatacgtatttttataattcatgttttgttatttttgtatttgtatgaaataatccctttttcttttcttccaatgggatcacacttgagatgagacacacctcgtctaacaccatctctacatttttcgactatttgtaaaaccattttgttaaaacttataaaaaataatatgcattttataaaaaaaacattataaaggtcctactttcaccaatttctttgttattggcaaattaatatattttgatgtcatttggttaataaccgaaatcctagggaaacttatgcgcgaatatggagtttctatggctttggttattagctaatagccaaagccatagaggctccattactccttcaattatcttttacacctttcgttttgcctggaatgcttttagtttcgaattttgttaaaatcgaagttaaacgacctgaaaattaaagctaaaggagagtattgttgtagtgtactctattaaaacttcttgatactcaacactttttagataggaatattttgtaaaaaaatatcaaa
